United States Patent Application Publication US 2013/0096032 A1 - sequence listing, part 31

SEQ ID NO: 1088 - DNA, 85710 bp, Arabidopsis thaliana
gaattcaagaagtttaaaaaggaaacggaaaacgtattgcatgtctcctccttttagatttaagaaaaccaagaaaccgattcaccagatgttagttatcagcttaatgaatgaactcatctaatttaatactcaagatttacctgaaaagcctccacaaagctgctaaggcttggatttggtgagaatacacaagtgtgattgcccagtgaagagccattatatgaagtgttgcaaaagtaatgacatctatgacaaatgcggcagatactgtggcaccaaaagtaattccaaggatggcaattactcttatcaaacaaaagatgaaagaagccatgaagacccagagagtagaccatatctgtattacattaagagataccatgcccaaaactccagccaattctgtatttaacttaaaacccgctggaactcccatcaaccacacactaccagaccgcaaaataccattcgtaaactcctttgcaaagtcgaatacaaatgagcagacagattcggtgttaaacagtagacctagaccaatcaagttccccaaaacaagatcaacagccatggccgaccatgtagaatgtctttgcagtgcagcttcctctgcatgtttcacacaggatatggaccttgagaaacccagaagaattgtcataaattaataatcgtgtgaaacttctcagaaaaatgacaaatgcattgcataaaggtatctagaattaaactttttttatttcccaagattagtaggtaagcagttgttgttagaaaaaaaaatatgaagatgcaattttgagccaagggcaaacagaaaaagtttacaaatctaactaaagaagaaaatttgggtatacggttgaacttacatcatgtcaatctcttcaaggaagattggccaatataagatctgacaactacgtatcctgaagttgatccatgtattcttgagtaccctcctcgatgcgatgtgcacccatgaaaaaatcagaaaacttgaaagtaaatagaagaattgggcaaggctataatacagacttgataaagagcctaaaattgtggcgagtaaccgccatgttaaagaagatatcctgaaaagcaagatagaagcagttggaacaactaacaacaaagaagaaaagaattcaacaaggcaaaaaaaaatatcacgagggcttacaagtaactaatggaaaagttctgggaagaagtctccagctgcgtggatatcttcttataggcaatcttggcagctgcggcgcaatttaaggaaagaataacagtttcctgcttacataagaatgagagaatattagtaacaagtcgagaaagaaacaccacaacaaagagaagcattttggaaactactcaaccatttcattcagaggtttcctattgtgaagatcatcaacccacttgggtttcttaagaggagcttttgtctgaggagaagaattcgaaaagcttaacgagaaatggtgagaaccaaacactggagtgtcatagactatgacctgacaatgacatgtccatgtttaagggagtcaaacactggcagcgtgtaggttcagaaaagaataaaacaagagaaagacatcatgacttacatacgtggacatcgcattgagatacaatatccccattccagtgtatatgatgcaatctagaacttgaatggaattccataattctatgctctgcagaatcatgcaccatatgaatccagtaatttctcacagaatctttcctgaaatcctctaataagccatcaaccttatgacaaccacaactgaggccactatatttgcaaggcctaacataagctccagccttgcgggacatatctttgtctcttataatctttgatacgtttccattagcattacggcttatatcataacgaccaaggagtgtaaatgctgccttgtcccgtaaagttgagggcatcttctcatttgtttcacggagtacatcctgttagaaatcacaaaagagaaacgtcgcatacactgtttatcaaaaagctagagaaaaaggattttttgttttgttgaggtggagttattacttggagcttagatccggcattggacaaggagctctcatcagagatgaaggacacaacaacgtcaagacaagaagaggaatggcaaacgaaccacccaaacaatagactgtgactcaaatcatcagttgatgcgagctgtttaggcaaccaaatcctacattttctcttcatttcagctctctgccacacaattcccaaaatgccaaacgaaagagaacaacatatcaacaagaatttgaaaaagtgaacataatacgagaaaattccaaaataaaagagagtaatttatcgatctaagaagacacaacttcaaatgtgaactagagaactatgtaagtaaagtaaaaccccagaaaaatactcgcatcgaagaagagacgatgagtagtatcaacttctacaaggcaattggcgatcggaaagatgaaccgagattcataacacaaatctgaaccctagaaattcttcaattcaacttaaatctaatcacgaaaagacgaacctcgtgtttcaggagagaaggaagtctagagtcgaaacttggttctgcaaccggaagaaagatacattccggcgacgagaccaacggcgacaaggggaagagatagatatttttcactatgggccgggcttttcttaataacgaggttcactggattaaacaaatttgaattcaaccaacactacacactttgttctttttgttacaatatagtggatttgtctaaattctcaactatgtctagaaataaactgtagaatttatttctaaaatagatttttattaatactgtactttggaaaaaagctgaggatgttattaaatgcttgaagatttcttagttaaaacatacaaacacacaaaatcttaaaagtactttgcttatttgataatccactaaaatcatatgaattttttaaaatgaattgaaataaataaatagtcgatgtggatttaaaattgttttaaaatacataaaccaatataaactttccaaaatgactacactgatgaaagctaataataagtcgatacaggttatactaagcaacactatcagagagaaaatctgtgctgtcttgttgcttcttcctcctacgagcatcaacaagcttactagaatgtgttccaagcacttcggtgatggcttttggcaaccagaagccaggccgctcaagatatggtgcgcggtcaataaccaatggttctctcaaggttacatcaatcccctgataagtccacaatgctagtgttgctgcacctttgaggcccagggataaccagccaagaccagccactgaaatgtctatgcttttcacgtcccagctatttcccgacacctgaatctccttctcttcccatgttcccaattcagacgctctgttctctccaattggtggctatacataaaagtaaaatgggttctccgttacattctgatgttgcggaaaagaggagatgcgcaagaaacaagctttacttacctgaaggcgtaaaccggaatggcccttgaatatttcttcggcattctctgtttttcctagatgcaatgaaacactatgtgatgcccatattgtaatgtatattgtttcaactgaagcagaaacgaggtctagcctgaccaggccaccaatgtgaacagactgtcctgcctgcaaatgaaagattcaacaaaatcagcttacttcttgcaataagaaattcttctacttgaagctgtataacagttcaagtaaattcttcttggaacagtgtactggtaaaaagaagctccagggtttagaacattagagattaagtcatcaattccaaaaccaaaggcttaaaaataagtaagacatagcttgccttgactctgtaactccgaggttgaacttccttccttatctctaccattttccgctcctctgaattcaatctcagggacataaggtagggatgcaaaaggccgggagtgtcatacatcttagcctttgcagacaatattccgccaattttcaatattccaagagttgttccaggaactggagcttccgtgagcctcgtgacctttgcaccatctttcttggataaggcattaatcaaagtagatttccccgcgttctgagctccaataacccacacatttcctcttggaccagccaactctttaatgtaagctaacagattcttaacaccaatatctttgcgagcactaaccatataaaccccacttagcttaggtgctcctccagccttggcacggtggcgcacccatcggtctaaccgagctggtgaaatctgtgtaggaagtaagtctacttttgttgcaacaagtacaagttttgggaggtttttgctacccttaggatcattttcagctttttgaagcacttgaaacagagacttggcagctcgtttgggaaacgaaccatcaaagtctacacaatcaacaaccatgactacaactgtagtgctggagttactcatcggtttgatcagtctagttgagatcaacctatcgaaatcaaaatcgggtaagagattctctgcagcctgattcttcacctggccataattcctcagagaatggcaacgagcacacacagtcacatcatcataattgtctttctttgcctcctctctagctatcttcttcctctctgttttggaaacccgtttcttcttctccttctcctcagtgacattaccatatccaacaccagccggagcaaaacatccaattcaacatcattcacttccttcttttcttcccactcatctgattcccattcaaacccactctcactttcagagttgctaccttctattgcattcttgatctcatcatccatttcatcatcttccccttcctcctcctcatcagcatcatcatcaaccatttcaaacccagcaagctcatcattttccacatgttcatcaccttccaagttattcgcaatgacctttctcttctgataatatccgggtaaatctggatcattgtcctgcataaaaatcccacaacctggacaaataatcttcccatagtcctcatcttcatctcttccttcgctcatgataagattttttgatttcttcggaaaaatcgtcccgttaacactctccacgctttgaacaacttgttctttcttcacagctaaacacataaccgaaactgcacatttcttcttcttctcattactcaatcctagtcaaaagttgagtactttctcagatatccatcacgaaaaccagaaacttaaaccgaatttcaggaagatgaaatttacctgagaaaaatggaacctcgggtctgtgtatcaaccggctaacgcgaaagtttccgtcttcaagctttggtttaacattgcaaatcgtcactgtacttgaaatcaaaaccaccatttcgtttgagagcgtgtcacttctgaattgggatgatatcgcgccgaaaatttgccgggataagcaactccgtcgacaggattagtcagagagaatcaaaacgcagcgtattggctcgagcctgacttcaatttttcaccttaaaccctacatataattacgtaaataccctccaaactcagatgaaacgtcgacaacgagacatagcgtaaaacactgattaccccagcaaataatttatctaatgattcgtataagttttgcaaattcggttttgttgattcgctttgtgtctatgtgactaaactttatgagaatgaaggagaattacgtggaagacattcgagactcaaattttaaaacagagtcttaaaggataaggttgtggtgacccattacgcggacaagaaacgaagcttaaaccccattttatattttagtcggagctccggtgaaataaaatggcggcaaagattattggtggatgctgctcatggcgacgcttttacaggaagagaacatcatctcgatttctgattttctctgttcgagcctctagttccatggatgacatggacaccgtctacaagcaattgggtatgtctctgttgagtttttaggagaagcaaaatagtaaatttggaactggttttaggaaatttgttctatacagattaaagttgagagctttatgattttggaaagttggtatatatttgttgagattttgaaaattttgtctcaggattgttttcactaaagaagaagattaaagatgttgttcttaaggctgagatgtttgcaccggatgctcttgagcttgaagaagagcagtggataaagcaagaagaaacaatgcgttactttgatttatgggatgatcccgctaaatctgatgagattcttctcaaattagctgatcgagctaaagcagtcgattccctcaaagacctcaaatacaaggttctttttgtttactctaacaaatcttcttgttttttttttgtatgaaagagatttagtttttaattgtgttttgttatttaggctgaagaagctaagctgatcatacaattgggtgagatggatgctatagattacagtctctttgagcaagcctatgattcatcactcgatgtaagtagatcgttgcatcactatgagatgtctaagcttcttagggatcaatatgacgctgaaggcgcttgtatgattatcaaatctggatctccaggcgcaaaatctcaggtcagtttcatcattctcaaggcacttacagtttccaactctttgcttgtaacttagtttctgtttgttcttaaacatattttgaggatttgcagatatggacagagcaagttgtaagtatgtatatcaaatgggcagaaaggctaggccaaaacgcgcgggtggctgagaaatgtagtttattgagtaataaaagtggcgtaagttcagccacgatagagtttgaattcgagtttgcttatggttatctcttaggtgagcgaggtgtgcaccgccttatcataagttccacttctaatgaggtatacattataagttataactctctttctcgtaactaatcactttcgtgtccattatcatggcccgggaaagaattaaaagaggttttctttgcgccaggaatgttcagcgactgttgatatcataccactattcttgagagcatctcctgattttgaagtaaaggaaggtgatttgattgtatcgtatcctgcaaaagaggatcacaaaatagctgagaatatggtttgtatccaccatattccgagtggagtaacactacaatcttcaggtattcttgagtgtgttgttagttgttacactttggtttactgcattttatgcagattatataacatgaggtttttgatgcaggagaaagaaaccggtttgcaaacaggatcaaagctctaaaccggttgaaggcgaagctacttgtgatagcaaaagagcaaaaggtttcggatgtaaataaaatcgacagcaagaacattttggaaccgcgggaagaaaccaggagttatgtctctaagggtcacaagatggtggttgatagaaaaaccggtttagagattctggacctgaaatcggtcttggatggaaacattggaccactccttggagctcatattagcatgagaagatcaattgatgcgatttaggcttaatcaattggtactttaattgctttttgttttgtatccaaaaagcaacaaatggttgcttgtgtgtgtatatatataaccttcttgtccagaaccatatatgattctaaccatcaaacaaagataagaattggtgactatgtgctatactctacaatatcaccatgaatacttcaaactagacttttgataaattttgaaacggttattaccaataaaacgaaaaccatgaaactcttgttttaattatcagattcgagaaagttgtgtacaaacatagctgagaagggatgtcatcgtgtcacgttgattacattatggaggtattttgattagccttttgttatgaaaaagtaaaaggtttggcagaaaactctataatatgttgtagagttgggcagaaactttcattactatcaaatatctagtaaatctaattactttacgttatccgaagactaattatttttatcagtttggcttagacttaaatgcatttcctcagctaattactttaataaattaaaagctcgttggattcgtattaaaaaaaaatctaatttattgtttaccaaagttttctatgggcatttaagtatttgaatttaaagttatcgacttttgactacattgtaatactcttggaaatattcaaaactacatctcttagtatataatataacaaaattcactagaccagttgtgtgtttagaaacataaaattaaaatactaaaaactatatatgatacatatcaatccaagaatatgtgaactcataataattcattaatttaacgtgattatttttctaattatatcaacatttgacataatttttagttaataaattaattcaatatagaaaaaaaaaaaaaactcatatgggcttgaaatattttataccaaattaatgatgtattatttcgttttatcattttaattttattggaggtagtatatgtgtatttcattcaacaacgaaaaaaaggaaaatcatattttgattaaaattgaaataggaagaaaataagaagaaagtgacaacaacagacaaacggctccgtcaccaaattgacgagagagactctctcctttcaaactctttttcagtttcaacttcttcgtctccctcccacaccacctctacatatatacattcgattcacagtctatatatcttcttcttctatgcctctggcgtttctctcgcatggcgggtctatactcttcctcctcctcctcgaaacccactctgtcttcttctccttcttcatcatcttcctcgcgtcttttcctgctcgtgacccttcttcctctctctctcgcctgtttcgccttcgttctccaatggcgtggcggtctcgacgaccccgttacgcattggtcaatagatcatcacgagtttcccggaatggttacaacccaagagaaacggtctctgcgtcgttcagtttctgattcgggttgcgttgatcttctaggtcagagtcgttccccttcgtttccttatttccggaattggaaatttgattaccactcggatctgaaacccagggtaagcccttgtgattcaattttgggttttcctgatttaatttgatctaagcgtgttcatatcttctgatttccatatatcgttgatccttggtactttgattatgaaaagattgtgactttgtgcaaaaatggtagatatgcattacaacaagcacttctgctggcttagagcaaacattgccatggatttactttcacaaagttattggagtttcaacattttatctatttgttgaggggaaggctgcatctccaaatgtgtctcgagttttggagaccatccctgtaagctctggagcttatgaatgatccctttatttgtttttctgacttagtattttcttactgctaatacgttctgttttgcagggtgtaaaagttatttacaggacaaaggaattagaagaaaaacaggctaaaaggtatttctctggtctgcatctttgtggatattggtaatggatctgctgtgatttcattgtgtcacttatgaaacttgggattttgttcctttacttttagatctataaatccactaacgtgattttttcaacagccggatatggaatgagacttggctgtcgagcttcttctacaaaccgtgtaactatgaattattcgtgaaacagtccttgaacatggaaatggcaatcaccatggctcaggtatctcttactttttaccatatttgttgaatatggtttgtggtaatagcactagataatgtaaaaaagccaacggtctctcagactctcacgccattttatgcggtgtatttaggacgctggtatggaatggatcattcatcttgacactgatgagcttatacatccttctggaacccatgaatattctttacgcaagttgctgggaaatatttctgcagacgtggatgtagttatctttccaaattatgtgagtcttacagttgtttggatttcattttttatcttgcgaaaaaacttcttctggcttcatcagcattgtctgtttttcaggagagcagcgttgagagagatgatatcagggaacctttcagtgaggtataaaatttatcatctgaagctattttgccaacatgagaaattgttcacatgattgtttgtttacccaccataggtacattgctatctttatagatctaaaaactactctatttgttgcacattcattttattgtaggtatcaatgttcaagaagaattttgaccatcttctgagagatgtctactttggaaactataaagatgccactcgtggaaatccaaactatttcttaacctatggaaatgggaaagctgctgcccgtgttcaggaccatcttcgtcccaatggtgctcatcgatggcacaactacagaaagagtccaaagtatgctcttttctcgttaaattgtctatcatttgactctttgtatctggcattgcttccctctgtatataatatgttagattctactgcggtttattcaatagaagcttatagtgggacatggacgagcctaaggctgtcacttacaattgttttaaggtgctaactattttgtggctgattcatggcatcttttctacagtgaggtcaaacttgaagaagctgccgtgctgcactatacttatcccagattttcagatcttacttcaagacgtgatcgttgtggctgtaagcccactaaagtggatgtcaagagatgtttcatgctagagtttgacagagctgtgagtggagatttatagttttttgctttatatttcctgcatcgttttccgaaatatatagtcacagctcttggctatcacatgtaggcatttattattgcttcaacagcgagttcagaggaaatgctgcaatggtattaatatagatttaaatataatcactgctcttcatcccattttcaactgctgcaatctaaccagcttcactaatacaggtacagagagcatgttgtgtggactgatgaaaaattgaagttgaaactccttaggaagggaattctaacccgcatttatgctcccatggttagttccacaaactcaaaccacgctctttatttgacatgaacgatcagtgtttggttttccacaagctatcatctcttacaggttataatccaagagctaagagaagcgggtgtttttagctctgtggtaatcgcagctcacaagtctccttcgaagaactcttcaactgctgattcgacatcaggcattacccgagaatcatctcaggaaactggtaagaggagggtgttggaattccatcttgatgttgacggtgaatcccaagcatcagcggtaccaccacaatcgcctccaggcttggaagcaacccagatggaactataatatgaaacgtgtttacaaagggtgggattttttagaatgatttatgaacagttttgaacctgagctctggtgtacatttaggaaagttttcgtttaggttatacacacagatgattctacaggtgaagaggaatgtcatatagcaggggttgtatcatacttgatgattctataacttggaatacaaaatcattgtcttccagatcggactactagtcttcttttgtgctcctttatcttcatatgtacatgattgatcctcagcattacacacttgtggtttttctttcctctcgctctgttttgctaggtccttatcaattaggaaggttctgcaattacgtttccagaactcctgtcatcaagtatcaaattatctctctaccttccattcttcagatttatggttttcctgaaatgtgaagtttggtttctcaacatctttagcttcttatgagtcactcagctgatgtcacaaacagcttcatgttgacttaaaccttacagaaacttaatgtttcagactgagaacatgagcaataatttagaagagagtacttaagtcaaattagtagcaaccaggcattgacaagtactgataaggttgtggaccataacaaccaataagaacaacttaaaagaacttatacatgttggacgtatgatttagtagttactgcattgtttaaacttttcttgttaaaatctttcttacactttgatacaaaagaaaaagatggtcatattcttaaatactttatagtttgtgcctttttcatgtgatacataactctgaaatctaaaataaattcttattacatacagaaactattcaaggtggagacatttaggaaaccgtacaacacacagaaaccagtccacttaacattttaccaaattaataagtttaataatatcatctctaatccaaattttgaaccgccatggtttttgtaagccttgcgccgtcaaagtttagatatccgccatggtttgggaatgctgaaacgccgtaagagaagtttcacgctcagactcgtaccctttttgggtatactttcggatggctgattctatggatcttgttttgcgaagacgatgagccaagccaacgccatggtttgtgcgccgccgccgccatatctgccgtgatttgtgaattaaacgctgggacagaagtttgctactcgtagccttctttttgggtatgatatctgagctttgattccaaccgtcgagactaaagcatcccgtagtctcattgaaggtttcttctaactacagctatgcgatcaaggttctgaccacagcgagccttacaaaagtcaatgtaccttatgtagacagttgcattcttagcagtgagagaggactcactgggtggctccatagtttgaatggctactgacacaatcctcaagccggaaagatcatgatccgtggtggtcctatcagatatggcaacagaaagttccagatacagacgaatccagtcattggctcgcagctctgattcatcatccaccacgtaaaatcggtttctgttttcgaaagggttctccagcgggaactcaggcaagctacccatgcggtagaattctctttccaacgacgttttaatgattgtccctaaaatatacaatgatgaatgaaatactagttgttgtaataataataatgatgtgttaatgaacacgcctacccaagtaaggagtcacatgtagtataataataatttaattacctggacgacgtctttcagcaataaaggaggtcaaaacaagccggccacaagcttcttcataaacggaagtctgaaaagtaaaacgccttccactagatggctgcattgcaaccaaagtaatgtagaaacagcaagcaccagcagccagagtcctgttgtatctcttaacgtgagagagctttaagtttgtcccctgataaatcaaaaacgaaatttgaataaaaagaagagcaagagtggataaagaaagagaagaaaggaagacaagagtcttacactttgattaaaaaaaagatagtatagttagtaattgcctaattaatttcacaaagagagatgataatcaaagaagttaaataagtctatgggatgcattcttaatagtaatcttgttaacttctttcttacattatgagtctttgattatataaaaaaaaaagatattagtaatttgcctaatttcacatgaatcccatagacttatttatttctttatactttgcttttttgggcctttttgataattcataaataagtggtgttgatacgatgtcgtattgttgtgcgtgggcaagttgtaattaaatgctacaggctttgaagcttcagcgaaaagtggaagaagcaaatccagaggcggggaaccagaaatagccaacggatccgccatgactgctcgtaagagaactccttcagtgtccaattcggagaaactagctctacctgaacctgcatcttccccgacggttcagaagacctctgtttccggagaggatttccagctcgcgccgccgaaattgggcgtgattttcgtgatctcttcgcttctgtgttcgctttatctttaccttctctgtttccactacaatgttgacaatgagctcaagcgtccgatcctcattaacgctgggcttagcttggttggattctttgtcacactcaagttgattcctgtagctgctagatacgttctgaggcgtaatatgtttggttttgatatcaacaaaagaggcactcctcaaggagaagttagagtgtatgtttttccttcttagatttgtctttgtttagttctcagattagtgttcagcgtttttctagaaatggatgtctcttagatttgattttttgtataggaggaaaactatgagatgtctcattttctgattgatgttctatggatgtttacgcttgatttgatctcaggggacttaaagtcttttgatgtgcttattttcagcaatcttatttctttgtaggcctgagtcattgggaattgttgtcggtattgtcttcttgatagtggcgattgtatttcagttctttaatttcactgaagattcggtggtaagtgtcctggtctcaaaagctcaagcttgatcatttatttattgtgaactatgaacttggtagctcttggctcatttactttgaatgcaatttatcaatctggctaaatgactcggtgcagtggcttgtggagtataatgcagcactggcgtctatttgcttcatgatattgcttggatttgtagatgacgtccttgatgtgccttggagagtgtaggtgcagttctcattttgttggattaaaaattcatgatttagttttgttttcttattaactcttgtcaatttgcaggaaacttctcttgccatcttttgcaacccttccactgttgatggcttatgctggacatacaactatcgtcataccgaaacctttagtttcttatattggcttggaagtgtttgatctaggtacaattcatcttgtatatagtgttaaaccatcaatagctattttgaaattcatttccttagttgtatatttatcgtggcaggacgtatatataagttatatatggcgctactggctgtcttttgcacaaattctattaacattcacgctggtttgaatggccttgaaatcggtcaaaccgtagttattgcagctgctgtaagttctgctgtcaaaatgcgtcgcaatgcttcatttttttggtcccatttttccttctgttggtttctcgtaagtaaagttatgataaatctcagtaacttgtagattctgatacacaacgttatgcaaatcggagcatctgttgatactgagtatcatcaagctcatgccttctcaatctatcttactcagccattgatggcaacatccttggcaatgcttgcctacaattggtaatctttggatctttcaagtcattttctcttaaatcaatcaggtaaactagcaaagcagaatgctttctctaaccacgttcatgtcccctctttggtgatgttaggtacccttctgcagtttttgttggagacacttacacagtctttgctggaatgactatggcagttgttggcattctcggtcacttcaggtatacttctaaccataccgtccttattgcaatgtacttagattcatcatttacatttaacttatgtgtgagccttcaattaactaactacttatgaaactttgctttttgcagtgaaaccctgttaatcttttttcttcctcaagtgttgaactttttactgtcacttccgcaggtttgatacctttctccatctcacactttctgttacttttcaatacatttgaaagcatctaacttgctattgtataactcttcagcttgctggcattgtcaaatgtccacgacatcgtctccccaagtaagctattttttgtccatttttcataagaggcaaagccaacaagtaaacaacacatgactcttcctctctcttttttaaaccaggtatgatcctgctacgggactgttaacaggaacaaaagatgggacactcgtgaacgtctacttgaggatttttggtaggaaaacagaaaagtctctatgtattcatcttcttgttttccaggtaaacttgttaatgcccatattatcatctctaaatacaagttggtttattctgagagagagaaatcacaagattggtgttttgtgtgttctattgcaggctcttgcttgcgcattttgtttcatgcttaggcattttctagctggttggtacaaataaatctctgcaacatgaagaaactctaaacctgttcctcttttcatctctctctctgccttcacaaatcatacaaacacagaacttgttttgcttcatgtccaacaatctactagaatcatcgttttagttcacttatatagagagttttcatctaaaggcgagtgtatctcaacaatataaagccaatgaaatgaatcagaacaaatttgtcttggaatttaaatttaactacaaatgctgatcttattttgataactttgattaataaactaaataatttttagattaaagttttgctaatatagcatgcattaaatgaagtgtccatttacatatatttttgaattttaaaaatgcgcttttaatattagacagactactgtcgtactagaataataaagaatgtaataaaaaaatagaaggagaatcggaaaagaaacccacttatagaatgccatgtgtcaaaacataacaagcgaagtatgtttatatagtaagaaaactcttttgccctaaatatcccaaattgtcatatgttctttccttatgtggctctctcttctctttctctttctctttcctttttctctttcgatcaacaaaaccacatctctgaactgaaccaatttctcttctcccccttccggttatcggattaccagatctcgtttcccgcgatctagtttattctttgaaaaaggtaaatgttcaatttttttattttattcaaaatctcccctggattcaggagatgatgatttgaaattgacgatgatgtttgtgtgtaaaagtgatagaagcagaaatgggaaggggcaagatcgcgattaagaggatcaataactctacgagccgtcaggttacgttctcgaagcgaaggaatggattgttgaagaaagctaaggagcttgcgattctctgcgatgctgaggttggtgtcatcatcttctccagcaccggtaggctctacgatttctccagctccaggtaccttttttcttttctctttggttgactttttttttgggtcttggtccatctaattggttgattgattgatgtagcaaattctaaatctcgatttttttttttctttcttaagtcgatttcttgttaattgtttgcaaattcaattgctttagagaaggaatcgtagatcaacttagtctgataatttgcagaagaaatcacttggtttgaatgataatatgttttgtaaggggaatatgagagtgtgttctctgtgttgttggagatgattacgatatttgtgtggaacatagattgtgagggacttgtggtgtttattgaaacatactaaatttggtagaaactttatcagaagaggaaaggaggggagaaagtggttagtggttgaagaaaactctaaactctagagaggatttagaaagaatcgtctccttttcactgttcatttactttattggcaactagttggtgggtttgatgtacctaaaatgagctgcattatcttctcttaatatatattgttagtacacaagtgggggaatcatttctgatttcgttgtcatccataatcaagtttttgtttttttaattcttcaacttggtcatttgttaatgatatgtaggagtatagtctttctttttgggaacattttgcgatttgttagaaaaatattatatcttcaatcctttctgaatttctactttaggagttcattcatttctttatttgattgtatctttcgtgtttacataattgtttattaaaaaaggttgaataaaatctggctcttagatctgtttcagagggagaaagcttccattgttctgcagagcttttgttgtttctctgttttttgaactgagactctgtttttttctttttttctcttcaataaagacagcaagatatctatactgtttactgattagagttggctctatttacatcaattttgtctggcttctctcattctctgcttaaacttcatacattatgttagatttattgcgaatctgtagttggggtgctgagaatcctgttccatgtagacagagatggcttagggttaactaaatctatttaagtaagaaaatttgacactgaaagatgtaaggataaatgttgcagtggatgttgcttgggttacattacctatcaaccacactctacaactatgaaactactctcttttttggcagcatgaaatcggtcatagagagatacagcgatgccaaaggagaaaccagttcagaaaatgatcccgcttcagaaattcaggtactccttttttttgttactcctccctatggatttcaacgagtagacaaaacaagtaacatactacaacagagagactgttactcgattcttgtactaatatgttagcctattacaactcattagcatttctcaacttttaattcctctcaagctgatcctgatatctaatcagagttgcagaccataaataccaccacacatcatatgttgaagtagggtttgcagtttgctataaaacacaagtcatgccacctgaacatcagattgcatacatagtgttgcattttattttgtcaagaatccgttgtagactagataacatatttatccgaaaacaaaatacttgtttacagtttcaaacacctgaaaatcatttctactatattctagttctggcaaaaggaggctgcgattctaaagcgtcagctacataacttgcaagaaaaccaccggtatgttttgcatcctctgagtttgtcaaacactctcgatagtagtaacaactagagcagggaaatatgtactaaaatgcaaaatgataacatacgtgtagtccaaggttagaagattttgcagaacccaaaactatcctaccatttgcatttgcttagtaaggatagtcgatataaagaatagtaagccaaatggattaagagttgtatacataaacacatctaaaccatccataagaaggaaataaccaaacactttcacactccccatcgttttcttgttttgctttggtgaattaggaaatgtatatagtaactctggaaaagtatgcatattcagaagagcttgtacttgacaggcaaatgatgggggaggagctctctggactaagtgtagaagctttacagaatttggaaaatcagcttgaattgagccttcgtggcgttcgaatgaaaaaggttttgatgctgtgacaaataagtcaaattttggaaccatttagaagaagtaatggatgtactctatctacgctcttcttttgccttttgcaggatcaaatgttaatcgaagaaatacaagtacttaaccgagaggtgggactatggttactgtgatataggttttagacgttttccatagtgttggtaagcacattgctaattctttttttattcggttgcaggggaatctcgttcaccaagagaatttagacctccacaagaaagtaaacctaatgcaccaacagaacatggaactacatgaaaaggtacctttgggttttgggaagtatctgggagccaagatactctttaaaattgctagaacatttttttctttcttatctgatgataatatgtgcttattccaggtttcagaggtcgagggtgtgaaaatcgcaaacaagaattctcttctcacaaatggtctagacatgagagatacctcgaacgaacatgtccatcttcagctcagccaaccgcagcatgatcatgagacgcattcaaaagctatccaactcaactatttttccttcattgcataatataattcggtgtgccaacacacttatgttgacctcgtcggaatcatatcacaattcactgtgtcagcttgcctctgcataagcgaaaataaaaacataaacatgatcagtttgcattccatatctatcaaacaccagctttgtaacttttaaaactttttctccgtgcaaagacctttggtttggcgcttaagcatgtagtttgatgatcaaaggaaatgggtgttttagcataaagttgtcacccttccgttgcattttagcttcccatccaaatcaatttgtaaaatgtgagttagtttgcagcatgaaagctgattaaatatcagtcccgttatcacaagaggtaaacaatgaagagccacaacattgtaagacgcttaaataactaaaaagaccttagtatacttctggtagattatcatggttcatgaggaataatgacgagacgaaaatgtttaccaaagaaaacttaaaaccgaagtcgtcttaaaattattgaaaacataaaaccgaaaatgcatggagagttttaacttcttccttttttattcgtaggtaattgttctttctctgagatattcgaatattttaagagctatgaatattttaaggctagttttagatccatatattctacaaattctctagaatatgaaagtggacaattttcaaaagtccattctttcaattatctctactttgtggactattttgacagatttctttcttttcgtctaaaaatacaaaagaccatatgtttttgaacttaaatttatatcactaaactaaattgtgtcttaaataacatctcaaaatttattatatttttttctctaataaagtaaaactccataccttacacgttattatatgcaatgtgcctgaaacttaaagatgattgaacttatggtgtcaaagaagcggtaaggctaaatagtaccattttcggctcgtctataaaacgagacgaagatttaagtcaagaaattgattaatttcatcatatcatatgctttgaaaagtttaagaatgtgcgttttctaaacaagttgattgctagttataatattgaagagccctatattgaactgatgaagtaaaaacgtacttgacttttcttatttttctggtctcattagtctattccttactattacaataagctcccatactcttaggaaacctttacgatacaagtcatttatctcatatcgctttatcgtgaagtgtcttcaaggatattagttgaaattgacaacatacttaggctgtagatttggaagaaacagtccccaaaacttctcagtctcgggaccctgcttcgaattctcatcgaacatagcaaatatataagtctctgtagctctccctggtctcctcggagatccatttttcacagtttgtatcaaattgttcacataagttctcgcattatccacacccgtcgctgctcctcccgctgtcggccaaccactctcggacaccacgatctccaacgaaccacctccagctttctctaatgatgcgtaaacagtgtctaagattgcgtggaataggtttcgatattggttttgtccgtcattgactacagttgacggtgcggtgaacagagtgtagtctaaccggatgtctcgcatgtttcccgtgtagctgaagtaagggtaattattcacgagcagaggagattgcttgcttgacaagaaacttatcaccggtgcgataaagctcctaaactccggtgtgaacgtcccacttgacggcggaaacccggaaatgcctctggtgtctatagccgtcgagaccttgatcccgaggcttgaaactgctctctctatgttctgcatcgcggggaggacaaagctcgcagcttggtctgagggctgtacctcgttcccgacagagatgtagcgaaatgtgacgtttgcatagttgcggacgttgttgcggacccatgtgtcggcttccgcttggctggaggcgagacgctggagatcagggtttggaacatcgagcacgagctcgatattggagccgcggagagcgttgagagtctcctggttgggatcgtacagccgcatccgccggatgttccgttgttggtaaagcgccacgacttcggacgcgggtcgcaggttgtttccatttctcccgtagcacactccgatttgtccaacttaaaattcaaaagaagaatcattagtgaaaagaataaaattctgaaaacgaatcagaaagagaccaatgtggtataatcaataggttaaaagaagattgaacctgccgtgtcgaagaaggaagccaatatgaagctgagaagaagcaataacagtggtaatgaggctaagaaactggatccattacacatcttcatgattaatgttaagcttgcaactttatatactaaaatcgtagcattttgcactaatttatagaaggaatggagggattcaagtcaatgaatgaaacaaagtcatcgcgtcatatcatcatagttttggaatgttatacattaaatcaccgttcatgaatatctctctaaacctatgctttgaaaagtctaagaatgtgagttttctatacacgtagctttcaataggcctaactagctagctagacactaaaatcttcgagttaattggaacgaatcctccagagccccaaaataaaatatccactcttaaatattcaatgaataatataacatttttgaaaaatatataggccggatatcaaactatcttaagatattaattgaaatttcttttataataatcaggattatgaatcactaatcttccagaccaaatgcgggttatgaattctgtgaaccattcataaatagtttagatagatatcgaagctttaagtcctcgcgttttggagtcatggtacaagccaatggtgatgatggcctcatttcccgcatatggagcttttggcatttttccagtttttagtgtaataagttgaaatgtttcatcactcattctaaatttactatcaacctaagtaatgcattgcaatggccagcctcatttcacgcatatgggcagctgcaatgctgtttttttctgcgtagatagtagatacgtcccttattacattatctcaaaatatctaaataatcaaacaataagcgtacaactaaattttttgacgatatttatgtaaataagcaagaatcatctaactgcaagtggaccaacccatttagcttggtttacatttatggtactttattgacaaaaatattctagaaattaatgtttttgtattgatcaaaacaactagttacatttactcaataattgttttttcaaagtttgcccatttgaagataaccaactgttgttgaatcttttcttggtttatataactcctccttgaacaaggttattccaaacgataacctgatttgcattttctcctagtaattaacaatactcgaatccatgtagtgtttggttgtgtgctaccaccacacggtagtttttctctttcatctctcgaatggcaaaccgaagttccactgtgagtccatgcagccagaagaaataatcagcccaacttgttcttttaagtcacagtttaacaagtaaacgaacacaaatacattttaggattaaaaacacagtaagaagataaagagaacctacatggcattttgttcttctgctaattcgcttttttaacatatcaaggcaataattggcagaaaacaaacaatccatgagcaatttgtcatgcatggttttaacgtggaatttcttaggcacatgtatttgtcaaccatttcaaaaaccagtcggagatgttacatactgttatctttataataatttttggttcattcttttaatttgcatagttatggagggttcattttatgcctatattaacgaaccataagcataaagtgaaagtagaaaaaaaacaactataaacctaatttaaatattgctacgtcaaaactggtacctagttacattaaaagtgacatatttcttacttgtaatcaatatcattacaactaaaatcatgcttcataaattctaacaaatttattatacggaaataatcagtgatttaacctaccaaaataataataagcataatcagtggtttgacgtgtcaaacatataacatctaaaaatagtttaaaacaaatacggaagcttagctaaaaaatactatattacatttttgattattcaatgtacagtacttgtagtgaaatggaatcagaagtatatcatatgaaaatggacaatcgaaaatttgggataaaagaaatcaacatatacatatacgaccctaggtgctagaagcctagatacaacaaactaataccactgggcctaaaatgaatgagcccaacaaagaatttgagacttaatgtgagcccatttgaaacctaaacggcaatcggagcctaaaccaactaaaccgaaattttaccgatggctgctcaaagcttgcttgttttctccttcacataccgccaatttcactacgagacccgatcgtttaagtttggtccgcaggtaaactgctcgagtataacctcaatcagagacatagatttcttcttctcgatttggctacgatgattgctattaaaaagttatgagcttgatcgcttttagtcgtcgtactcgacattagcttttgtttgttagaaatgcttcttcttggctctcttctagttcgccacaagctaaattctcttaaagattgtgcagtcttttgtagttagaagcgttgataggaatagctgaaataccggcttctctaagctatacagctgagaaaacatccgtattccactgctctcgaataaagagattatcacagagagccagtagaggaacatgttgccacacaatcaataagagcagcaaaagatccaccacttgtgtttatggtactctgtgacgctcaaagttaagttcaggagttgcctgctaaagtctttttatatattttgaactttcaacttctttttcctccattttcatgtatttattgtttgggtcttgattctgcttcataaatgacacgttctcaggtggtctcgttaggagtggaggccttgtgtggttggtgtgtttacaagtttaacaactggtgtcgtggcctactatcccttagtacattgagctaaaagatttggtgacagggaaaggtctagtttaccatcttgtatattaggataagcaggtaagcttcatttactgtctacaggaacaataagcaggtaatcgctactttcaatcagtaattcaagaaattacagcagatctatggaaagccatataagtatactgtgtgatactaacaagtggtcaacactgattattatgtgcacatgagaatgtccatcaacttatatgcatagatcatcattcttttatccaagtgtagagaaaagaaaagaaagtccattgtgtaatgttttacttttaagagttgctaactactcttctttgtgacctccagtctaaaatttggttacttgagttgtgacatggtattgttgtctttactcttaagcactgttcattattcaggaggttaaaacaaagggctaatctggttggtgaattttccagcttgtgaataaaaaaaaaagtaaaagttgaatttagagcaaaaaacaagaaagtaattcgagctaagcaaagctgagttaaaagcaagggaaggtttacattggaaaaattgattaccaagttgcttgcgcgcttaggtttgttccaatagctgtaatttacctagattagtattatgagtttacaaaagcacatagcacacggtataacttgtaacattttacatcataccactaatgtaaatcaaaacaactttagtttgaagaactttttttaaaatagaaagtttgtcgcccgacatgctgattatatttgctatatataccgtaggaattcaccacatacaatacaataacaacatcaaagaagcttagttttgttgtctctctaataagtctttgatctaataagtctttcttataattctctaaaatgtcgacctcaccatatgaaaaattgagcgaacaggagaagaagcagatgattaaagagatccaggagcaggcctatgaggcgttgctatacgcatttggcgtggaaaagaaggtacatttcgaaattatggtattgagaatttaaaattttacattcgattcgtagctaattaattgttctttctctgaaaatttgttttcttaaaatgcttatagatgatcagtgatgatgtgaagaacctattgaacatcgaacaggagtctgcagaggaaaagaggaagatggcgtacgaagcaactctgcttgccgccacattcagtcattccttggcaaaagaccgcgatggtgtgttagctacgttgaagaatcaactccatataactgatgactttcacagggaatgccagaatcgtgtcaggaacaacattttagtcgtccaattgactggagaagcatccggctcgaattatgtaggcgaaacagggtggacgactctcaggcgtatcagcaacaccatcttccgcttttaagaagacatagaagtaattttaatttcatctaagtagtaattaaataccgtatttcattgtctctgatctctgcgaccgaacatacatcatcgtcgccgttgataaataaattatgagatcctattttttctacataaataaaagatgagatcctatgtccaaaaatattattttcattttatattatttcttataatttaacattgtttcacttcgcagtgtttgttactttctaatttctattatatatgatccattttttaccctgaaaaaatatctaaattttgcgaatgaaagatacttgagaacaaaaaaaaaaaagaaatgaacaattgtgttaaataaaacttgttaaaggacaaataggaagtatctctgcctctttcgtaagctcaatgtgttaatccgatatttcttctatatcttaaaatgatcgaaggaaacaagtgtaaaaaaaaaaaaaaagatgagcttcgtctagcgtctatcatagtttgaggaagaagcaaacttttgtctaaactataatatcacaagtcgtatctacatatgtaattcatacaaaacaacaacattcggcaataactaatagagaagaatgtgtgatttcctctaagcttccttcctttgctatatgaaattcgttccagatggatatatagtagctttcgaattcttgatccacctttactttaacagttcgtttacctaattctcaaactgattttgttttcttctaaatacgagaaaagcaattaaaatgtagaaaactttaacacatcttttacaagtcaaaaattattaaatgtgcgtagaagataatttaacacgtctttcttaacagagaaatgaccagcacattgtcaaaaaaaacttttattctgttatataagaaaatataccatttatacattccttttttttgggtatagtgttatactagttgactatttctctgtctttacttctcgctgtttacaacgttccccactttctcaaaattagaataaactagaatccagaataaaattgtaaacacaacaaaatagttataagacaaaaagcacggtcgttatcagttcgcgtacgacagtggtaaaacatgcactttaatcaatcgttctctccttgtatgtaaaatgtatgttgatagtaacaaaaaaaagaggtgagaagaagttcgccaagatgactcatcgcatcatgcatactcaaaaacattttgctaacaagaattccacaaaattttgggtctcacattccctaagcaagcttgttttattattgggcctataggcccatgctattttttttccttatttatgcttgcagctcatttataaccttaaaaataacaacatactacacgctgaaagcgcattaattattccttattactacaacaagttcccaatttttaaatacgcttacataaaaagcccacaagtctctaaggattagttgaaattaacttcatacttagactgtcgatctggatgaaacagtccccaaaacttctcatacgttggttccttcttattctcatcgaacatagcgaatatataagtctctatagctttccctggccttctcggtgatccattcttcacatgttgtatcaaattgttaacataagtctttgcgttttccacactcgtcccgactgctccctctgtgggccaaccggtctccgacaccacgatttccaacgatccgccccctgatttctccaatgctgcataaaccgagtcgagatttgcgtcgaataggttttggtatgagtaccctggatcgttatcaacagtggactgggcggtgaacagagcgtagtctagatggatgttggccgtgtctcccatgtagctgaagtaagggtagagattcacgagcaagggagattgcttgcttgccaagaaacctatcactggttcgagaaagctcttatactcatccctgaaccttccttgagacggaggagacgtatcagtggtggtgtcagtggctatagctgttgagaccttgacttcaagccctgctccagaaaccgcgttctcgatgttctgcattgcttgtaagagaaaccccccaactgagggtttcacctcatttccaacgttgatgtaccggaatctgacaccatctctgtagctctgaacgttttcttgaacccacttgtcggcctccgtttgactggaggcgagacgttcaagatctgaactgggaacgtcgaggatgagctcgatgtcagagccacggagagcggcaagagcgcctgggtcagggccgtagagccgcattcgctggatgttttgttgtttgtaaagagccacaacgtccgatggacttggcaaggtatcgcctagcatcccgtagcatactccgatttgtccagcttcattttccaaaataagaatcattaaattgaataaatttgtgaagatggagatgattaatagatgttacaatagcttaaaagatgactgaacctgtgtggttgaagaaggaagctattacaaggctgagaagaatcatcaacattggtggtgaggctaagctccttgattcagacattttcttgatttttctatgattctgtgaaaaatgatatgttttaatcattccatttaccgcctaatttatagagccaagcctggggtgcaactgtgcaagtcagtcaatgaatgaaatcaaatgatctatcaatatcatctgttttgttatgtttcaccttaatcaccattataattcacaaataactctctaaatatacgctttgaaaagtctaacaatatgagttttctacacaagtagctatcaatagggtttaactagctcaagacacacgtgtttaatatgatgaatcgcccaaaccaatttggttttaaaatatttaaatcgaaatggttgtttgattgttaattataattttcttttggtaataggttggatcatggtaatattggccgttaatcgtacgtcaagctagcgtgaaccaattaatacgtcgttagacccacaagccaagttcaattatggttagatgacttttgttcacagtaaatttcaagattgaaacgactttagtgactaaaatgtttaaggtgccatggatggttccaagaaccactgtgaacacaaatcatgcatctaaccagaattgaaattggcttgtgggtctaaggacgtatttaatggttacagttgacgatcttgtttttcatggtctcaaccttgtaaaacacgttcgtattaatttatttaatttctaccctaagcttgtgattttatattgtcgttttcccccttcatgatgaaccatttgacctttttggatttctgtatcaaccattaaaccaaaaagaaaagaattgtgaaaatttttctttcaattaattaatttggttcagtaaaacacaaggtgcatagaaaatccacgatgaatgtgaaatttctcttgtttattttcttatagagaagaaaatatcaaaatacaaatattaggatgtgaaagaaattgttgtaacgttaaaaagagatactatttatcgaaaataataaatatctactccatcaacaatacagcgtctatttttgtcgtccaaccgaattataccttcttgtttgggcaaaaaccgaaatagacgtttataagaaaattcctcggttttgaatatatatcactacacaactacgcaaaacacggcccttcataatttaacccttgtggtctgaaatttgtactaattctttttgttcttactcattttctaacctgctatgctgtaagaaactatttaaacctaggtaagttgagataactaattttgtataaattttaagagtctgattacacacgacttcagttttaaagacaggaagtataattttacttgttattgataaaggcattacaattaccaacacgttaacagtaaagtcttgttttaatgaagtcattacttgtaaatgataagtcattacagtccctcaaactttatttattgtataatgaatgatagtaccaatatctatattagttttcaaatataaatataccattcccttgatagaatattggttcggctcaataaaagttaatatcatacttaggctgcttgttgggatagaacaatccccaaaacttctcaacataaggaggagtcggcttttgattctcgtcataaatggcaaataaatatgtctcgatttctttccctggtctcttcggtgtcccattcttcacatgcttaatcaaattattgttataaattctcgcattctctatgtttgtatcggttcctcctcccgttggccatccagtctccgccacaactatttccaatgatgcgccacccgatttctctagagccgagtacatcgcatcgagcatcgcatcaaataggttttggtaagatctaggagggtccgaaacgattcctgaaggagccgtgaagagagcgtaatcgagccggatttggcctacattgcccgcgtagctgaagtaagtgtagaggtttaagagtaaaggagagttcttgcttaccaagaaacgtatgattggttccattaccaccataacatctcccctaaacgaacctttcgatggtggataagactctcggagcactcccatgtctaccgatgtggatacctgttaaattccgtacaattataataaaacagagttgaaacttacaatttttgttatataaagataaaaagaataaaacgcaattaagttcttaaccaaatttacactaaaacattgaatatctcctatttttaataagataagttcgcaaatgttgaacttaaaatgaaattttgattaatgctaaaaagaatatttatcttatgaaaatacgtaatcgatatatatgagtaatgattataccttgatacgaccaccgagtccggctgctaaaaccgcccggtcaatgttttccatggcagggactaggaactgtgcgtaagagtcggagattttaacttcattcccaacagatatgtaacggaacctgacgccattcgcgtagttcatgacgtaggtttgtacccacgcgttagcttgtgattggctcgaggccacgctctgtaggtaagagttgggaagacccagcgttacctcgatgttggagccacgtagggcggctagaacgtcgtggtccggactgtatagcctaactcgttggatgtttttctgtttgaagagcgcaatggtttctgctggtgaagggaggttgttgccgtttcttccatagcaaacgccgacttgtccacctgttaaatatcaatccaatatttaatacattcatcacatgtggcataattcatgagagaattaatgtgttactaaatatttcatgagagaattaatgtgttccttcttttgtcatagaactaaaaaccttagactttactacatgttaatcctaatattttttatttctaatgaattatttacattcttagcaaaaataaaaaagagaattaatgtgttactaaaatttagtgactctattttttttcattgttgttaatcataaaacatatctaatcatttgaatatttgttttcaacttttattttcaagtatttgaaacatcagtataagtggtaaattataatttcaatatttaaataattttgttttaaagctaaaaataatagttaaaaaggtctcaaaagttcaagatattgacatggtttgattactctatgtcagggtgatattataatataatcacacatgttatattttctatatacataatgaaataaagaggtattaagtgacctgttggatttgtattgacgaagaatagaccgagaagaagggtcaaggacgccaagaatcggagatccatcgtcgttaggtgaagaaagagatgatttgtagaaaattaagagcgaggtggaaatcatttactgttatgacattgatcctagctagcataaacaatatatatagtaaattctagagaaagaacattaatatataaccaaatgtaaaatgtcaatatgaaactaaaattaatacacggaattaggcaacaagataaaataatgagttggtaatctctgaataattaatacaatggtgtaatatatggtaagctacataatcagagacagagagagacatttgtctttcttgactcttcataagtgcactcacaagtcaaacaacgcgtgtgatttatgagggcttagccgttaaaggtgtggttgaaatcaagtaaagaactttaattcagacaaaatcaaatgctggttgggctaaccaaaactactagtaatactaatggtctttaaacgaaatgagcccaataaagaacctgagacaaatctgagcccacttgaaagctaaaagccgcctaaaaaggaaacctaagcttaaaccagctaaaccgaaataattaaatggattcgttttttctcatctccgatccctaaagtcaaagattaaaccacactaaaccgaaattgtcatatgcgcgtaatttcttcgcaacattttgaccgaacaacttcaaaatcaaacgagcggacggtcaagattgtccgatcagtatcgtctttttagtcagtcagtcctgaacgccggctagatcaaccactccatctctcgtgctgaccacgctccgattctccatttctttcccttttgacttttcacttccaatttttcggtatcagatctggacgatggcttcacaaatctctcagcttgcttgtttctcatccaccaatcgccaatttcacttccaaagccgatcgtttccatgccctatgattcgtccccaggtaaatatctcgatatcgcatgaaaaagacttggaatttactcatctcgattagattacgtccatgcccaatactctatttgttctacttttcctgattactctcaaaaacgtttgagcttgattgatttagtcgtaatcgaatatttgcttttgttttctagaaatggttctccttgagacttgaattgcttctctgttttctctggttgagttggttgggaatgtaccatgtcttcaataacaaaaattgcctttttgttcacctttttgattgtctctatgtgctaattatcatatgttgagctctcttctaaattttttgggattgatagtgtctccactagtggcttattggctataaattggttcagtcttttgtagttaaaagtgttgatgggaatagctctgaaacaccagcttctctaagctatacagctgaggtttcaaaacctgttgttgagaaaacatccaaaccgtattccactgttgatgaaactgctaccaataaagagagcatcacagagccagtagaggaagatgttgccacacaaccaataagagcagcaaagatccacgacttctgtttcggcattccttatggtactactttgtgactctcaaactttctttcaaatcttagcatttctagcaaagagttgcttattgtcaggtaacacgctggtgttaataaatgatactttttcaggtggtctcgttgtgagtggagggcttcttggttttgcgttttcacgaaatcttacaagtttaagtactggtgtcctctatggtggtggccttctagcccttagtacactgagcttaaagatttggcgagagggaaaatctagtttcccttatatactaggacaagcaggtaatcttcatttattgtctgcaggaacagtaggggatattttgttaccacgactttttttcatctctaattcattacatcaagtaattactggtatcttactcatgataagtggatattaaaatcgagataagtatactgtgtcatgctatgaagtggtcatctctgaacattatgtgcctatgattctctataagaaatgttcattttatctatgaaagcatttgtgcttactcatttttctaaacctgaaattgcagtgctttcagctgtcgtcttctggaagaacttcacagcttattcgatggtattcattatctttgtgatcatgctgattgtttatttttgcttgcttgacttcaactgcttaatgttgtacttatgcagactaagaagctgtttccggccggggtttttgctgtcatcaggtaagaaatacgtcttgtgatctacaacagattctgatgatctttcgtggattcatgtaaccgtgtgtttacgtctttttcattgcagtgcttgcatgttgtgtttctattcatatgtggtgctctctggaggaaacccacctccaaagaaattgaaaccatctgcgactagtccttcatactgaagggactttacataggtttagatttaaaaaagtggagatcttctctcttttgataactctggtctgttggattactggtgtaattttatactctttacgaattgatacacttggttttgtttgtgacctgttctttccagtgtcataatctaaagttttgattttcttatttgtgagatatgctttgattgtctatattcgaatatcatagtaataaataaataaaaagagataaagaaagaagactaaaacataagtaatatagaaaagttattgctagctcaatcctgaaacaataataagaaataatgcgtctaccagttatacagtgagtaaacttgggaaataagcgatagaaagttagaaacccctttatgctgaaatttaaaagctaaaatcataagaattttgttccggatcatgtataattaaagtacggccagttatcttccaattatgaagcaaaatcttatttttctgaaatgttgtgattgtttttgttggcaaattcggatggcggcgacaccaaatggaagttctattcaaatcaatcgaatacgtcttctcccatttcttgcgagagtttaatgaccatatctcttgtttcatgtccttcccctctgatatacacaaacggtccttcatgttgcttatagtaactcgaccatcagtggtaaatggtattttcatactcgcttcaaaagatccactggaaagatcaaaacacactatatgccatttccattgcatgttgtgtttctattcttatgtggtactctctggagggcacccacctccaaagaaattgaatttatcttctctcttttgatgactctggcgagttggacttctggagtaactttatactatttacgaattgatatacttgttttgtttgtgacctgttctttccactgtcatagtcttaactcttaagttttgtttttcttacttctgttatatgctattattgtacttactattacgcaaatcagagatgctcaatgtaaggcagtaatttacgttggcttgcaaaaacctttaaatgcttagggtggatacaaaatgctgatttggttggaaaatgttccaatctgtggatccaacatttcaaatagaacaactccataataatctttttcaaagtaaaaggtgaactcagagcaagaaaaagaaaataattccagtcaaccgaaggtgagttttatcaaggaaaggcttccacagcaaaattttgactagcgagttgcttgcgcctgtgtgtgttccaagagctgattcactaacttgtatgttcgtcctgataagcctttggtgtggtttatcaactgctcatgcctgcataaagcggaaacaagattagattgtagaatacgaatgatatcatagatttaagcttattctacttacacgttgggctgagtaggctccatgattacagttcctgactcagaatcaatcttggcatcaagctttgaggtgcggattaggttcacaatccatctctcggcctcctcatagttcagattcaatttttcagcaagtaccctgacaagggaaatataggctcgacatgagtacaaagttaaaccacaagaccgcaacaattcttctcaacttaaatagctggatatggcaattttcatgtgttgggaaagataaggaatagagaaaattccaaacattgagcaatccggagagcagagttatgtgtaaacatatacaaccaaatgtgagaacttaccccatgtcaatcctttgatgaattttgcaataggtttcaaagacgaataggcgggcattttcaagaaattcatctctcagtggtacagttgaaaagtttccatcctcaactcgcttgccaaggaatggatcattcacaatgacctacatcatgttaaaatgtcagagtattgattgcacagttctgcacaaacaaaaatatctatacatgtggatgagttacctcttcacactctttcatcttcttttgagccccatcaaagtcataattgacaaacacacatgccaggaactcgataattggatctttgtaggagtagtgctcttgctgaatgaccttaatgaattctttcaattgtggtcttctccttttgttgacaatgaaagcagttgccaagtagcgcagcaagtgtggagcactagtttggatggcattcagatacctgaaaaagtaaatcaaattagtatacagaactgcagcatgaaaacaaagtgaattatttttcagcaaatgcccatacacaaagcacaatcttaagaataggtctggatgaaaagaaggagaagactctaaaactagtgactgctaattacttgtaggcacatcaggactaacattaactataaacaaagttctacacacaaacaccacctatacataacttcatcgcatctagatcatgcttatcttaaaacgcaaggaaatagatggtgatgaaaggtataaagaagagatgcagataacagagaggtagaggcttacttgtcttggttaaaaagatcaatgatctgtgtccttccattatcatggttaaaaaagatatacagaccccaatgcatcaaccaaatcctgttctgcacctggtttaacggcgatgaaaaactctgaaaaaacaaatggtagttagcatatatactctcacatctatattgatttcaaaggtcgcaaactagaagaagttttaaatactaacctttgagtcaataatctctttgagacggttaagctcttcaagagcaatatcccagttttgcatcaatatttcagatgcgagctttccccacaaggcactcaaactcctctcaaggttagagcacagggtcctgtactggtaaagataatcagcagcaccagaatagttgccacattcaaactgaaacttggcgtactggtacaaagcctcaatctggtctggaccaatctgataagacaccaagccatataagatttgtgttccacaatacacaaacaaaaccaaatctggataacatttcacaaaattaaacaacttaatcatccaaatcacaacctggtagcgttccttgagcatttggagattgtactgcttgtcagctcttagctcctgcacagcgttagggttcaaaagaaaagacacgagtggtgcagcagcctcctccaaagatttgagcctagcgacaacctctgttcttctctccaccatttctatcaccacaaatttcaacattcatcatcaaacaaacaaaccagtacacaaaaacgcaaattcacagacatatccagagaggaatacacaagaataccttgaggagcgtcttcagtgtggtagagactcttgtgaatatccatggcgtaatcaaccatgttcgtctggttcaaaagctggattttagacttcaggatctgctcatcagggtaaagctgacgctcttgaaggaactcgaatataggaaacaccaagtgtctgtccaggttaggcgctattagtggcgtcaggtcatagttctgtttgctttcctccatcgtcgctaatctctcaatctccgccgcttcccgcactggcaaaatcttcttaagacggcagagatgaagtttcagagacgacgaggtaaaaaatcctgtatattgaaattagggttttctcgaatatgagctttcaatatttataaattcgcccctttacttcttatatattgttgtttaccccacaaggtatttttatctccaaaacgataacttagccgtcgttatctgatcggccggtaccggaggggttaagaaaaaataataattaaatgttttttgtggagaggcgcacggtaagaagctttattcgtttggcgtatgttagtagtctggacttctttctgtaccgcctgtgtccactaacttgcgcatgttcgtctttaacctttcgccctcttcctctatcatactggattagggttcttcttcgagacgaactctttttctttctcgtgacgaatgtttctgtctagaagcttttaaggattaagactctccaaaattttgacgccgtgttattctcttcccgtctctcatggatccttcaagacgaccaccgaaggactctccttacgcgaatctattcgatctcgaggtctgttaggtctcaatttttttgtgatttccttgaaattgatggtttgtacttgttggatgatgatcatgtgactgtgatgaatgtagttttggtgattggaaatcttgcaattgtatagcttctccttgtttctacagtgtgtttttgttttactgttgaaattcagtgtgggttttgtggctaaattcttcattcttgcagccgttgatgaagtttagaattccgaaacctgaagatgaagttgattattatgggagtagtagccaggatgaaagtagaagcactcaaggtacagtttttaattggttttatggaattacttttgccacctactgtgatagttttaagtgacgtttatctgtgttctgtctatatggttggtaatggttaaaggtggggtagtggcaaactacagcaatgggtctaaatcgagaatgaatgcgagctccaagaagagaaagcggtggacagaagctgaggatgcagaggacgatgatgatctctacaatcaacatgttactgaggagcactaccgatcaatgcttggggagcatgtacaaaaattcaaaaataggtccaaggagactcaagggaatcctcctcatctgatgggttttccggtgctaaagagcaatgtgggcagttacagaggtaggaaaccagggaatgattaccatgggaggttctatgacatggacaactctccaaattttgcagctgatgtgaccccacataggcgaggaagctaccatgatcgtgatattacacccaagtatgttgatcatatgttttttcatgttccatgggatccgtgtaaccctgtgtaatccgcttagataacttacggtgttgggtttcctagattgacacgttgaattttgcatcatttgcaggatagcatatgaaccttcgtatttggacattggtgatggtgtcatctacaaaatccccccaagttatgacaagctggtggcatcattaaacttaccgagcttttcagacattcatgtggaagaattttacttgaaaggaactctggatctgagatcattagcagaactgatggcaagtgataaaaggtctggagtaagaagccgtaatggaatgggtgagcctcgacctcaatatgaatctcttcaagctagaatgaaggccctgtcaccttcaaactccaccccaaattttagcctcaaggtgtcagaagctgcaatgaattctgccattccagaaggatctgctggaagtactgcacggacaattctgtctgagggtggtgttttacaggtccattacgtgaagattctggagaagggggatacatacgaggtttggattctgtggcagtattttatgaatcatagttttgaatccttcatggctcattcatggctcattcatggctttattaacaacattatctttttgttccgacattgttttatgtatcctttcttcagattgttaaacgaagtctaccgaagaagctgaaagcaaagaatgatcctgcagtcattgagaaaacagaaagggataaaattagaaaagcctggatcaatattgtcagaagagatatagcaaaacaccatagaattttcactacttttcatcgtaaactatcaattgatgccaagaggtttgcagatggttgccaaagagaggtaattgaaattgactctcatattagtctttattatatttcctttcctagacggatattctctttcctttcattttagattttttttggtcatctggtagaaattttataaaagaagaaccaaattacatgtcggcgattaacaacataatcccgaaaactaagttgttaatcgcggacttagatttcatttttgattagatctctcatttgattactttgagttcacaggtgagaatgaaggtgggtagatcatacaaaatcccaagaactgcaccaattcgcactaggaagatatccagagacatgctgctattctggaagcgatatgacaagcagatggtacaatttctattctccttttgactttgtagtataccagcctgccaactagattgggttacagattctgttgccaatttttttaataatacatgctttttgcacgggtttatttgccttttctcatagaataaggacttgaacaatagtcacaactctataaacttggctatagaaatggatgaaattatgttgtagacttggaattttttaatatcattcttcagctgatgctcttttgaacggtgcacttggaataatttgataatgttgacaggcagaagagaggaaaaagcaagaaaaggaagctgcagaggcttttaaacgtgaacaggagcagcgagagtcaaaaaggcagcaacaaaggctcaatttccttattaaacagactgagctttacagtcacttcatgcaaaacaagaccgattcgaatccttccgaagccttaccaataggtgatgaaaatccgattgacgaagtgctcccagaaacttcagcggcagaaccttctgaggtagaggatcctgaagaggctgaactgaaggaaaaggtcttgagagctgcccaagatgcggtgtctaagcagaagcaaataacagatgcatttgacactgaatatatgaagctacgccaaacttctgaaatggaaggtcctttaaatgatatatcagtttctggctcgagcaatatagatttgcataacccgtgagtttgtgttcttgtctccatcccttgtctttgcgattttagtctatcaagccaattaaatctctctacttgcagatctacaatgcctgttacatcaacagttcagactccagagttatttaaaggaacccttaaagaataccaaatgaaaggccttcagtggctagtcaattgttatgagcaggttcactcaatctctgtttacatttgttatttttgttctgtaggacttaatggaggaaattcttcccctcagaaatcatctttcagaatgggtctgtactaagattattgtttgctatactccagggtttgaatggcatacttgctgatgaaatgggcttgggtaagactattcaagctatggcgttcttggcacatttggctgaggtaaatagtgttgtttgacctttatatttgttgtgatttggttatgttaacctcatcagttttctcacacaggaaaagaacatttggggtccatttcttgttgttgcccctgcctctgttcttaacaattgggctgatgaaatcagtcgtttctgtcctgacttgaaaactcttccatattggggaggattacaagaacgaacaattttaagaaagaatatcaatcccaagcgtatgtaccgaaggtaacggctatgtgatatttttgaggtgacaaatttctcaatgctgtctgcatatcgtataattaggtgtaatgtttttttccacttggatcatctctttcgatccttgggctgtacgtcaaatatgcatttgcaaaagagcatgcaatgttgttaggtttcagacattaagtgatatgtactgccagtattgccccatctgtgtctaattttacatgttatcgctctagaggaaaccatgtctattgttagaattcatgttatttaattgatggttctctcaaaggctgcacgatcaatgaaacttctttgcccttttctaaaggttctctgttgacccccacccccctctttttttccagggatgctggctttcatattttgattactagctatcagctattagtcactgatgaaaagtattttcgccgggtgaagtggcaatatatggtgctagatgaggcccaagcaatcaagagttcctccaggttcgtactttttctcttgaggtctgttgaatttccagtgtttgatggtgccatgcaagagaatgttactttttgtaatttccttgtagatcacttgaaatgctgaattctcatgcaagtcccatttcctttttttgacagtataagatggaaaacccttcttagttttaactgtcggaaccgattgcttctgactggtactccaattcagaacaacatggcagagttatgggccctgctgcatttcatcatgccaatgttgtttgacaaccatgatcaatttaatgaatggttctcaaaagggttagtactatttttctgctttaattgccatgtaaaagtatgtaatcaataatctaggaagttgtttctgatacatgatccatattgattaacagaattgagaatcatgctgaacacggaggcactttaaatgagcaccagcttaacagactggtgagatttcattttctgattgcagcattattgtggcgactcttcaagttcttttagtttctgtctgcttctgtcttttagtttgctagcctccttaattagggtctcgcattactttccattttcactgcatgattccgtcttgagacttttagaaaacgacattgatttttatataactacattcatgtatatgcatatgtcatggacgagaatctcccaagttaatcaacaatggtcactcctagtcctggggttctcgtttttgttttgtttataacagccaatcttctgtcctttcctttgctgttagaaggacttgttaattccatttagccatttctccaggaactcttcaaatttctactgcatatgcatcttcttacgagttaaagttgtttagtcactcacattttgtttcttttctcaaacagcatgcgatcttgaaaccgttcatgcttcgacgggtaaaaaaggatgtggtttctgagctaactacaaagacggaagttacagtacactgcaagctcagttctcgacaacaagctttttatcaggctattaagaacaaaatttctctggctgagttgtttgatagcaaccgcggacaatttactgataagaaagtattgaatttaatgaatattgtcattcaactaaggaaggtaagctctcttgtctagtcgggttaacttccctgctttcttttacataaaggtatatctacctctcaaacaacatatatgagaagacatccagcgtttctggtgtcaggtttgacaagtctatggcttatgctagtacatgtttgtgtttctgatgccaggtttgcaaccatccagagttgttcgaaaggaatgaagggagctcgtatctctactttggagtgacttccaattctcttttgccccatccctttggtgagctagaggatgtacattattctggtggtcaaaatccgataatatacaaggtgcaattcaatataataataaaaaagtgttgaagtagagatatcctctagttttcactgaattctgcctttgggttcgatcttttgattctctttcagatacctaagctactacaccaagaggtgctccaaaattctgaaacattttgttcttctgtcgggcgtggcatctcaagagaatcttttctgaagcattttaatatatattcacctgagtatattcttaagtcaatattcccatctgatagtggggtagatcaagtggttagtggaagtggagcatttggcttttcacgcttgatggatctatcaccatcagaagttggatatctggctctgtgttctgttgcagaaaggctattattttctatactgaggtgggagcggcaatttttggatgaattagttaactctcttatggagtccaaggatggtgatcttagtgacaataacatcgagagagttaaaaccaaagctgtcacaagaatgttgctgatgccatcaaaagttgaaacgaattttcagaaaaggagactaagcacagggcctacccgtccttcatttgaagcgctagtgatctctcatcaggataggtttctttcaagtatcaaactcctgcattctgcatatacttatatcccaaaagccagagctccacctgtatgatttctttgaatttttaagttgttgactaataacctggatagttccgtaccaagtcttctcaaccatgctctatttgaactttcatgtgtcaggtaagcattcattgctcggacagaaattcggcatacagagttacagaagaattacatcaaccatggcttaagagactattaatcggttttgcacgaacgtcagaagctaatggacccaggaagcctaacagctttccacatcctttaatccaagaaattgattcagaacttccagttgtgcagcctgcgcttcaactgacacacagaatatttggttcttgccctccaatgcaaagttttgacccagcaaagttgctcacggtagtttcttttctgttgcaacttccttttaaatttagttgctttaatatgagcccatgtttctaatcacaaatttggattgtaggactctgggaagctgcagacacttgatatattattgaagcggcttcgagctggaaatcacagggtgctcctgtttgcacaaatgacaaagatgctgaacattctcgaggtagtatctagacacaagtctttgacctcactgtacaaatgaatttgtaattacatataacaagcatccctatctacacctttgctttacatttcttttattttatgtttatgcaggattatatgaactatagaaagtacaagtacctcaggcttgatggatcctccaccatcatggatcgccgagatatggttagggattttcagcataggtaggatttaactttctcaagcttttttttttacgttcccatgaggctttctgtgcacaattgtaaaccatatatggttgcaggagcgatatttttgtattcttgctgagcaccagagctggaggacttggtatcaacttgacggctgcagacactgtcattttctatgaaagtgattggaatcccaccttggatttacaagctatggacagggctcatcgtcttggacagacaaaagatgtcagtgattattctctgcttttattattctaatcgctttcatttcccaaaaaaaaactgtgcattgagaaccaatttctttgttgcttccttatataaccaaagcttcatacaagtgaacaagcatctgccaatggggttattttcctgatcttttttttctgaaatgaaacctcttaataggttactgtttatcgtctcatctgtaaggagacggtggaagagaaaattttgcacagggcaagtcagaaaaatacagttcaacagcttgttatgactggagggcatgttcagggtgatgattttcttggagctgcggatgtggtatctctgctaatggatgatgcggaggcagcacaactggagcagaaattcagagaactaccattacaggtggggacgacatgcttcttacatttaatatttcacgaacttagaattctgccactcataaattctttacatcatccaggtaaaggacaggcagaagaaaaagacgaaacgtatcagaatagatgctgaaggagatgcaactttggaagagttagaagatgttgaccgacaggataacggacaggaacctttggaagaaccggaaaagccaaaatccagtaataaaaaggtatattatgctacaaactcactcttttcttttacctttctcattaccaaaagtctgtatcaatattcgttcggttcatgatctatgcactatacaaggcctagctagctgcaaataaaacttgagttggtctacttatggagcttgtcttggtgctaaattgataacttctggcttgagtatatatactaaaagcatatggttatgtatggtgatttgcagaggagagctgcttcaaatccgaaagctagagctcctcagaaagcaaaggaagaagcaaatggtgaagatactcctcagaggacaaaaagggtaaagagacaaacaaagagcataaacgaaagtcttgaacctgtattctctgcctctgtaacagaatcaaataaaggattcgatccaagtagctccgctaactaatccgaagatgattagagcttcaatagatattttaacttcttcaggcaggttttagacaattggttcctagtttttgagccaagtgtacagatttgactcagttttctttaacgtacatcggtcctgagtagaacttaattggtacatatatgtataaatattattagtgtcgatttaacgatatcaatcattcatcaccatcttatttagtggatgctatattaattttatatcatatgaagaatttttcacagtctatctggattcatctgtcgttatttgtgatttatctttattttgattgatgcagatttcattgttggtaaaatcatctaagcgtgatcatttactaaaattattgattaaaatctagcgattcttataatattggtagcctgattacttatccactaaattttcccaaaacaaatttataagaaaaacggatatataatagaatcagtctgaacatggagataataaattcccaatcatcatcattattacataagattttgatatatatgatcaatcactattcactaagattgaatgttttgagtttcaacatttagggtaaagaataccacaagccgctagaagtttgtgagcattttgagggatgacatagtgaccaaacgttggagactttatgtaaccacaaagacaagactgctgctctttcagcatctcgcaacaatatgccggtggctgacttcctttgagtatcgccggcaggcatgacatgaggtttgtcacgatgcatgccgctttctcctctataccccaacctccaaccacagttgctctggttggagccagaggtgacatgacgatcataacagatgccacgaataataatttcgtgaacttcatgcctattagctagttttcctctctaattgtatttatttataaaaattatttgagatttggtttataagtacgataaaactatcacgtactgtatactcattttaaatggtgttgagaaattttgtaacaagttctagaataattagaattgaaaatatttactagaaacacaatcaaatgatatactagtactatacgtgtaacgtgtgtggatttttaccataatagtatacttgcaaatttgatatgaaagtcagacttgcagaaattcaaagatttgaaatttaagtaagaagatttggtattgataaagtaaatggaaattttgaattctatataaaagctacaaaagtacaaattagaaaaagaaatgaaaattgaaaggtttacagatattgatcaagatatgcaacttaaaagatggtagataatgaggcttgttgacttgttgtgaatatgatatgtttcgtaacaaaaaaaaagaaactaaaaagaaaataaaacatttacaaatttatatatctatatctaaaaagatttaatttttgaaccatgacataataaacctcaatattcatcattatatgttataaatatttgaatttttaacaaagacgattaggaataccacaagactttaacactctgcaaatatctttgtggtagtcaggactaattaagaaatcacgttgtgggtctttcatcgtcatgcaacaatctgctgctggctgtttatttgcaaacaacgccacccagcatgtggagaacacttttatgacactgtaacctgtcttcatccgagattggttttgctatggtcggaactagagatggcatgataaccgtcacgaatacgattgcgatgaacactaatgatgtcaaactttatgtttttgaaaccctaacgaccacttggcctatttcaattccttcaaagaaaatatttgagattttgggttttgagggatggtaaaagctataatagatggggtttaaatgaatactgtatttttttcattatgttgactaaaatttaatacaattatatcatcaacgtgatttatattgtttttgttattcatacgattttgacatatgtgtatgcatatttagatggcgacacatattagcaacttgttagaaaataataaatctctggacacatttaaatccattatagaaaacaatccaagacaaacaaatatttctctgttattcggtcacatccgcatagatatggaaaaagacttgaaattgaaaaagcataccaagtgatagataataaacgaatgaggcaatgactaaaactagaattgattccacgtacataatctcccaattcatgtgttacatggtaggagcgataggctaaacattatgaatgattatttccattgtataatatgcttttcgacatataataaaccatgacataatgaaacctcaaccatcctcactgtatccatcatgtgttaaaacaaaattgtacataagtaataaccaattttattttaactattcgggaagagaggtttatgatttgagcggaagctgctgagagaggaaaatcatggaggatcatcatcatcttcccgagaatttgaaacccttctttcacagagccactgaagctcaggttcttctctaattatctatccattaacatatatatctattgatctgggattactgttgaatctgggatttttgatctcattcaatgttattatgatgcgattaatctctcagttcgtgtttttatttggcaggagcgattggctaagcttgaagctgctcttgcgtcgaccaagacaggtttttttttttctacaggaccaataatctctgagttctttagactttagtcttgaagttatatgtattctttgttatcagacattccggatgctaaacttgtggaggaaaacaaacaacttcagtcaaagctcgaagaagctaacgccactgtgaagcaagaacagactaaggtattcctctttctcttcacatttttctcatcgccttagtttttgagtatggatttctactactctaggtgaaggacttgaccattgaaaacgccaagcataagtaccgtatattgcatcttgtgcgggctctaaaggatgctgatcagaagcttgagaggctctctaaatgatttcattcttctgtctcttttttttattccttctctttgacattcccttactgaggaaatgttatccttctttaactgacaagatatcataatggattgattgtttgctactcctatcttattgtgtgtgtatgtgtgtgtgtgttttgagtttcataagcaaatctgtagtttatagataagcaatgtccatacatgtgatcctgaggaagagtagattagcttacaccacattgttaatgagcttaggaacagcattggctattcaagtaggatcattcttcttgtgcttactgcatttactgtggttttgctctgaccttaagtcattggtcattttagtcactttgctggtatctttgagtagctcagaatctgcctgccatcatcaggcctagatttctgctgcttcttctttattgagttttgcacttgttacatttaacaaggcgttgctttgtagccatacgcaatgatggctcgagaagcaaggtctaatttcagcttcatggtaaagaggttctttagcagcaatggtttcatccttcaatctctctgcatattcttttgtgaccaaactcataagaacctcttttcagctacagggagcatttgccttttttcccctttcgattttgaaaccaaaagtctcataagcaaatgattatgtgcaacacaacggacagtttgatcaatgcctttctgtattgctcttgtttacgactgatgtttctgaagctttactgaatgttaccatgagaagtttgtaaccaagtccaaaatacgattttaaaattcttcataaaccaaagattgggtcaagtggaaactcagttgacaaaatatatcaaacccacacccaaaatagaaaaaatccagcaacgattttatacaatttgagatcagatcattagcccggagttgaagaaggaaggaaaaaaaatcaaatataaaatggacgttgcgttactagatggtgggttaggcagagtcagatggaccagaaggaagcagctcatagccatcgtgatgacggttagactcaaccggtatgcatttaagaccaacggctagaatcatgcttacggaaccaatcaaaatgcagagtagccaatgttgccagctcaaaggaacagtgcttgcaaatgctccaaggaactcaacaatgatcacttggaatccaactgttgcagtcattacagcaacaaacacccaactcttgaacattccttcgaacacatttatcttctctatctctctgctgtttacttcattaaacacctgttttgtgcaaagcattagtgtttaatttcatttaaacttttttatggtgaatgtttgttcttacctggcaaaagacgaaagagttgaagataattgtgttgagaacaattgttgaatctgggccattaaggttgagtatttgtttgccagcaaagttgaggatgccgagaacgattaactgataaatgctttgaccaatgatgtttctccacatagctctggtgatgaagcttgctgttctaccgattggttggcgtttcattaaaccttcgttgggaggttcggtcgctagagccaatgcaccaagtgtgtccatgatcatgttcacccaaagcagttgcactgcggtgagtggcgcagatcctgaaaaggtgcaaaacaatcattactgaaactgttattcaaaaatcattggtgaaaattgtgcatgtgtttgattttacttaccagtgatgcaagcagagacaaagttgatgatcagagcaacaacattaacagttagctggaactgaacaaacttctggatgttgatatacacagcacgtccccattttgccacattcactattgttgcaaagttgtcgtccattatgataacatcagcattctctttcgcaacctgtgtgttgtatacgcgggagtttttaacatagagaacatcgattttacaatgatttaataactcagtaacagaggagaaccaaaggctacctctgttccagctattcccatggcaagtccaatgtcagcctcatgcaatgcaggagcatcatttgttccatccccagtcactgcaactacctctcccattttcctcaagttgttgactaatgtatgtttgtccaatggcaaagaccgagccatcacctgaaattagttataacgaatactataagatgctttgaaacatttgaagaatccattgtaataatctaaatcagaacctggattttcggtagaatggccctcatttcatgtggaggcaaattacggaagtctgaaccttctatagctacacctcctgctgtaagtataccacattcctttgcaatcgctttggcagtgctaatgttatcaccagtgaccatacgaacagtgattccagcagcttgacaagtctgaacggcttccctaacaccaggccgaaccgggtccttgattccaacaactgctaccaatgtgtagccaccattaggaagatcccctctgggagcttcatcaagatccgtgtaaactaagcagagagtcctaagagcctctgaagcaaatccctctatgacatcagagatacttgcaatcttttcttcagataaaggaacagattctccgtttgaatccacaaccttctcacacattttcaagactatttcagatgcacctttgcagaaagcacgtactttaccacctgaatgagatgtaagaacagacattttcttcttgtctgagttgaatggctcgatcttgagtatcttatgttctcggcgttgcgtgtcaacgtcaccacccaaaagcaaaccaaattccagtatcgccctttctgtaggtgaacccaggatctgagtttttccttccttatccttaacaacttcagaaccagtgttctgaaatatggcctgtataaggatattcttaacttgttcggataggttcaactggaagttttcctcttgcctctctttgatattttcacatatccaaactttgttgactaccatgtggttagtggttaaggtccctgttttatccgtgcagatgcaggtagaagaacccatcgtctcacatgcagccagatgccttacaagtgccctatcactcattaattgcttcatagcaaatgctagacttaaggtcacagccaaaggtaacccttcaggtacagcaacgactataatggtaacagcaattgcaaagtagtcaagcaatgttagtgcatcttcagaagaccactcagtgatgctaccagccgtggctttctccacaacgaaccttatgcacaacaccacaaacgtaagcactgcaaagcctaaaccaatcttacctatgattgttgcaacaccatttagtttcacctgcagaggggtctcatcctctccaccctcactcagagtatccatcaactttccccactcagtcctcataccaacggttgtcaccagcatttttgcagagccgttttggactttggttcctgaaagcagaaacggcttctctttattcacatgtgatggttcactctcgcccgataagcttgactcgtctatctccagattgtatccggatataaaaatcccatcagctggaacttgatccccaatagataaatggaccacatctccaacaaccaagtcatggatggagacctcttgtctgctgccatccctggtgacttgaataataatcttctttttctctcgatccaaatctctgaactgcaaagattgcttgtagtcactgatagcagtaaccatgaccaccaagattatactaagcaagatccccgtcccatcatacatgccctttggaaaaccttctgttgcaactcccactcctattgatactacagcgcagaccataaggatgataagggtaatgtcttgaagcgcttcccaaacaaacgttaaaaatgatctggctggtttctcagtataacggttttctccatagattttttctctgatgtgtagttcactcgaacgtacaccttcagcgagagatacagatactttctgagcgattccttcaggtcctccgatttttgtaaggctctttgtgtcatgattgcgaaccatagaagcaagctcatctgcttcgacataaaatcctgcttttttgacctcatcagtgagtttatattcagggcgggcaccagctgaagatataaacaatgaaaagaaaaaagaattaaacccagtcggccaccaatgatgcatctctgaaactcaacaatgtgtttcttaccatcaataaactgaaaagctgccttttgaacatagaagacaacccttatcttttcctgataatgatataaagaaaaagtgagctcatagaagaactacaacaactaaatcattagtcactacaagaaataactaacatccattgatcttttccagactaaataacagcatcaaaacatgccaaccgctacaaaattttgattttattatttctttgcattatgcttttcatgcagaggaggatataatcattctgaaacaccagctacttgttgttgtatgtccaaagtttcagtgatcaaacaagatataaccgtagctaacgtagtaaaatttgtatttacctaagaagctaatatactcaatgaaactggtaatgtcttttgcctcacaaattacgttttgaaaattgagttaaagcaggcaagattgtatttgtatttgctcaataatggtcatttgtcaaggcataatagtcaaacagtctactgatttgttcagtggttaggtttttaaaaaaaaaaaaaaagatgaaaatgcttcgatttcaatacgaaagaaaaagaaagaccaaaacagagaagaacgggaccaaaagactttaaattcaaagagagagattcccatatttttatccacgcaagcaagtggacaaataaagttgatgtctctgtttgagaacgatatggatccgctccacgaaatttcctagaaactacgtaaaagcaaaggtaattgcacaacaagtcaaaaataacgccagactcaaaaaaagtcaacacctatatatgaatattgtagaccatatcgttcttaattagattacagtttgatttaacgtccagaaaatggattaattttcctcgagcttataatataaaaaaaacgtgcatcgatggaattataatgggagacacgaaagcatgacataaaaaatgatgtcaattctctctagtaagtttgttggcaattaaatagccgtagtaaataactaatccgttacgcatttcgatcatactcaatatttcaacattctaaatcaatcttaaagactcactcaacactaaatttacgcgtcattttgcgtttggttgactgtacattagaagaagaagaaacataaaactaattaacaatagcaaacaaacacatggattcatcaatggcaaaaaagttcctaaatagaaggatcgtgatctgatagcgtaaaaggaaatgatcgaaaactgtagtcgagatgagtaaattaactgaaacagagaaaagtgatggaaggaggaaacaacagacctggatctggcatctcttcttctcattctcagcgagtttgtcgagattactgatcatacggaaacgacgagcccgattttttacgagtcccacggaggatcgccatcgttgacgagcttccagcgacggattcttagatgcgacctcgaaatcctttagtagattagacattactttcaaaaaatctctctctccgtttacttttctcttaaaaaacagagaataataatcttcgccggcgcgaaggaaggtgaagagagagagaggagagtgaaggctccttcgtcctctattctctgtcaaacgtgggagtttgttgttgtgtgtgaggttgctgagcaatttttatgtagtgttacaaaactccaaacccggtttactcgggttatcgggccgggccgccttttcgcatctgttggttcgttttttgattattttgacgcaatccaactttgaagaaagtcttgtcttgcgtcctcttttcgtgggttttcgtatgtacgtattgttttgttgttgtggtatttaagagaatttaatccatgttcaaagatccgacccgataaatctgcctaattttattaggttttgttgtatcaagttttctataaataaatataccttttgatatatttttctgtatttctgtttttcgtaatttttatgtagtgttactaattcgcagagcatgtgacattaattacaagattgtaaatactatactaatcgcagaattacacatatatttcaatgaaacggtatttttagcatgtatgattaatgttcttagctacttttttcctacataattttgtgtttatttacctaagtttatgctctcttcatttccatgcaaatgttacatgtattttacaattagtgttacatgactgttaatgttatagttgtttctgtaatgttaatcaaatttacaaatatagcaatgttataaatatgtagaggtagaccgggatttttcgttgcagttgtaacaaaagattaacgaaatctagtgtctaatctgaaaagattataagacataatcttataaagtatttaacaaaaaaaacactaacaataaaacgtataaagtatgtacatcgttgattcgaatgtgcgtggatccacaaatagcaaaagccatccaagttgctctgttttaaggtatcgccactttatgaggctgcgctgccttctaatagtattaattaatcccattatcaactcttaataatattaattattacacctttcctcaccaaatattcaaagactttttgtttctttgtatgcaaatccattttaaaatgatttatttgctattaaacaaatgctagatagccaaaaaaaacattgttgagagcctttaatctattggtttactattcggaaaagtttaaacctagctttatgtataaatgcggtttaaacaagttgaccaaaaagaatacatgttgatcacaaatctggtagcctttaaagaattcacattaagaagaattatagatccatacagacacatctttagacttgtgaacaatcatgctcttatatataataaactatagagaattcagaaagctggtcaattataacacatacttttttttttttgatcaaccgagtataacatatacatatatgacgttatatgatgtgaacttaaattattaatgtaataaaaggttggctccatggtcagaaacatgcatttaatatattaatagggaatccctagctgcccattggcttcacttgtcacccatgtttgacccagtgtctcctcatgagcaaaagtctttatttaacaacaaggaaaactataagccaagtcttaatattacaagaatagaaactagccttttaattttatgggttttccagcccacaaacaaaaaaaaaaacctcaccactctattcataatttaaaaaacgcaatcgtgattagttgtttgttagtgtttaacagttgacacaatcaagaagcacaacgttatttaggtagcattctaacaattcttttacgttgacaactatttcataaccatttataagataatacatatttctgtccagatgtgcggatttcgaaaatgaatatgaagatatcaaatgttagcgcaaaataactaatgaaagatgaaacaatctttctacttctcatctgagtcatggcattaaattctctaagcagattatgatcatttcactacattatgattgcagaaggaaaaaaaatgagaagaagataagagcacatggagtaaacaactcacagctttaaagactctcaagcttgtgtactattgatcttgggccttcttgatacaatatagtacataagaaagttggttaggtcttcaatagtcccacttgatattaagtaattacttcaatgcatcttgtaggtaaggaatgatgaaacctaaaactacctaatgacttatcatacaaattaccaacagagtgtagactatacagctttaagacaaaagttttgctaatgacctagaatctgaaagatgcattagggctcgtcaagacctcatctctccacaacaatcgatttgtaacaatttcccataaattactgaaccgaatcgggaccggtttgattatatgcattaacaagtttgtaaccggaacaaaaccagaccaaattgctcaaacaattttccagaaccggaactagtatttgtcgtttacgtcgtaccgacattggtacgctaatcccagatttaatcggaattgtgtcttatctctctaacaacaaaattgttgttaccttcccattagtcatcttgtaaattcttcgaatctgaaatccgatcggtgagcagaaaccctaatttcgtacagtctcatgattgagatttgcgtcttctacactctctgttttcactcctcctgattcttctctcaatctcttgttttctagggctcgcttgttctgatttcgtgagggtgaacatggatggaaacaaagacgatgcgttgaagtgcttgaaaatctgcaaaagtgctatggaagctggagatcgacctcgcgctttgaaattcctggctaaagctcgtcgtcttgatccaaatctcccgatcgatgatctcgtatctgagcttaacaacaacaaatcagacgaaccaggatctgcaaaatcgcctggatctgcagcagcaaaggattcttccaattcttcagatcggccttctttacgtcaacgtggatcgtcaacaacgtcatcgtcttcttcgatgtcctacactgaagaacagatctcaatcgtgagaaagataaaatctaaaaaggattattacgagatcttaggtcttgaatccaactgttcagtggatgatgtgagaaaagcttaccggaaactctcattgaaagttcatccagataagaatcaagctcctggttcagaagaagctttcaaatccgtctccaaggcatttcaatgcttgagcaatgacgaagctaggaaaaaatacgatgtaagtggctccgatgaaccaatctatcaaccacgtcgatctgctagaagtaatggattcaatggtggatactattacgaagacgaattcgatcccaacgagattttccgaagcttcttcggtggaggaggattcggtggtggaggaatgcctcctgcgactgctcaattccgatcatttaatttcggagctactcgtcagagaacagctaataacaatcaagcacctgatgcaggtttcaatgctcgtatacttctccagcttcttcctgttgtcttcatacttctgctcaacttcatgccttcttctcaaccagtttaccaactctctgcaacttatccttaccagtacaagttcactacacagaaaggtgtcaattactttgtgaaatcgtctaaattcgagcaggattatccacgagatagcaacgatcgacacacgctggaagaacaagttgagagagattatgtgtctatacttagtcagaattgtaggtatgagatgcagaggaaacaatggggatttgttcgtgaaacgcctcattgtgacatgatgaggagatttgatacagctgctgcttgaaacaactgaagctagtaccaacaatgaggcacacattggtaatgaatcatcagcttataaaacttttataatgtcaatgccttcacgagtcaaactggtatatgtttttgttttcttttgttttggattataatgctttagaacctaacatacgatctttggattttgtgtgattatctctatgttaagattttgcttttgctaaccatgcctgtttgagcccaaaagaagaaaaaacaaaaagtgatcctcgaggttaagtaacaaaaatgggtttaacagcttcttacaagatcttttttagacaagtattcgaatttcttagattcaaaagcttcgagctatcttctcgtacaaatctcgaggccagttccgctgtgtgttgcttgcaagaaacccagcaatctgcaaaacaaattcatgattaatatccatatcatgatctctactgatcatatatatggcgcaaattgttaaagtataccttagatctcatgcccctgattgatccatcagtgtcagctacgttatccaaacaggtcagagcaaccttaagtaaatcagggacacaagtctgaaagtaagaagatgctttctggaactcatccgaggtggtgtctggttgtcttggatcgagatgaaggaatggaagtttcgcgacttctcttatggcatctagatgtttgtttagtctggccaacttgtggatcgataatattgcctcaagctctcttagtattgtttcttgttccataacaagatgtctttcctgggcactgtagtataaaagaataacacttccagtgagaacctccctattcaacaactacaaaacttaagacaagtaaatgagttagtccattgaagtatgcaatttacctgacatcagggtgatatttgtaagaattgagaatgtcattgcccgagagaacaagcccctctgttcggctttcaccatctggccttccacggacaagggagcaaatggcttcagatagacatttgtttatcgtttccaaggcagacgaaaacgcaccaactctcttctgtagttctattgactgcattaaataacaaaccgtaaaaaaaactgaaacatggtaaaagaaataaatgattgatatgtgaaagcactccaattgaacaaagaaccaacggacagtttactaaagcatgtttaaagtagttagtatatgatcaaaaagtacaaaagatacttactttgtcatataatccagcttcttgaaattgatgcgcagcttcgatcaagaactgctgcctcaattttatatcaggcagaaatcttccaagctcgccttcttcaccggaacctctagcaccaagcagaaagtgaataccatcctcttgtgacaaaatctcagtcagtagttgcttcagcatcaagttcctttgcctttgttgatcaacattacttcttccagaccaagcctgttgacccccacctactgcaatagcagcttgtgcatagtattccagcgtcatttgcagatcaccatgatgcaaatacatcgacccatattgcctaatcatgctagatgcctcggcattagcatccatcacacttagtttgcgcccagtcccagatccttcagagagaatggaatggtccactagcgatatagctacatggacagcatcaatgttatacccttcatctccagcttcgttggacatgtgcatgatcgccggtagtaactgaatgctaagaagcaaaacatatgggtataccagagggtctttcccattcttagtgtagtaagatggctcaaacttattaagataggcctggagatcatccaaactgtatggcactagcccatcattcacgatcatagatgaagatccaccagctacgtcacgtacacatgatagtttgaaccagagaaaatcttctattgtgttaaagagggtcgaaaaatctctcatgatgcgatcaatttgtcttcgggaaccagatatgatagtgtagagtagaagcttcttcttgtcatatgttgtttggccaaaccgatcacccatccttaacaatttctcacattcctcagaagcagtagcagcggtttgtgcagccacagtaccacctgttgtaatccactctgtaagctgccaaaaaaaggggacatcaaaaaggcaactccaaaacattaatgtgggttattaagaccaaacaatataccagaggagcaaactgttgttgagatgaccgagatgactgggcaatttctctagcttcctcataataaccagttctcaagcaaaaatatatctgtaatcaaagaggtatatttaatcaatctcttacgttaagaaacttgggggaacagcaataagaaaattctactgttcaacttgattgttgaggacaaactgaaaatttaaagcgtgagtgaaaatatgtgaaacctgctgccaagtagtatcaactggaggctgcctacgagcatcaactgaatcaaagtccaaactcccataatctctcagacgaatctgcgcagtattgaaaaagaatcaagaaatgcaaacaaaccaatgtatatgattgccacaaaataatattcctgtgtatatatgcttcgtgttaagctttattagatctgtggcactcacccgaagaaaagcacgaattctttgcaaatttccaactgatccaccaagagcagcctagacaaagattcaaaggagaggatagaaacatgttgtgattattgacgcacttgaactcagtgaaagatcaagggcatattttcaagaaagcatccttgaagttaagaaagtaattaaaaagatgcatcaagacacatgtaacatgccttaaatagcaattccaagcaaaactaatacaaggtagaaacgagtacttgtgtaggatgacttttaattgtatccattatatgtttcccatgcccacattccaagtggcgtcttgcacctatcacgagggccatcctcttggaaacaccatgttgtactgctgactcttcacccgtcattccctgttttataaattgttaaaagccttggaaatgtaagaacagacttttaaggtgccactggtaggaaaaggaatcttccaatcaaaagatcacctgaataagctgccataatttttgcatgttgactgattttccacgagtcaaatcaatttctagactttcatatgcaccgttgaacaatgttgcaagctatacaaacacacaaataataaattagtaggaagcagagttaaacaaatgagtacaaggtcaactagttagattaatgctgaacaaaaggcacttatcataaaaaggtgaagggtttacatatatattataggtttagcttcacttctaagagcagtaacaaaagatgcagaatttttagctacaactatcaagcaggacgacattcaaatgcaccaatattatagaatttacaaggaggttttcgaaggtcatactttaaatggcaagcctcgttctcttgcagagtttagttttttcacaacctcggcatagacatatgcctttttctcatgaatgggtttgttagtcatagacacgagttccgttccaggttttgaagatacttggggactcaaaggcactagtgaaccagcatgagagcctctacttgaattgatcatcttggtcttaggtaacattgaagttttgctaaggctgtgaagaaagtcacgtttttcttttatacagtcctcctgccataaacagatttcacgttgaagtatatatgagaaagaacctgaataaattcaaaaaacatatccttctaattagcaataagcaactcaaccagcttctaactttctacgcaaagaattttcaaactacaatgccataaatatctagggataaagaacatgttcctccaattaacaattacggtctcatgcttatcatttagacatttacgagtctttgactgtaatagcataatgaaaagaagcaaaagacgagaggaaaaactttaaaaccattacaaacaggagaacattgtctaaaggcaaaagatgtgacagatgaaactaacacggaaatcaagtcaaaacaatttgtgatagtcgcaatactgacctccaacactttcaacatgtagttgttaaagcttcgaacattatctttctgggcctcctgtatagccgataccattgccatttcatgaacctaaagacaaagaagatgcatatagaacaatctgtagtgtaatcaaagaaaagggaattctcgaagagcatttagatatagaaaacctgttgcaggtattcttcaacacttgttgtctccgcagggaatacatcttcaaaagtcgtctattaacaatccaaaagaaaaacttaggcaaaggtaattcagtacacagataaaatgtcaaattatccaaagaacagaagagcaacataagctagtagatatagataggaaatagagaaaatgctcaccttcaactcaaatgacttaagatcacgagataattgatctgcattgattccctcccgtgcaagtagtctgcgtatccaagcaaaaatgaagacaccagaatcaaactatcgaccagaggattctacgatgttaagctcgtcggacctaccttcaatctcgcactccaatactctttaatggctaaattgagtgaccaatattgaattctcggggactcactaaaacgcaagacctaggtaaagaaagagaaaatcgaagttgtagtacctagtggcagcaatagactgtgaaggagcttcgtttcttagggttttagctttgagtttcctcgacaatgcttccaattgatccaaattcctctataaaccacggatatatcattacgaatcaagctcatcgtgataatagaagccaacagacaaacggaggttcgaaatcgaaaagagtggtggttagtagaaggacctgaagaggaggaaactgagaagaaggagccgcttgctccagaagcttagtcgaagaatggagaagatcagtccatccactcatctcctggtcgttcgccatacttattgagagtttgagcttcaggagaactcagcagaagaatgtcaagggtttaggattcgaacattttaaaatcagtttttttctccacttactcaaaccggtttaattggttcgggtcttgattccttatttgtcgattcggtacaataaaattcaaaaccaaaggaaaagagaaagaagacacacgacacggcacgacctatttagctgtacaccaactgttcgacgaattgcctccttgaacatctcatactttaagcttatggaggaaaaagactgggaagcttcttcttcgagcgaaaacgaaggtggttttccaaacgatgatgacgaagagtttcattctggtggttcagtgcccaagttacagttcaggtgaatttagatttacttttgcccaaatcataaactgctaagtcaactaatcttagactcagtttctctttttgttttttgtgtttgcaaaatgtagagtaggatcttccaaggctcgttggattactgaactaggaatggcggaagttgaggttaaaaggggaaaactttggacgacaactggaatcattcgtagtggaaagacatattgcttcatagaagaggctctgtatgtggcaaactaaatattttacaagttttttagatcagtctttaccaaagatctgatgaaagtctcttcctttttcgtttattcttcttccctttgcaggtatttgagtgaaattggagagttacagatcttaggtaatgaggatgacatagtgatcccattgaaggacttgtatgagaaaattgcagaggagaaaagcgttgctcttgggaaaactacgaggtttatagatacttgaagggtctaggttacatcctaggtaggcatggagtttcttggacgttaaaggatgctgcaagaccgaatggtgaagaagagtcagcttgtgctggtgaatgtcctgcagacaatgatactgtaactaaactcttgggagatatgcagatttgtgatgcaaaagcggtgtttgacgtgtatctaccaaacagccggttcaagaagtcttctcctggtgaaccaagctttgtggcttgcttctcggggtaagcgtttttgttagtttgaagttcgactatgaatgcaagtttttcactatgcgtcttactaaatatactcatattctttaacagggactctccaccaagcaaagaagatattaaagtcctgcaaaagcgcatagctgcaccattaacattctgtcatatcgctcagggccgtgccagtttcttttccttcagttctatagacctccctgtcttatcataaaatgtaacaaaaaaccggaatgatcttgtattcttttgaaaaagtcgaatcaaactgagagtttacatacacttggagtaactttgatgatgcgtattcatgaggtattatgtgtaaagggttctaggaagaatcttataagggctcaggaaaaaagaaaaagggaaagacgaaagcttctttgagtgagattgtttgtatcctcgcacataaagatctaaggagctccaaggtttttcaggtcatttgcattggcaaaccacgtgggtactattgttggcagatttggatacaagtccccgtatgttccttttatcgtgttttctgcaactccagtggcttctattagacctgcaactcattatgtgtcaatatgttagagaaagagaagagctgatcagactttgctttaagggctgctatatagattgagatttaaatgtgacctttgagcagatgcttctcataagaaagtcgagcaatgacatatacgattcctgctgcaactgatacaggagccctacggctgcaactgcaataagtagaaatatatgggttttaagtctgctgcatcatacatctgcttagagcttactcatccactaaattccaggaactgctcagataatgtaagttacccattagtcatataatcataactttccgcagcttctagagcagcttcaactgcttctttatccaatctaaatatagaacaaaaccgcttctgcagatgaatacaatgtcagtaaactagagctactgactatttgttcaatgcaacaaaagcttaatgcacaaactcactataaagttcgcagtttcgatactcatataccaatttttgttgatctccagtttctcagctatgaacccaactgtctcactaatatccgaaattgaggctttattggcaaatctagatatttctacacaaatggttttgaaaaagctgattcagctacaatggcagaagctacaccaagaaaggaacaagaatctttcaggtttcaaatatatataccacgcatagtccgagtcatatcattgtctcgacaagcaatgtagatacaagcagcaaaaaggacgtttcgttcctttcctctggcataactctccactaccttaaagatctcattagcctgaccctgcagatcaagaaacacaccaattcaaacttatctgtgtatactaagttactaactatacctccagagacgaacgaaaggcttaattaccttgattgtcgcaggaagtttcaacctgtaataatggatgaagcgatatttaaaaaacttctttgaaaaagaagcttcttgtctactaagaaaagaaaaaacggtacccattggaaatagcttcgatggagacgatggacagagctttattcggcttggtggaggccattgagaggggatcgaagctaaatttctgcaaatgtccaagatcagagaacaagaattcatcggaagaagcagtaatcgtctctgaattctgtgaagttccaagggacaagaaatcattggaggacccattcatcagcttggcggtggctatagagactggatccaagcgaggttttgacgaatttccaagattaagggacaaggaatcatcgaaagaaccattcttgtgctcggtggtgacaatggagagatcagtattgcttaaaagtgtgttcgtcggatcagggagacgaacagtatcgttctctgctacaggggaaagatctccgatcgggcgatatttaaattcaagaccacacccgaagcatcgtgtcctcctcgtaacgtgatcagtcacgacattgatctgcttacatctcctgcaactgtgaccccacttcatcgtcatcgaaaccctaattttctgtcctgattataggattcttcttctttcaatggagtcgcgtgaagattttcgagaacaagaaaatggagggaatggacagaataaacggttgattctcattttatagacaaacagaggagaagggtgagaattccgctgtggtctggtgcacgtagttgcaacagtctggaacgttgagatgaggtgtgacccattaatctttgatctgacggtctaatattgtttccagataaatacgaaaatggtttatgtgagcgtctattgataggagaagggaactttgtgccgtttcaaggccatgtcacccaaaaccagtgccgttttttggcggtttgcctgaaccaataaaggaaggagcctaaaacacatcgagttttacaacactaatgagtttcaatatgcaatctagtgcattctatttaaaaatgaaaacaaagtgctctaatttaatcatacactgtaggtttgttgataatacgaacttgttccaaaatacaaggaactttgcatagttgaatatcatcaaattcgttggatatatgatggcactagctagtatacgtttgtaaaaatatagtatccattgacaacatatgtaactcacaagccacaaagaaaacagtcaaacactatattggaaaatgttattactctgaccaaaacctttaatggattattgaatctgatcacaataatgggtaactggtaaagtggtaacacatcctcaatagtaaatatatacctttaattaggcgatggtgataggccaccagctgacaatgcccatcaatttattcgtttgcgtaaatcacgaaatcttttcttcacctttatttaaggtttccaactaaaatacttcagtacatttactatcacaaccatacgaatttaccaattaaaactacaaaaaacatgcataatacaatctgtttgatcaaaaagaaaatgcataatacaaatcagtctaacagttttaaaagatactatattaagtcgaaacaatgatttatatattttcaatttgcaatttttaattataataaccacagtttacttgggatttcatttcaactaataaagcaataattaaggaagttatctctattagactattactgaaaaagacgtgaccggaggaaaaaaaaaaaaaaaaagagtaacgcagttccttgctcttctttgacacgtctctggttgtttccatcagctgacgaaagaaacgaaactcaatgaagaaggctaaacaaaaacaaaaaaaaatatagtattttaaagaaagtcatcgaaaacaaccttcattcaatttgaaaacatcctctctctcaaaagtctctcctgctctgtttctctcttgatgtaagagaaagcaccataccccaggttttatatttagaaacaaaaacctctttctttcttctgcgatagtcagaagaacatcaaaagtcgattagaagcatctaaaaaatcaaaactttgcttgtggggtttcttcttttgttcgatagaaaatggttcaatacaaaagactaattaaaaaaggagaaaagcatagactttcggtagaagaaggtggttccggtgcctccgccgtcactgtctccggcggtgtgtactcaaagacagccaaacagaagcttctcttaactatctttctctctttgctctcatgctgttacatcttcagcttctcctctttctctcttctaggtaatatcaccttactcataatctctttcattaatttttttctagatttttctcataacttcgattgttaattttcttgtacaggtgcttttagcagagaaagtaaaggatttggtccttatgaactgttcattgcacctctttgttcaggaacctctaatggtattttatcttttcaaatctcttctttttaaatttgaacaagctctgtttaatgatgtatctcaatcacaggaacaatttgttgtgacagaaccggttctagatccgacgtttgtatcatgaaaggagacgttaggacacactctgcttcgtcatcagtcttcctcttcacttccctcaaaaacaagaccaagatcacgaaaaagatcaaaccttacacaagaaaatgggaaacaagtgtgatgcaaacagttcaagaactcaatctcgtttacagagatgaagaaaacaattctttagtcgtctcctctgttaatgacatctgcgatgtgttctataacgttcctgctgtgtttttctcaactggtggatatacaggaaatgtttaccacgaattcaacgatggaatcatccctttgttcatcacttcacatcatttcaacaagaaggttgtgtttgtgattgttgagtatcatagttggtggattatgaaatatggagatatcgtttctcagctatcagattatcctcctgtcgactttaacggcgacaagagaacacattgtttcaaggaagctattgtgggattgaagattcacgacgagttaaccgttgaatcatcgttgatgcttgggaataaaacaattcttgatttcagaaatgtgctggatcaggcttattggccacgtatccatggattgattcaagaggaagaactcaaggcagctaacaagacagaagacggtttcaagaaaccaatattggtgattctgtctagaaatggatcgagggagatactaaatgagagtcttttggttgaattagctgaggaaattggattcatcgtccatgttttgagaccggataaaacaacagagctggcaaaaatctacagatgtttgaattctagtgatgtgatgattggtgttcacggagctgcaatgacacatttacttttcttgaaaccgaaaacagtctttatacagattataccaataggaaccgaatgggctgctgagacttactatggtaaaccagctaagaagatgagattgaagtacattggttacaagattaaaccgaaagagagctctttgtacgatgaatatggcatcgatgatcccattatccgagatcctaagagttttactcaaaaaggatgggattacactaagaagatttatcttgagcgccaaaacgtgaagcttgatttgaaaagatttaggaaaccgttgtctcgtgcttatgatttctcgatgaagcgaattggactggtgtatatcagtcacaaaccggatgttaccaattaaaccggggtttgagattgtataatataattttggagatgtaaacattttgtacagagaatgcatagactttcttttgtgtcgtacctaatgacacaaatttacaagcttttgttctgtatagaaatcactaaccggagaataccaactaaactgagtttttttcacactttttccactgagttcataccacattcaactgggtctaagggcccaaatattatttgctttataggcccaaagtcccaaacatgctaatctttcatgatacctcctccatacgtcttttttacaattttgtgtgttttacaaaaaaaaattttgcttagtaatctatttgttaagattttttccgtttctatttgataagaatatattcgatatattttcaatttatactgtatagagtagcttgttataattatcatcaaatttcattgtttttttcataaacaaatatgattaaaattgatctagaagtctgcacgaagaaaagtaaaatggaaacaaattgcagatttgcatgtaattacgacaagtggctcattctcttttttagcatgttacagaagtgtctggttaatgggaaaaaaaaatattgaactttcttttattttgtatataaaccaaccttatgtgagtaatatcccaaagaggtttcttttaaaatatctttgggtttttaattcatttatgggaatttctataacaaaatttcaccacaaataaatgttgttcctttcgtagaagaaaacaaaatcttaagaaatcacgttattttcgtatttgatggtagtttataaatttcgaaagatgattcaacgcgattcatacgagatattatttttttgacaacaacaaaagatagtaaagtgttaaaaaaaaatgtgtaaagttttatggagtataatttaaagatttatcttgaattgagaatgtgtaaatcacattggttaaagtggaactaaatatttttttagtaaattatttgtttttctctagcttagttttaatttcaattttggaaaagggagaatattgaccaaaaacaaaaagagcacgattaaatgacctaacactacatttagaaacacgcatctgaattatttacattgcaaaacaaaagtgttgagctgtatagcatgtatttatatttacttaaatactttccatatctataaaaagatatttgctcaccaaaatttcacaaccgaactaattttatttattattactaatgtttagataattccacaaatacagtgtaattctcaaaatataatttcggttacaatagaaagtcttctctagaaagagatatttttcttttactaaaaatacaacaaactcagtttggaggggaaagtaatcttccttgtgagattttactatctatagaaacgttaaagccacaccttttgcttttcttatcatattcttcttcaaatacggccacgtttggccattctactagatctcaacccaaaaaaaagaaacaaaatctcaaccaacaagaaaacaaagctaaagagaaaaaaaagaacacagtagttgttatttcataaatcttttaaagatatgaaaatatcagttattaaataaaacagtatccaaaacaactaaaaataaagactataataaaatgaaatagttgatcaaatatttccttattatagggatcaactttatttgactatataaaaagtaacatttctgtaaagcaataaaacaataaaattatggaagattaagttttagaaacgtaataaaaagcatgatgacctaaaagcaaagccaaaaaagaaaaaccctagaagataaaaaaaaagggaggcgatacacgaaatagagaagagatccaaaaccaaaacaagggcgttataaatgggaagaaagttccaaaagaagaaaacagccactcacaccaagcaaagcaaattagcaaagccaccaaatatggaaaattgctacttatagtaactcccatctttttatataataccctaattttggtcctaattttccttccttagcccctttcccaatatttgatcaatttctaaagaaaaccccttcctctactagtcctcctcctatatatacaaaatcttaagaaatctctctacttgtttcctctgttatcataatctcttctctctatatctcttctcttcttcttttaccctgttttttttttcattccacagagcccaggttgattgattttgttattcagagatatggggagaggaaggattgagattaagaagattgagaatatcaacagtcgtcaagtcactttctctaagagacgaaacggtttgatcaagaaggctaaagagctttcgattctctgtgacgccgaggttgctcttatcatcttctccagcaccggcaagatttacgatttctccagcgtctggtatattagttatcatctcatgattttgcttctttttttttgctttggggaaataaaaagttttgcatttttatgggtttttgtgtctaaagtaaatgaaaacagagcaacccctgtttatctatatcctaatctggctaaatctttaggttgatgatgaaataattttgatgggttatgattttaaggtttggagaattgagattacgatttttgctatcggattagtttgtgtgttttataaaccctaactgttgatgaaactacaatttggtcactatctttggtatcagaatttgggagatgcatttgtctatgtatatatcagttgttagaatctcaactccagaattctgaaagatcgttaatttctaagattattagaccatagaagtgtttatcttatctttatgaagaaatttgagaatgcagaagtttagattcatgattttttcctgtaatgatcaatcaaaccaattacggggttttactaacggagagttttgttcaatttgtgaagtatggagcaaattctttctagatatggatacactactgcgtccactgagcataaacaacaaagagaacaccaacttctaatttgtgcttcacatggaaatgaagctgtggtaagcagagactctctaccaagaatttatttttgtatccctttgtctgtgttcaagtttttggtttaccttacatggtattcgttgttgtagttgcgaaatgatgattctatgaagggggaacttgaaagattacagcttgcaattgagtatgtatctcactggaaaaagaacttgcgtttgttcttggttaaagtttcggcctttcatcggttttttctacttgttcgtgaacaggagacttaagggtaaggagcttgaaggtatgagtttcccggatcttatttctcttgaaaaccagttgaacgagagcttgcatagtgtcaaggatcaaaaggtgaagacaaaatactaatttattcaaacatcgagagatgatttttgattcatccctgtcttgaaaagttttgttttgattcagacacaaatcctgctcaaccagattgagagatccaggatacaggtacgaacagagctcctcaaatgtcagaatcattgttattatcaattcgtatacaatgttgaatctcaacactcttgttttgtttccttgtcattaataggagaaaaaagcattggaagaaaaccaaatcttgcgcaaacaggtaaagattcatcaaaacccttatattagctcggtctggtcttcaccagtcataactgagttcaattctaatttgccctcaggttgagatgttggggagaggttcaggaccaaaagtgttgaatgaaaggcctcaagattctagcccagaagccgatcccgagagctcttcatcagaagaggatgagaatgacaacgaggagcaccattccgacacttccttgcagttggggtaaactgcaaaacaaagccctaacttctgttacaagcttttattgttactgagcattctacaaacttgttggtttgatctttcttaggttgtcgtcgacggggtattgcacaaagagaaagaagccgaagatcgaactggtctgcgataactctgggagtcaagtggcttctgattgatggaatcgattatttttctaattctggttgtttaggggtctctatgtgtcttcttgtttctggctgttcttttgctttatttcatctcaagtagagttttcttaatgtttaggtggaacatttttccataatcaagaagggatttgatcaatcaataacattagattttcttagttaaagacttaaagttgcccacacaccacaccatatgtgattatgatgaatttacattttataaacaggttttcagtgatttcaagaaacataagcgtgcattcattttttttttgctttaactagaacccaaatcttcaatagttttcatgaatcgactttgaaaatacataaatccacaacattaatatgattaagcattcttgaaatcctaagttaggtgaacagagagttaagagtaaatgctcctagacatggtttagtcgattgcagataattcgggtcagcaaagaaatgtgatcactaagcaaatctgggttgcgtaaactcgttgacaataaacggaagcgtcttaccccttttttccggcccacttctttacttgggccaaataattttattttgggctttttttaaaaggatgatcttaattgtgtgtgggcatttaagggcaccgacaattcaaaggtagccgacggcttacagaaatatggctgctcagatcatcagagaccccatacaataaatatttatgtttcgagaaataaatcaccagatggttgacaagttgcggcagtaagtacatgttacttttcttgtcagaaagtacaacaacagtactttttttatagtcgacactaaaattaagactcgtatttagtaatgcagaaaaatctttacaaaaatatactatatactcctgagaaaaagcagctgatttgactgaaataaagaaaatgttagtagtctagtaatgatttgtgaactacaaacgttgtttaaggcgtttacagtaatattaacattacggaatacaaaagggtgatgactagtcgacaaataaaaatggtaatgagtctaaatgacgaaataattaaagaaatgtgtgaaaggaagagaataataagcacaagtcccggacctgaaaacggaaagatcagaagagccacgtgtgcaggagcttgaagagaaggttccaaatgagaaagagatccaccaccgtcatcaacacacacacacacactttgtttgttctcacggagtccccaacaaaagtcaaatcaccgttcattgagccccacttttatttacttacatgtttaatagacccgtttgtattacgagacacttctagtcgcatgtctccaccgtccgatcacggatcctagctgtaatcaagggggcagatttaatgaagtgggcctcttagtaactgccttctccacgtatcctgacaatttattgttttcttgttagtattttgccatttttggtttattataggatgattaatgatcttataactcttccataaactaatttagatagatacgcattgcatagtttgtttttaggtcgatgaaagctaatttatactatacctttgctttgtttggttttgtgtgtcagcgttacattaacttgtctttgttttttcacattgttaacaataaactccaaaatccaaccatagcattttcgaggttatatatacttgtaatattcattaaatttcagaaattactcataaactattaagaggatgttgcttataattcaacccccatttcagtagtactcaacattcaactgcattcaactgaatcttttggcttcaattactatttccattacaattgtccaaatgtaaaacgatttttacacaaaaatcaggaaaatgatattccataatgataaaccatgatattggtaaccaataaagactagtacatgtaatcgagcttcataaatcagaatacgtaatgaaacttaaccagtcaatgtaatttttttcatacaggaaaagtagactgagaacggtcaaactttgttttctaaaaaagaaaattaggcacatccttgaaccacgtttgacaaaatctctggtttaattacacattaacacacaagtactcactctctctttaaaaggctctatacactgaatttaataaggaaggttctcacttctcatcaatatgaatttatcatttcttatatactttgcactttgcgcaataaacatgtgatcgtattcataactaaagtaaaggcaacatactaaccctctttatttaccctttttagagcttaaaatgaaaacaatctccaattattttctgtaaaatgttaactactgtaaattttgtgaatatctcagtttattttacatttatctataaatacatttgtttttatcttaatagtaaacttagattcagttacatctctagatagattggatcttttaaattcacttttaaattctcttattctgtgaaagttaaataataacttcctctttattttgatttttctcataaatttttgaagttaaattaaaaattcgacatcatggggtcgttaattaacatccccttgatttaatatccacccacattttttgtcgtccccaaaaaaataatctgacccggaaaacccgacccggctttccttttcgttgttatcataacaataaatcaaaacagaacaaataattttgatgcaaaaaaaaacaaaattcgagaagaaagccaaaaagaaaaagaagagagaatgctctcagtctcagcctctcctcaccaccactaaccccagaagaatcctcacagacagagagagagagagagaatcagaatgggtttgatatcagcgaaagagacgaagaacaacactagaggaatgggtttgctcttagtcttcttccccgaccaccacaacaacaacgacgactctccttcttcttcttcttcttctccggcaacaacaactctcttccgctccagatcttctcgtcttctcctctccaaagctcaatccacaatctcaatctgcatcctcctcctcttcctcactctcttcctcttcactctctccaccttcgaaccttcctctggctttcccgccgtttcttcttctcgtcctcaccgtcgatttctcctcaaccgcgacatctccgcctcttctgaatctcgtcgtcgttataaccgattcgctctccaaggtatgggtactctgtttctcagaggaaccaagagcatgcacgatttgattgttgttcatatctcttccgatactacggaagacgatctccgtctcttcatgcgcttgatccaccgctccggtgtcacttccaaatccgacgtcgttttactcttcaattcgggtacgagattcactgaaatgatcgaagaagagaacgactcgttcttaaaactcgttgatgttcatcggaattcgtcgaatcaaatcgactccgtttggggatttaatctcacgaaattcatgaagaagcaatcgaaatcatcatcgtctgagccaatttgggggaagaagacgcatcgagctaattacaacgatacgtcgtcgttgaataactcgaccgagtcaaccgagttgttgacacatggctcagtagtgggtttcgacgtgactgagttggatcctgaaaactcgctatccgggtttatggatcacgttccgataagtttgagaagatgggcgtgttacccaatgctgctaggtcgagtaagacgcaatttcaaacacgttatgctcgtggacgctaaaacctccttgttcctcggtgacccgctaacccggattcgtaaccggagccttgagtcagtcctcttcttctctaaacacagtagtagtagcaagaaaagctccgaggttaatccggcgattctgatcggtggagctaaaggaatcaggaggttatcgagctcgatgcacactgagatcgtgagagcgacgattcagcagcagcataagaagaagaactcggttacggaatcggtggtgttgagccaactcgttgggaatgttcacatgacgaagaattttgaagtggttacgagtgagtcggtggtaccggaagcgagttcactggctgagttaaggacgagaaactcggcggcttcgtcgataaagaatcatgatataatacaaagaggtggtggtaatagtaatagtaatcatattattgatattatggcgattattatgaaacgtatttgttcttgtgaattagattcttctgtttataattactgttagcattattttaaaagagtttacgaaacaaaaaaaatagggaaaattttaatttatttgtttgaaagttttgtacacatttgacatttgttatgttctttagatttttgatttttcacagatgtttttattagtgtgtccacgttctgtattcattattgatttggtctccttcgaaataatcatttgataaaatcagcaaaataccattattttttggattttatatagaaattgtcggtaatggaccgttttttgtattttatttattttgctagaaatctcgaaattattttcttctgggatatatataattgattctcaatatgtgtagatagataaactccacaaactttgattcctaacgatgtgggctacaaaattacaaatacctgattgtaacggaatatatatatatatgtatcttaaaaatacaatatactaaataaattgttatgatttctatgttttgtaatattttaacattttttagaaaatggtataaaaccaaaaatcttgtccgatttatagaatgaaagtcttcactaaacctaaaaaatcaggagagaatgcatagtactataatttaaaataaaactttagataacataccacgataacctatgatgactgactcgggctaattagtcagtctatgaaaggagagacgcctttagaagacaattatgatgatgctgatgatgatgatatcacatgtttcataattagaaattttaattactatatttgatttgtttttgttgttataaagacacacgtcgcatgtggtttatttggtcttttgagctggttaaagtcaatttggccaccacttttatattttgtctaacactaaaaactttagaaaacgtcgtttgttcttcaattattgaaacctattattttaacaaaacaataatgccatcacgagagattcatcgttggaatcggattccccaatcttcccaattactatcatcgaagcctcaaaggtggtggtgacataaacatacattaataaaaaagctcatcatctaataactttattcggttgaaactttttatctccactcattacagtcactagttatatagtagtatcattttcgttgttgaaagcattagttctacacttattcattgtaatggtccaattagatctaaatatataataccttcgatgttgatacttataattctttgataaaatccatcaattttcattccaaatatataaacatagaagagatttcgattctcatttttgagaacatatgttttaaagttattattgaacaaaaagaaaatgtggttatctccaaataaaatcattatagattaagcatgtaatattagtatcataatgtaaatcaataattgttttggatatagatgaagtcagtatctttgtatgtccacacacattaaaggcgtgaggttgtgaaaaagattatcaacaacaagagaaaacaaagagaaagacattaaaaaaaatacaaagtggggttctttcaaggagtagcaagttaagtctctctactacaatggcttcatttagaagccaagaattcacatttatccataacaagcgtgctttgctttttctttattttaccatctcaaccacgttaactattttactctaaagtagtctagttcattaatcaaatactgtgtattttaataatcaatcattctatatagtcgaaacattactattgtttatgtattgaaaacacttttagttgatgttggagttttctaattagctttatccatggcaagttatgtagcttccaacctttggctatttttcatatatatatatttttcttacaaaagaagaagagaaaccataactttaattatattaaaggtggcgcagccgggcctttatttgtttaatagtagaacactgacaagtgacaaaatgataaaattcatttaatgattttgtgttgtgatttcttagaaataaagttgaattttctgaaagaaatacttttatggtaatggagggtttatgttcttactacttatgtcatacgatccagcgggatgattaaaacattattccttctaaattaataacattattatgttatatactatatgcatgtttgttttatatgtgaaataaatcagtattgatcaatcacagtaataaataatcattttttaatgtctttcttttcattacataggaactttttaaaaagtattttccttaagaaacaaaagtatatttgttaatataattcattattaaaaaaagaataagctggacaaaaaggaaccgacactctttcttccacacacgtgtcgatcgataattggttatacaggattcattttccttttggagtgtggaccctctaccttagacagagagttcgtgcagagactaatatggctgctgctgacctgtctcgctcaaagcaacgtcgtcgttttaaaatttgcccagctcaaaaatttagacgtaaattccaaagattgtttttgtggtcgattcttttagatcaatgtgacgatagtgacgacgattgtaagaaaatcaatattttgaggttataagaaaaaagattttagatcaatacatgtaagttagtgaatgatttttgttagtgtactattatcagtcgggttaaatcggtatgaatatttttgtataaacgatttcgctgacagttcgataaacataagtgatgattaatgcgatcttacgttgtttatggtttattagtttagtttcttaagtttgtgcaactagtgagtagtgactataaatgcagttcgtatagtcaaaagcaaaagtcgtaaacattctcgatgtggtaacactgcataatcgcagaatgtttgcgtgtggtttattatcattattaccttgagaaatactaatgcaacatttgcgtaaccattctgattcccaactaattgtgttccttgatttgttgttgcacagtaacaaaaaatgaaaatgttaccaaatttgtgggagaccaggtcagacataaatgtggttgttgttgctctataatttcctttcttttctggtcatttcatgattctgatcaataatttaactgcatttacttcgacacacatatctgtcatgttcatgtactatggaagctttgctagcaacatacatagaactagaacaacaaaatcaaatggtgtctcaattgtcaaacgaatccaacaccaatatattgaaatttcatgagtttacatgtagacactgttcttttacacaatcaaaataatgtgcaatccagatcaaagaatttactacccaccaccacacaactgtcctgacccaaaaaatgaacgcatgtttgacaaaaaaacaatcattacaataacacaccattttgtggttaagaatatgaagaatcaaacccaaaacccacccatgagaaagaagaaatatattgaaaaaccaaaacaataaaagagtaaaattgaaggaagaaaaacacaagaaactgttcattgtcttcatagctgcggcgctgaggtcactacataaccaaataacacaatggcatgttgctcttagtatatatctgacatggaggatcatgagatctaaggatgtttgtgatgtttccacctgctaattttttttggagaatccttagaataagttgaatttcttcttcagtaagtcttgtttccatccaggcaatttgtagaatgattctttctccatcccaaatacagtcttgaactctacctcagacaggtaagcctgataaattggtttgaggaataagatactgacaacttatgctcaaattaagacgaaagaaaaagaacaaaatcggctcaattttgattcacctctctgcgtttgaagtcaatccctgtcacgggtttctcagatttggcttgtagtcgttcgtaggtgaaagttactccagttgtttctacttcagaatcatcctgctttggttttgcttcctcagcactcgcttctgctgcaggtgacacttcctcttcttccttggcttcagtagcttcttcggtagcctccacttctgagaaagctttctcatcttttgcttcagctgtaataaccacacatactcacagttattagcgtaatcaaaccaaggccaaaaaacgaaaaacaagctcacgatatttagtttaagcgctggtatcaggtgaagaactaaccagaagggctggtatcaggtgatttcttcttctcagcagtgagaacttgggaaagagcagccactgctgctgctctttgtgacgcctggcttgtcaatcctgatcttcggggaggtgactttgatgatggtgaagaattgaatgcggatgttaaggcggctaaagcttcagccctttgtcttggacccccttgacttccatttgatctgtctcggctctgcagttaaagaaatgagcgtctaagtcaacatatcaagaacatgggacactagtagctgtgatttgagaaattatttgattgcaactcaaaggtttgcgtaactctgagagattcatgaatgggaaccccagaaatgagtcccagagcctttttttttccttcatgatatgccaatatctttgtatatatatgtatccaaaaaaatctagtagaaacataaaataatgagcttaagactatttaccggagagcttgttctcccagaagaagaattaaaggcagaagtcaaggcagctaaagcagcagccctttgccttggtccttggttcccactgctagactgatcctgcagcagaaggtaaattataaaccaacgttccagggatgtaatataatatattacaaaggagaggcatcaacaacagtttcttccatcgtcacatatgttcttatctgctacgattagacacaaaagcaaggaaacataatacgcaggtatgtagtatctccaactttccccagtaagcatcataactaagtgtttacctccacaacgtggtgtgtaccaagtaataatgctgccttcttctggtaggaattcccttgcacctgtatgacaggtaaacataccaaaactaaatttaatgagacaaagaagtggaagttcacgaaaagtcaatgacaatcagagttaatgtcgtgtgttctggcagctttcccctcagtttaaatgtaaatctttcctcctctataaacgcagagcttcctcagttttatatattctacaggtcattttaacaaaagagatgtgatcactaactgcattctatataagggtgctgaaaacagaattggtatttgcatacaagattgcttttaaatgagtatgttcccaaaccctctctaacacaatcacattaactaccaccctaaaaaaaaagggacccccttctcatactaataaaccaaaagatatctgcgaacagaaaaccttacagtagctttagtagaatcccatgaaaaataagtggtgaagaagcacggttcatttccctcagtgattttgtataatggaacttttggagacaagccttccagcgaaccagccagatttatgtatctctgcgcaaaactgtacaatgagcaaacaagagagaaaagaaggaggaatcactatgctgagaagcaaaactgatgaggcatattacttggccaatctcaaaggcagtttgtttttccttagggtccacacattgaccaacccagacaaaaacttcagcatgagtatctagtaaatgcatttcctccgtcaagaggtcatcttgatcaaagttgtgaatctcttcaacctgtgcaaggtaatatgttaaaacatgcaacacatcttgataaaaaaacgttggatatttttctaaattctcacctgaaactttcctgaggatccatgcagacacatgaaaagaagaatgagaaagttaaaatatgcaagtatatcaacaacaaaaatgaccctattagatgctttgaccctcataattgatgtcttgattttaattacctctgttgaaggaaaaggagaacaagtgaggatccctgacagtctcagaggaaactttcttgctggtgaagttctgttttcccccaagtgcaaaccaaaaggatgagctctctgttccctcttttgcgtgcttgatagtagtcccaggctgacttagcaagaaagaagatgattaagtttaccagttacagaaaagtgataagaagtacgagtgagtttttatttaaaagcttaataaaaattataccattcctacttggacaatttcagctaaattaaaatcaaagataacaccattagaaactacctttaagaattc

SEQ ID NO: 1089 - DNA, 87503 bp, Arabidopsis thaliana
aagcttaataaaaattataccattcctacttggacaatttcagctaaattaaaatcaaagataacaccattagaaactacctttaagaattcagcaactttagcagccagttcctgctgctcatgcgtactatggtttccaacccaaaggaacatggaagtacccgattgcagaaggaagcagtcataggagttcaaagaagttgccacctgcggaaaggattgcacaaatgtcacagacaatcgcagacctgtgtattcttaatacaaactaaacaacatctaggcatcaatttcaaattctaacattacacgaataggcagccaagttttgaacagtgtaaggtagaaaaagcacttagcaagagataaagaaaggtagaaaattaccgcttcaacttgtagagccttattattgtgaactccagttccagatacttgaataagtgcaattgattccggcgtgtaggtttcgcctgacgaacctttctctgtcatactatttttgtaaccagagctcaaaccgccctaaatgttagtgtaactatatcaattaccaatacattttcttgcagcaacaagcattctgtattaacaatcaaaagaaataccttaaggacaaccatatgttgaaaaagtgcaacaaattgtggaggctctttaccctcaaatatacgggcctgcaagaagatcaagttattcaacaatctttcactgctagtggccattacttacaataacaaaacatggtacctgcactggtcttcccttcaacgaatttgtcattgtgctcgctagacgaactgctgtttcttgatcctcctaaactcgggagaaaacaaaatttagatggctaaatattcaacatgttcaaatatatacataattgaaaaaaatgattagatgaaatctaccacaatatgtacccaaactttgaccaccacgtcaaaagttgagaggcaacaactcataacaataaactacaatactaacagcatccctcaatagctaaagagtaaaactgcagcacatttacaaatatgaattttgaaacatcttatagacccaaccaagtttcaatcttacttataaaatgtcttacaagacaaaccaggaagaagctaaacatgccggctttgtcaatacattatgtcttactatcctctttccagttattaaaagagctgaaaatactaacagaagaaatagggacttcctttttatatgaacaaaaatatcaaagatgcaccttttcacgtgattacctgattactattctttccaaaccaacagcacaagaagtagtcttctttcctttcaccagaatggtaggtataaaggaccagatagcagtccccagaataaagttttccgacatgatctttggatagaacagtcttggagttggcatcaatgtaccaaacctgttacatgagcttaatgagtttggatgaaaataaccaattagattgagcaaataacagcacaacaagtcagaagacagaacagacctccaactttccacctccttcaagcaatggtggaatatcctcattcactggtgtgctttttgacaggccctttaacccaacaccttgttgcttaagtaatgctagacaataggaaaagtaccaaagtaagtcagggataagagatctttcattgttttattaataatttagagtatcaaagcaatctttaccagcgacttttcctcgtccttcttcattagcaggagttgccgagcctgatggccaagagtcaaagttagacttgaaagaatggggctcataaccttgaataacacgggttatgcgtgttgcctttggcctattttcactagcaacaaaatcctgtagaggaaggtaaaaatgagaaccaatcctcagatattctaaggctaagcaagttagacgattctagctttacctcagcagcttggatagcagtttttctctcttccacttgagttactcggccaacccagataaagatctcagaaccgcagtccaaaaggtagcatttattgttttctagcatagatttggacaaatcgccgtctatagattccacctgaccatcagcgatactaaaatagggcaactataaatcaacatccataaacgagtaatacataaaaacaaatgactattaagtgtttacaacattgtttaaagcagaaaacatctgaaaaccaatagagcagatcaaaagggagacaagtacctataaagcttaggcggagttgtctccggaataatttcatcctcactcgcaactttccttgctattggagcaaaccccccaaagaggacccagaactcgccagaatctgattctgtatctaattttccatcatctgttatgcaaggaaattattatacatgcatgagtaccgcaataaattgattgagcatccaactgctgcttgattgactgatcaaaacgtgaaaaagaagatattcaaatattagttgtaatgcgtctaatacaacttaccaacaatagcaacgtcagaagttccttcatgaaacttgtctttcaaatattgaatgactaccaacgctttagctctctcttggatatttgaatttgcaccattaaactgataaatcttttccttggtgtccaagataaacacatcatcatgattcagagatgagcgtgcaaaaggaacctacaaaagaaaagagataagtatatacatattaaacactcatgcgaagagagtgtaacacttctaaaaatctgcagcaaagaaaacctgcttcaagtggacagcacgttttcctttgcaggtatacagccgggtttcaaactcctcctcctccggttttttaaatccagacgcaacaccaccctctagtggtataatgcaaggcttgaagtaagacaagaatttgtcagattcatgaccttgaatttcacgatattggacagctcggcctccaagagctgcatcaagttcaactgtcttgacagctgctgttccagcttcatcctggaattatcaatcgcagattagtaataatgacgattcaaatttagaacgtaatatatgctatcatgcccaaaaataaatacctggcttgtatctttaccaatccaaaaatgtatatcaaatagataagcgccacccttattctgtgtggtctgcacatatgaaagctaatcatgataaatgtgaaagataataaaggagcatatattttatacatatgatcagacaagaaagcatgttgtcctgttctgtaagctaatatcttattatctattcttgataagagtctataaaaaggggagaagaagagtgaaaaaaatcaaaacctgcaagacaatgtaggtatctcccatatagaactttccatgttcagactttggtactgggactggctcaaaattttcgattctccagatttcagtacctctaagaaatgttaaagttcaacatctcagacagcagtaaaacatttaacattaccagcaaactggtgcatacaaaagagatagcaacaacaaatagcatcttcctctctgtaggaaacaattatattgcttcccttgagatctaatactttttgaaaggatacggtttctgccccactccttgaaacgcaggatccaatacttttgttgacccagacattttgtattagtggctaatctcttccttcaagagaaaatacataaacgacctgccaaaaacatagagcaagcataaaaaataagaaggtaagagattgttttataagaagaaactggcgcttggataggagcctaaaaaacactaaagagcaacacaaaggtctagcttttataattgaatttctaaatggcaatcatatatgagagaatatacagtattacgtagaagcatgtttgagcaatatattaactctgcaacaatctgagtactcagttctctcccacaattcattattatctggaaatcattcataataatggttcctcagggaaagtaattcaaggggttcaaaactgagcctggctatcactcggagtttcatgtatcgctataagctctgttgtgaatatacatctctagacatgagaagcagaggaaatgcaaataactcttataagatcagcctcgatgattactgaatcaaaccttccttctggcaaacatctcccgccaccaaataatcgaagtaatcaattaaactacagtagtcaggctctagaatgatctacatataaccttcaattccatgtggatctcaaccattttcacaatgaaagtccaagacttgaaacagtgatccaactttgcagtaatattggtacacactcgcgaatccaccacttgttttggtttaaagatcaacgcaaacttcaattctgtcttagcttacttttaactgaatttcgggtcagaaaataatccgatgatcaacttgttcgttcttgtttctcaacggatagagccttacttttgagaaatactaaagtaagctgatgaatgcatgaccacataatcagagaaccaaaagaagaaaacaatcaattttaaagcagagatcagcaagtacaaagcagaccgagaaactcagattcaagtacaaacaaccagagagagatccaaaaaacgttaatttgaatcgaaatcagctgatccaaacaaacccatcatacctgaaaagacagatcttcgagtagcgctgaggaagacaaagagatgggcaaaaaagtaatggagagagatcaggaacaagaaaacatgaaaaagaagagagagaggaaaaagcgaattattgaaaggagatgtgtgctatgttatagcatctctatacaaacctttcgtggagattttgtgatataagagtagtattattgcgtagacgaggcgaggaagaagaagagacagagaggtttgaggaaagacgcgagcgagactgtgatttatttttaaggcagaaagagagattaattataaaatatatatatatatacaaaatgcaccaaagagataaacttaatttaaccataaagtgaattttaatttgtcaataatttttgcagagtaattaaatggcataatattggaatttctcatacatgataaatgtgtgattggtgaaaacagtcagtttcaacaatttggtttgttcatgttttctcttactattcacaattaagaaatcatgctgagccttttgaaaaaaacaaaaaaaaaacatgctgagtttgaacttggcagacgatgttaaagatcgaacataaaaggataaagaaaaagtttgaagcatattataacaaaatgcacactattattagtaattttaataacatcatcatttcaagacgacgacattgggtccatttcgcatgtgaatagacacaaacaaactcttttaaaaggatacatttttatgcatatgaaaactttcagtatcatcatagaaatacactaatccttttacgggatctactacaatcataggaaatcttgaaaacaatcatatatatatggaacaacattattcgatattttgatcatctttttatatatatatatactcatatatatatactcatttatttggtatttatcgttatatttctagtgtgtgtctatatattccttttagacatatgaaaagaagtagaatattacgtacgtgcagaatgatggcggtcaccatatctacgccggtgccgaccaattaacctcaaccaatattatatacttttgctaacctcagagttgtttcatcaatattttacgaaataccactatcgtttattttttggaaaataaatgatgcgttataagaaaagtagtagtatatattaagaagcaaagccaactcatcatgaaggcaatacaatgacaactcaaaagaaaaaattagaaattggtcgctttcattactcatgcagtcaaaataatccatatactttgaatatatgttgccggttcgaagcagatgacaacgacgtgattttttatttatttttgggtcatagaagataaggttactcgactcagtactccaagtgggataggaatatttaatttcttttctcaacctcaaacggatttttttttatttcaagtaaaacggattaatttaacttggataaaatgtattccaaaaaaaaaaacctttattcacttcgttgaccatttgttgtgtgttggatgaaacaatgttttgccgtcagagcaatgcgcatagtataagcgtcacaataacaccgtctagttcaaagtgattattattcacgattgcaagtgacctttcttcttcaaaacattttaactgagaaagttataaacatcacgaattacatggagaaattacatcaagagaaccaaaaaatcaatgaagcatttttttgtataacacaaatggtaaatctgtttctaaacatcctttcatcgctgcagctacttactcttgttttgactcatcattataccaattccatcaatagcggatcaccttccgccatctccctcaccaatttaatgaaatcttgttcgttcgagatgctccaaggatgaactgcaggtgcttccgctgaatacaaactcaaagaagagtttagcgaagctggttctgacttatataccattgagcctagaaccgggtcaaaattctgaggcgaatccatcgataggaagaacataggcacagcaactttgtaatgcaaatccatatcaccaacgagattaacaagatctgtaaagtctgagacgaagcgtttagggacatagaaaacttccgagctgcacatcgttaagcttgtgccatcgctattctttgtggcttccttgtaattgacttggaaatgaaccggcattgtactgacaattttcttgactaattccgcctgaaccgaataccaatccgagttcccggctggtctcaccgttgtccatgactccgttacctaaaaaagggactctttgtcataaaaccgaatccaaccataactcctcaaaccaaacattttttaaaatccaattggtactattatatttatgctgaacaactagctactgaatgagtaccttgtctgtagtccagagcttggttttgtcagcttgaagtaaattccagtaattaagaactgtatcatcttcaacaaacacaaatccgtcagcgctgctgtaccgatcaaatatcttcggtagccgcctgaaatggatataacagagctacagttagaaagctcacattggtggaagaataggttgaaactgagattctatgcaagtttccttgattacttgtatatgtgatcgagtttagcttcttggacgtaaaggtctgagtttttccgagaggacaaaatgaccacggttttgaatatccgcccataaagtaacctccattcaagagcagtacgttccacaggtccgttacagaacattataagcactacattcccaaaattcttcctccacttaatcaagttcccaatttcagaactcactgtgcctatctcctcgaccccaagatgaaccgaaggcaatttcctaggaacaaactcttttctatctccatgaccaatggttgctcgtgggcggtccaactcaagtgacattaaccgaggctgctggtatccgaccataagcaaatcctggagccaagcagctgtgaatttcacatctagctcagtccaaaacccttgttcagccataacaaagctcaaatcaagaatcgtctcgaagaacctatgcttatttgatctccaagcaagcaagaatttgatcaaacgaccgacattgatatggagatctttctcatcagagaaagggtaagcttcgactctatcataccggtgaacagttggtggataaacagcaacataaccaccaagctcccataaaagcctttgtccccagtaacctctaatcacatctgaagccatggaactaaccgaaacaggaagcattaacccccaaaacgcagaggaatggtacaatgtgttaaacgaattcacaggcaccatcataccttgaggcaacgccactttaggagaatgctcatcgaatctgatatcaaacggttcgaaagtcgtcttcctagtggaataatacacggaatcaacatccggcaaaccgttggaaatcccttgctgaataaactgtttaccaccaaaaacctcagtgtaatactcttcatgattgatctcacctacattctctaatggcaaacctctaggccaaaccgatcgttgcccgaaatggatatacggattcaccacagttcgattcgggttttcgtgactatactgtaagattggttcttgcctagcgtcttctccaactaactctacatcaaaatgtttcccaagatctccatcaatcacttcaccacgatcatctgcatcaaagatcttctttgcaccatgctggatcgcaaacaagtaaccgacacttttgcgtacgaaggaatcataaggcaaatgatccaaaatccggtaattaagctcagcttgagcatctagagatagaaaaatcgcacctttgagattccaatctttaggtgttaaagagtttccgatcgctagaacttgccatcctttaatcttgaccaaacctttgagctcctctgttgggtgctttgtcaccgacacaacgatccatttctctgtacggaaactagcgtaaggtgaggttttgtcggagacgatttggatcgagttccagttgatttgagggcgagtgagagattgaagagattgagttgattgggattggaaacagaggagagaagcagtgtcggtggtgttgtagaggaagaagaaagcagcgacggtgacgatgaagaggaagatgattacgattctgtagacattgtcggaaacccatgaagagaaatctaggattttgggttcagcgaatcggtcccgactaggaagttctctgatccgagattttggtggcttaggagccacacgatcttgaaccaacatcagattcaagcactaaacctccaaaacccagaccaaaacccagaagcaagactctgaattcagataacaaaatcaaatcacaaagagtagtgtaggtttcctatccagggcaaacaaagagagactctctctgcaggaaatcggttgttgtcggaatttggaggttgcttatgcttcaattcaatgcaaactgcgaaagcgaagtcgttcgttgagctgcgaggtcaatgtcttcctcttttgggaatttcttagtaattttttttttttcctttgtttgttctttacgttttgattactgaaacactacaacaatgcccacatcactcatctatccttctatgtacaaagagacaacaactaaagagcagatctgtaggaccagagaaaccatcacatgatggaaaaggtacatattaactaaaggctgattagtttattaaattatctaatttattttcttaatgactacagagaccaataagtacatttaatactaataattttgttaagatcagtgtgttcaactgtgtgttatactgtataacttatacaagaatcaacacttacaagatatacaatgaagaaaaaagagagttttatggagcttatctttcaccaatagtctccacaggagcaagttccattcttgaaacgatgaaacctcctaacatctctcaagatgatttctctatcaacaatctttgagataaacttggttgcaagatgacaatcattacaaaccctgaggtttttagccaccctaataattgtaccgggtgatgtgttaagtatcccaaacgcaattgctagcttctcactgtgtccacaaagcagaatctctttttcatcttcctctacattgtggagtacacaagatgtgtcaggtacatatccttcttttctcattctctcccacaatgtctcgagatatccactgagcttttcgctttgcgggtgagatgagtcaccggctacaaatttatgtacttcatcgccatgctcaatccagctacatccaggttcttttctcacgccttgctctttcatatttcttcttacctctgttgctttatcccagaggcctgctgatgaataaatattggcaagtaacacatagtgactagctacatttggttccagttgaatgagattttgagcagcaatttctccaatttctaggttattgtgaatccgactggcaccaaggaggctactccatgctccagctttgttgaaatcacgaggcatcatattcatgagttgatatgcttctttaattctaccagcccttccaagcaaatctacaacacaagcataatgatctgagcttggttcaaccccgtagtcgggtttcataacatagaatatccttaatccttcatccaccatgcctgagtggctacaagctgcaaatactgagatgaatgtaacctcgtttggttttactccctgaaccatcatcattcttagcagatctatggcttcttgaccgtttccatgcatcccgtaagccattataatcacattccaagtaataacatttttttgtggaatctgatcaaacacttttctcgacatctgtaggcacccgcattttgcgtacatgtcaactaaagcgcttccgacagccacatcagttgccaaattgttcttgatggcataagcatgaatttcttttccttttgctaatgctgatagtgcagcacaactgggaaggattgtcatcagagtgatggaattaggtttaagactaactcggctagcccccttgctcacttttctttcaaggttttgcatcttgtgtagcaggagaagtgcgtcctcatggtgttctgagaatacataacccgtaatcatcgtgttccacgtaactaaatctctatcttccattttaccgaatatccgcatggcgatatcgatctttcccagcctagaatacatatccatcagtgtattctgcacaaacctgtctctatctaaacctctcttcacaacaaatccatggatagcttcctttctagagaacgcaccagaacggacacaagcaggaacaacacctgccattgtggtagagttagccagaagcccagcactttcttccattccaatgaaaagcaacaacgcttccttgtcatgctcattctgggaatacccagcgatcatagcattccacagaccaatctttctatcaaacattccatcaaatactcgacgaccactcaacacttgcttgcaattgcaatacatgtcaaccaaagcactaccaacaaaggaattctcatccaaagagccatttttcaaagcataagcatgcaattctttccctgtgcgaagcatctccaagtgtgaacaagcaggaagaacacttgaaatagtgaactcatctggttcaacaccttcaagcaccatttcacgcaaatattccaatgcttcaagcaactgctcgttctgacataacgagctcaacacagtgttccatgtgaccaagtcacggcctccaaaagaaccaagtaagactttagaagatgctaattttcccagtttaccatacatagccaccaatgtgttgattataaacgaattcaattcaccctttctcaaaccataggcgtgaacctgcttacccatcattaatccctcaggcataggcaaattcgaacaagcagtaaccacactcaccaaggtaaacgaactaggttccacattttcatccaacatacaccgaaatgcctctaacgccatttcccacttctcaaaactacacaaagaagaaattaaagaattccaagagacttggtttctctcagatattctatcgaacaccttatagacagctccgaaatctccacactttctatacaaattcacaagggtattagccacagtcacggaatccacaccgtacccaaatttatacacatgggcatgaatctgtttccccagttccatgtcctgaagatctgctacagcctttagcaaagcagggaacgcataattatcgggttttatacccaaaacaatcatgtcaacgtaagtcaaaacagcttcacggagcaaattagatcgaactttggaccggagcaagtcaatccaccactccggagagcgtgattgagagataaatattgaaggtgcgccagaaacggcggaggcaacatcttcggttgcagaggttggtgtggcgcgaagaagataaggatgtttatggcgggaaaatggaagcagttgagaaggaaaggggaaaatagacgggagagagaaggtgaaggcaagaggacatgacattaagatatttctccgaaaatatctttatttgcttatgaaatcgaggttcgtggagatttctgttaaactgtatcagtaacagtaatgcgtagacgaggcgaggaaagacgaagaaggagatagaggattaaatgggccataaggcctttcatgggcctaatatatgggctcatcaattttaattcctctctaggcgctgcaatataacagagtacgaatgaattctagtgagagacagaaagtgaaattcaaaaacaaaacaaaatcagatcatcgcgccattcgcagaagctcagagaaaaacttcattcggaagaagaactcagtaatggcgacgtatccttctgtgattgagagaaccgttgcttcgtctcttcttctcctttcctatggaccagtgttcttctcacctaaaaggttcgcagaacccaatctcgtttcaatttctgtgttaattttgaggctcgcggttttagatctgtgttatcttccttgtttgattatgattatcgtattgggtgattattaggtcggaatctgtagaggaatcgagctatgtgaggaagtggtgtcacgaaggaagttcgaacttgagcttgatgttgggatctagcggatcgagatcttgtggctcggctttgtccagcgatggttcgtttgggatgagtgaggatcgcgaattcaaaatcaattatactggagatccgtttcgtctcatgaatttcaaggtgcgaaactcttcttcttcacgtctctgtttcagagttttcttttggttgttatctagatctgaatttgagcttaagaaattccaaattatgagaaacttgattgattagtaacttctctttgttgatttattccgtttgagcttgatttttgaagttactgtttcgttcttcaacctgaatgataatcgctagctcttagatgtcccaattttctttttacgattctggatttagtgattagtttaccagaaacggatcgtttctggaatttgagattttcgaatttcatgtcgactcgtttgctttgttatgctctgattttagtaagaaacatatatttcagagaacaaaactttgagtagagagtgtgaaaattgatgttcattgactgaattatgcagacagcgagaaaacgccgttctcaggtcatttggggatccttcaactttaagccaacacatttgaagatgaatcctgtgtgtgatgttctctcaacatgctctgttgattccaaagatgagtcatgtttgtcaactggttcaagcgaggtttctagcgtagaaagcagaatcaaagtcaggaatcagaaaagcaatgagaaacttagaggaggagggaagacgatgaaagaaagtagcaggtcaagttctattcgccgtagagccaaagacatcttggagtttctttcctctgaatcttcttcagaagttcacatccgtcagattcttggcgacagtcccgataccagcaaagctctcagaatgtatactcttcttctcattcatacaacagcaacaacacatacacacatttgttacaattttatccatgatttaggtttcatttcttagttaagcatgcaatacatcttcaagcctcttatgcatgttgggtttaatggaagatagttagagacttctagtactgatcaaatcctgatgcaggttgttgaagatggaggaagtgaagaggtttggcacaggaggaagacttgatccctttatttacaaggtatgaaacttaaaattgcacatccttcattgtgatatatattctagcaataagtacatttaaattgatctttttgcctccttatttttctgtagattgcatgaaagattaagacattaatgctggaggcaggtaacacttatatcccctttcccactatctagttatatacagtttggtttgatcctgatatgggctataggaaaacgtaaactataacgggaatgcggaagtttatatatatagctaagatatagtatatggtctataaacgttcgctttgtaagaagtggctctgttacatacagataaataactgaagtataactgaagtataactatataaaatatagaaaccgatgttagtttgcatgtgtgaacctcggcctattggttgattccttgtgagctgttaaacactattggttgatgaataactactttactaatctaagaaatgtgattttgcaaaatatattttgaaatcttcctaatgggatagagaaaatataattaattactaatttcggattaatcattatattgaaagaaatagagcaaaataatcaaaattcattggattatcttccacgaattttcggtgcatgatgaattgcttatgacatgtgttatttttatcttataaaaactctaaattttaaaggttataaatttaaatcactaattacggaataagtttactttagttattctactatatagttcaacaaacactctgtgaaaaagttttttaatcaaaggttttaagatatatcatatatttaactatttaagcatatcaaatgtgaaaattggtcttaggttatgatgtatatccttatatagtaaaagtatattagtctaaaaatttagatttaaaaagtgaactaaaatttaaaagcaagctgaattacataaatcaagtgacaattgtaatttgttgtgacatttgtaagttcataatggtacgtgtcacgctatgttaattaagtttgaaatatgagatgtaagaaaaaagtgatcaaaaattaagttcttttggagcgttaagtccaaaggtcaattagagcgcaatatcagtccagaaaagtggatgaaaaatgtccatccatccatcgagaaatatgcttaaagtaaacgcttacttttcaagcgaccttcacggtattgccgcagtcaaaaatacgcggcgactgtttggttggtatagtgacgacccactctcacgcggattcattaatttcctatcacaaataagaaaaaagaaacgtgaaattaatttgttaagtaacaaaaacaaaaggaaaaggaaactgacaagaaacgctaaagtggttccttccttgtactcaaaaaaacgttaatttacagctcagaataagtttttctgtttaccgtaatttcgacccaatatttttacgaataacaatttagtccaaaacctctttgatatattgcaatttaataccctaattaagtcttcttatctagtaatttggttttatttccatgacctacaatataagataatagtcattagtgctagatataaagactgaattagggtatataagatatatggaatgctaagattacaaagagatagagaatcaaaaaaaggaaagaattaaggggcaaatatgaaataattaaaaacaagggagccaaaggaacaatgtaagaaaagcaataaaattaaaaacaaaaccctcaaaaagaagaaagcggagactcgttagctttttcctgcctcctataaattgaacgcgacttgcagaacctttcctcatcgtctccgtctcctctctctctatccacgagaaagagcagaaaaaaaacatatagaaaagaagaatttagatacaatagattcttcaaggaaatggggaaatacacggagatgttggacgtcggcgtgagaatcgctgcgaggtttcattcacactgtcctcagacggctcgtctttattaccatcctccatccgacaaccatcaccatcacggcggagtcaaagatttaatcggaggtggtggggttcttgggtcaggtcaaaattcgaccggtttggttggtggtttaggaaccggaaccggaactactggtggttgcggtatcaaatcttctcaagtgtatgatgacgctagagatctcttgttattctctgttgtttgatttaatttatttgacgaacacaaaaaattattataatttttttggttggtgttggagagagatttcatgagcgtttggttgtgttttcaattattattgagaaaattgtatgttcttgagaggatttgtgatactatttaatcatctctggattccaaaaatttctggggattattggatgttgatgagaaattaatttgattcattatttttgtttgacttcgttcggatttaggttgccgcatctttggtttaaaccctaaatttattgtcgaagacttttaccctttggggccatattaaattccttgcctacggctgcaacttgattatgagctgtataatcttttaaattatctgcaaatctgcaatctattattataatagtgggattcttaagaacatatcaacaattagatcaaagatatcattcgttgaaccacacccaaactttctggagctatcagcatcttcgctgtcacaatggttaaacaaataatactcaagaactcatattaaacaaaattattaaagatttcacaattcaacaactgatccaaaaagatctggtaggttcgacaattccacagtttaacaattaaagtaggtaaaaagtctttattatttagtttgttcgacaatagctacaatcatcaaagtttacacgataaaactctgttttctaatacagattctagtataaaatgtcgtttggtatatgaatgaatgtttgtttgtgtatatactttaaaagtgttgggacctcatcacagtttcagctggctacatcctttcaacgatgcataaagaggttgagagtttctgaaaccaacaatgtcttcgatctctatggatgttgatacgactttgtctttgtcagatgacatttcctttaaatgttggtttccgtaaacgcatacactcagcgatttcctctttggtgcgccaacttttgtgtattcgtcaaagaaattgatcaattcttccttctttagctctctcagtacagtcacctaaccacaagacatacccaaataagctctgttattggcttcaactatccaaaaagatagactaacgaaatttgcatcatggaagtaactagtaagaggttcttcagagatagatagctaggaaaatatagatattatttgcagtttgtctattacctctgcatctatgcggttgaatttgagtgtgccgtctggaatttgtaattttggaatgcctttataaccgtttcctattacaggatagggaagcagaaacatatggattcaataaatctgttatcaaggcttattgcatgtagtgagaaagtcaatatctacccatgtacaaaccgtaaaatgaagagtcgtgctattttagaaagaaagacgaagtctattaacaagtataccttgacaacggaaaacctgtcaggtttaacttggaagtttgccatcttttgaatgacagcttcaagcaagatcctcaatttgtgattaaagccagtaagagagagctggaaatgagaaactgttagtcaaacatgaaactcattgagaaaattacacaaggaaacgtcagcatccttgttcaaacacacctcaaaaccattgtccgaaagacttaatccatagtgaagacgagcagcctgagcataataagctgaaacatacaagtacagattgatggaacaattttcatgatatagtaagaaactaggaaggctaaacaccttactctagtttttattgtatcaattgctttaaattgttctttcttaccatattcattcaaatagtccaccagcaaccaaacagaactgtttgaaagaactacagtggcgggagagctgactgcaagggggcagttaaaatccatcttgaatcaaacagaaaatagcagaggaaaataaacatgcaagtataatcagaacttgaggaaattaatacatcaaaagccaacctgaatggtgaatttgattatcttctcagcagtgttataccatggctcaaccttgtcagtttgcccttcgtatttgattcccaaaagattctacatatataatggcattagattctgcaacaggacaatcctactttgccataatcccctaagcaggtcaggatttcaatgcttgaactactatgggaattatgattaaatagagatcacatggcccatagaataaacattacgcttggtgaacacctatgacttaatcagaaatttagatacatttggtcatggattgcttttgagaagggatgcattccaggaacagatacctaccgaaccttaaattgaaataagaagcttagatgatagaaaaatatgagaagtcgattgaacagctgaaagaaagtattaccgtcatgtttgatgaaatattcactgcataggaaattgggtctattttggcttgataatgaaactctgcctcaaaaatagctgagagcttcaacaaaaataaaagatgtatcaagctctttaaatacactgaatcaataggaatactaacgcaagattataagcgcaacagtaaaacctaatattacaaatacctcgtcaaaaatccactgggaaacaccagactgttgtaaaagcttaatttgtctgaacaacaaccctaaaatatctttcatatgctctgtataacaagcaagaaacaaatcaaaccaaaatccagaaaataacattgcactgactaaacatcaagcacaccaagaccactcattcaacataagaatattaaaacaaacaagaaagaatatagaaacccaccatggcaagcatcagtaagattaatcgaaacattgaagaaagaatactctacagtccagtctggttcgccagcatacagtcccgttgcccaacctgtgcaagtattagcaataattcagctaactattagatgtaaaactactaggtaaactctgccaaaacatttattagtttggcaccaaagaaaacgtacccaagattttcaacgcaagaaacaaacttcctttgccttcatgaccaattagatgaccaacgtacgtgcatgggcttcttcataatgatggatgctaggagtcacaggccacgaaacagtaagattatgaccctgctttataggaacagccttcacaagaacctagtaccagtataaaaacacaaccaccaaagagaagagaagcactaaactgatctacatttatagaaaaaaagaaatgagctaggccttccaatccgtccgggtccgagaacgacccaacgctaacgttcattgaagcagcacactaaaaagcaaaaaaggcaaagaaggaatcgtcatgatttttatcatcagtaaaactagaacaaggtctctgggtctctgggtcgctgattaacaacacctcgagcgaatttttgagtacaatcctcctatactctctcttgtccgtacgtgcctttagtatcacgccacattcaccagaagccgccgcggcgttctcaatcgccatcgctgttggattactttagctgaatcttttgctatataatccaaataacgtctttctttttctttttctaaacttcagaaagggactaagggagagggaggggagctgacaagaaattactggtgtgttatataagtctacgtctgactcattatcaacggtctatatttccccaagtgatactgatacagatccaacggcgatagctgaagtctccgctgggtcttcgctcgcatatgtccaagacttgttgacccacgtggtcaatgccaacgttggtttatactttttttttttgacaaaataaaatcatacagatttagacttcaatttatgccataagttttcatcacataataattgtagaatccttaattctaagaatctcatttcagttatgatttgattattctttttattaattacaaattgcaaatttgtcataatgttttccttgaaaagtcttaataaagtggtaatttgactctctcttttttttctctatgtgattttatatcataggtgttaaggttgtgttgtgttgatctcttagtaaaacttatatagaaactctagtctatcttgtatttgttttcatgaagtgatctaatatatttgtttgtatcgattcctcgttaaatatgtgtaatctctatattgtttattaaacttccatatttaaaattttaatatatggtctttctggatggatttaaaaaattgtgtaaatttggttccacgatttatttataattaaatatcttaaaagctctattttctaacaaaccagatgaataaaagttcatattttggtatatgattgtgtgtatatatctatgaaaactccagtttagtttttccacagtttacttatacatgctgatactattgaatataagtactgtgaatctgtgattcaataactccaagtctcctgtgcatgtattctaaattgtgtgatagaaaaaatgaatgaaaatgacctttttgggtttctttactttattttccttacttaaagtattggcccaataaattgttctgaagcagtagcctaataacacgtaagagtagagaaaaattgtgttggtgattagtgattttattgcaattgttcgtttctttatctctctctttctgtctagcatatttaacatccgatttagggattgactataaagagatcaatattatgattttcttatgaagattcttcctttggaactgatattctttgatctctgtgtgtttagcatattatcatccgatttaggaattgattatatatgtttatttttttcgtaagagcagttaattacaattagagattcagtcatggtggttgcggtagcaagatatgtgaaatcgttgtggtcaactcgtgcgggtgttagagcatctacattacatagatataagaggatgtcttcaatttaaagacacagacctttttattttattcatttaatatctataaacactcatattacttgtgcaatggaggtggctttacaccatccacattggatattttagggtagatgtcttccctccaaaatataattattcaaatgtttggatgtttttaaatgagagacatccttttcaaaatgtctaaatttgtttcaattgagacattttgggaaaggggtctctcatttaaaatcaccctgcacattttaataattgaattaatatgggaggacatttttgttagttatgcaatgcggatgatcttaaatagcaacttgctatttattatcagagagcacaacaaggttttaggacaatttttgggaggaatgattatactgagagaggagtaatcggacctagattattctaagagcatcctcatagcatagcttttgatatgtgtctttagtatagattaataataaaatcaaagacatctcttctttttggtgtctcaaatgtcttcctagaaacacaaatcaaaaattaaagatactcttcatttgttttatatttttttactagttttatatttaaagacacccacaaaaaaatgaccaatgtgggtgctctaaagggatgtttttcttttactaggtttttatattattctccataaatgtgttccattaaactcttttaaaaaatctaggagatgatttatatccatatgatcgatactttgatgtggataggatcttttattataagagtgggattcttaagaacatatcaacaattagagcacaaacctatcattcgttgaaccacacccaaagattctggagctaacagcatcttcactctgtcacaacggttaaacaaataatactcaagaactgatttgctatgattaaacaaaattgtaatagatttcacaattcaacaactgagccaaaaagatctgttaggttcaacaattccacaatttgacaattgaagtaggtaaaaagtctttatcaatatctttgtcagacaaaagctacaatcaacagagcttaaacgataaaactctgttttctaatacagattcaagtataaaatgtcgttttggtatatgaatgttgtgtttgtgtatatatctacaacaggaataatgttgacacctgcaatatagcactcaacaaatgtcctcgacaacaacattgggacgaaattcgccaagtcttcagctttcaaaaaagaaagagcatctagtttctctatcctcaatttttgactaaagccaacaagagagagctggaaatgagaaactgttagtcaaacatgaaactcattgagaaaattacacaaggaaacgtcagcatccttgtacaaaacacacctcaaaaccattgtccgaaagacttaatctatagtgaagaccagcaacctgagcataataagctgaaacatagaagtacagttgataaacagttttctgatataataacaaactacgaaggcttatcaccttactctagttttatttcgttcttcagaataacatattttaacttgtcttacaagaaacgcataagagatacattataaagcagcagactcgtcatctcgataatcaaagtgagtactgaaattttgtaacagttatccaatttgaagagagctataaggaactcccagcagaacaataacattttaggtgagacaactttggagacgagaagaaattatctacgtctgactaatatcaacggcgtatgttttcccaagtaataatgattcaacggcgattacttgggtcttcgctaggctgggtcttgggtctcttagctagtattaatgtatttatcaattatggtccaacaacgttctttccttttctctctaatctagtgtcactatccagtgtggttagagtctgactatgatcaacggtgtatattttcccaattcttgatacacttttggtcaacaaagccaagttgccaactcgaccgttgaattgttgtgtaagtttatgaaatagggacctaaaaagtagaatatatgaaagttaagtatattgaataactatgacatagattatcatccaaattttttttgaatatatgatgccaagtttagctatttaaatatgacaaaagtctgttgattcgctttggcatttgtgtgtttgtattccctgtttaccggaatagagttgggacctcctcatagtttcaacgacccgtaaagaggttgagactttctgaaacagacaatgtcttcgatttctatggatgttgatggaatcttgtctttgtcatttcgcatttccttcaaatgttggtttccgtaaacgcatatgctcaacgatttcttatttggtgcgtcaacctttatgtattcgtcaaagaaatctatccattcgtccttctttagcagtctcagtgcagccacctaaaccccaacattgaggttcttaaataggagattactagaaagaagttggaaaaaggaagagttttgtctattacctctgcatctatgcggttgaatttgagtgtcccggtttgaatctctgcccagtaaaaccaggattcctcatccaagttcttgtccttttcaagcttcatatctatcaaatttgttacattgctctgaggagaaaagtcatgtccgatagtacatcaatgtttatctcaagcaaatcaaatatcatctagcttgtgtctctaaccttgaattcttcatcgctcatattgtaaaatttactctccaggtcctttagtagtgactcaactctcgaatcaatatgtcctggaccctattaacgataaactcaaaaccaattaaagagatctgcattgattatgcaaagtcttgagtggtagagaggcaatacaagtcggtaccttaactgaagactggataatgaattgtacaccatagacgccagaatcgttgctgtgttgaagaaaagtggttatgcatcaaacataactcagtaaatattcaaacacacgagaaactcctatgtacctcagagaaagtgaggtgatgtagccaagttgctcaatcgttctaagctggtgaaacgtgtcttgttttgcaattagttcgaaaagctgaagtttactattcatggaaaactcatctttatgaacctgttcatggtaaaccaattttcattaccaagaacatgaaggtcaataagaagaagaactcgcaaagagtccaagtaacaagatctacaagaaaagctttataagactttagttcgaagtctatcctactcatcttgtcacaactatacctgaatataatgcactagggcagaattttcatcactggagtttgaaccttcctgatagtaaaagtgtttcattcctgttccgagctctgtaaccctatttgtcaggaactgggatggaaataacggacgacaaataggttttgagtcggtaaaaagaacatcttcaatatgcttgaccattgactcagcttcgtccttctcaacattccctggaatgagacaccacaagggctataagaaaaggaaaaagataagagaccagatacaatcatacagtagggataatgttgatatacctgctatatagcactcaacaaatgtccttgataatagcatcggaacgaaattagccaagtcttcagcttccaaatgagaaagagcatctagttcctctgtccaaggccaaatctgatcttgtaatactagtgagcagtaattcgttgcttgttcatgtggttgttggaatttgttattttggtatgcctttgtgactgtttcctattacaggacaggggagcagaaaaaatggagtaggtacatcagttcacagggcttgttggatgtagggaggaagttggcaatatcttaccacgtacagaccttataaagaagcgtcgtggtaattttaaaagaggggcgatgtctattaacaaggttaccttgataacggaaaacctgtcaggtttaacttcgaattttgctatcttttgaatgacagcttccagcaagatcctcaatttgtgattaaagccagcaagagagagctggaaatgagaaactgtaagtcaaacatgaaactcattgagaaaaatacacaaggaaatctcagcatccttatacaaacccacctcaaagccattgtccgaaagacttaatccatagtcaagaccagcagcctgagcataataagctgaaacatagtcaagattgatgagagctacagtataaagaaaaataagagatccaatataaagcagcagactcgtcatcttgataatcgaaatgatactgatatagtaaaaaacgttatgtgaattgaagagagctagaaggaattcccagcagaactaccacatgaaagcatatcgtatgagacaactttgaaaatttcccctaaattttacttgaaaatcgacctttgctttcagagccttagttccacatacttagcatacaattttcttgaatgatatcaagaaaaagccgtagttgatagagaaatgactgaaagacgtctagctaacaaaccttaccatattcattcaaatagtccactagcaaccaaacaaaaatatctgaaagaaccgcagcgtcgggagagctgactgcaagggggcagttaaaatccatcttaacgtatgcctttggtttgaagaactttgtgtcaggcttataccacaatcttgagtatgatgtctttctcagcaaaacaggaaagatatcctgttccagaacttaattacgtgacataagcttactgcttcaaacattagaatttgaaagacagttgtaaattgtaactagagtgatggaactgaaccttatcctttaaatcctttaatgaaaaatccgtaggaatgaagacattaggtgttggtagaagcaggtttacatcaggggctgactgcatccactcctgtaattgttaaacacaaattaaaattttcctccagagaaacggaaaaatattgaatcaaacagaatataaattcatgcagaggaaaataaacatgcaagtataacggatctttaagaaattaatacattaaaagccaacctgaatggtgaatttggttatcttctcaagtgaataagcagtgttataccatggctcaaccttgtcagtttgcccttcaaatttatttgactcccaaaagattctacaaatataatggcattagattctgcaacaagaaaagcttactaggccgtaagcagtcaggattcaatgcttgaactacatgtaaattgtatgaacataacacattggggactgagggctgcttaaagtaaaccgccaaaataccaatggaaattttgcataaaatagagatcatatggccaatgcaaagttagcttggtgaaaacctatgtagtttacaagacatttagaatatagtaggcagcaaggcatgcattccaggaacagagacttaccgaacattattgggagaaagctcatcgagaaccttttgcacaatagctggattaaatttcgaaggcagtgatgatcctaccagccaatgcttggttggatatatctgaagcataattgcaaaaggacacagaagagtttttcaaaaaaaggaaatatgtctagccaagaaaccgagtttcctatcttcatccacagagatcaaactccatatgggtgaactagtaatgcttgatgaaattgtaagaagtacacatttattctactttttgttcatcgtaatggccacatatatatcaagcagaagcttacacgataggaaaagtatgataagccgaaaaatactattaccttcatgtttgaagaaatatccactgcataagaaattggatctattttggcttgataatgaaattctgcctcacatatagctgagagcttcaacaacaataacagatgtataattaagaaaactaggtagattaaaagcagacaacaacgcaaggtggaacttagtaacaccaatacctcatcaaaaatccactgggaaacaccagactgttgtaaaaccttaatgtattcgaacaacaaccctaaaatatcttgcatatgctctgtataccattcaagaaatcaaaccaaatccagaaaatatcaggtactgactaaaacatcaagcacataagaatattagaacaaaacatagaagaatacagaaacccaccatgaccagcatcagtaagatcaattgaaacattgaagaaagaatattccatactccagtctgcttcaccagcatagagtcctgttgcccaacctgtgcaaatattaggaagaattaagcaagactactagatgtcaaactgctaatagccttaatgcacacgtccgcatcaaaaaattaagtaaacaagcatctgagcaataaaaccctattcgacaagaatgaaatttccctagccagctccacaaaatcctcccatgttactgtctaaccataagctttttagtggagcctatatgacaggctaagaaagggcagaaaatttctagctactatctacagtttaagcaacaaataactgtagtttctgaagcatttttctaaatatctgcgagacaacctaaaactgtttgtatataaacagcgggtgaagaaaaataaggaaaataaagatcaagcaagaaaacctacccaagatttttaaggcatgaaacagacttccttcgccttcatgaccaattagatcaccaagatacctgcatggtgcctcttcataatgagagatgctaggagttacaggccatgaaacactaagctcgtgaccctgcattataggaacagccttcacgagaacctaaaaccaatgaaagccaccaccacagaagataccactttagaaacattctagcatcaatttctcttcgtttcctgtaaatgctaaagctaaaataaggagaggaaaaaacctgcaaatggtctagagtacacggctgaccaggaaatcttggaataccctggttggtgtttcgaattccctggaacaacgcttccactagaccttgagttttatcaagattttctgaagacatccagagcaaagagatgtataaatgttatatagaaataaaaaatactttgttttctgaaagtaataaaaaatctgatttttgggttagctccgaaacgtacccttgccataaacaaccagatgcatgatgttggcagaatagtgttcgtcataaaatttaattagttcactccttgtatccactccattttcttcgggtcgtacgtgaagagtatccatattccctaagcaaaaatatcactctcttagcaggatatataaaattgggaaggacgacggacttatcttatacatcacagcaccaaatcatgttccatgaacgccagtcaataccagataaaaataggtcgaagataaacctgtgctaaatttgtgatatggatggtcttctctacttagatgcttctgtaactatgtccacgaaaaaggaagacaaaatccaagttagatactacaaacacatcaacagacttgtttaaaagaaacccgtgaaatgcacgcttcagtgccaataactagatggatagatatagtacaattaacacagatatttgttcttgagagaatggaaaaatacctgggccatacgccaagagtcagacaacaagttattctgatgctctggataggagaacttgttaggaatttgttatataagcaaatttcaacaggaaagctaccgagaaagtcaaaagctaaccagagtcgaccgccttgatctccctcatggtggcatcagttgacatcagtggctggataaagaactgtgcaaacctggtcaggcaataacataaaaatccaacactgtcaaaagaaaaattagtaagcaagagataaaaaaaaacaaaaaacaaatggaagtcaacctgtccaaagcttcataaaaagaatcagtgttgatatcgaaatggtagtttgtatcttcactggaagtataagcatttgtgctccctccatgctacaaaaacagaattccaaaaagcacatcccattttattcctattaaagttacctttaactgagaaaaagaaaccgataaaagacatcgattatattccagagttagagagaaacactacctctgtgatgtacttggagtaactatcttcctcagggtatttttcacttgcataaaacagcatatgctctgacccccgaaaaaacaataaaaatcacaagttattcaccatggccatcaaaatccacacgacttcaaatcacaggaaagagttgataaatacactgtttatagagacagtttagactttagcctcagctcagtgattgaatcctgcaatgaagaattaaaacgggaataataaatataaagtaccaaggaaatgagctagcccttccaatccttctgggtccgtaaacgatccaacgctaacgttcattgaagcagcacactagtagcaggtaaaacatatataaattttcagctcttctttaacagcaaaattaaaacagcaatcgagctttaccttgtcagtctctgggtcgctgattaacaacacctccagcgaattcttcagaacaatcctccgatactctctcttgtcggtgcgtggcttaagtatctcgccacattcaccagacgccgtcgcgttctccattccaaccgccatctccgttcgattacttaggattgtttcgtaggcttagctcttatgaatgtctctactaacgtctttctttttctttttttgctaagaagaagcaagcaggaacaatggagctgagtataacttatccagtgaggtacagtctacgcagaactatttatcaaccgtgtgtctatcctaggtaagatccaacggtgagaaaagtcaagtcttcgctcacagaaattatccagtgtgatccaacgggtcataacgcagcatcaacaaaacttagcccacgtggtcaatgccatttgataattgtaatttgtaaagatcacatccggatatattcaatgaaactaaatactaaaatagagattaattaattttagaaggatgtgaagatattagtttttatattaagatgaatgtgttatatggattactattcaggaatgcttttgataatttgattattaggctaattagtgaagcgactattatcacttgtcatattctatgtacttttgaaggcatcagtaacaactggtttctatttgtcgacatcgtaagtgtcgaatgttagtgcagtccctctactgtatatcatcgtaagtcaaagatacagagagacactttttctctaacttctaaaccctaactttattttcatgggtaattaatatcgtccgatgcactgtaacttttatttaacctacaaactctctcgggcttcttctccacaaggttgattccgaaggtcagtgatcatcatctctatttaatttggtaattctttttgtcacagcacatgtttgttttggtttgtctttttacagtcaaaacatgcaaggagctataatagtacaatgtttcccaaatttttaggaaattgctaattctgcgttgaaggtagcacgatatgggcatagacgttttgttttttttggcaacaagaacagcctaagaagtggttttgattattaggttagcttgcgagatcactattatcacttgtcagattctatggatttaaccaatggttacttatgctttcaaaaacccttgcttaaatccagatcaatcagcaaagtgataatagattatgtgtatttaatttacgacattgattccggggtcaaagctactttttggtgagaagccataaattgaaggattttacacacttctatatctgtcttgagtttaggtactttgtggccgatgaagccaatattgttctacttttggttgtcaaatagtttattaaaacaaacagtgaatcatagaaattttgaaacagataaatcctatccataggatatctttgagtatcttgtagacataaatcatctcttaaattaaaatcaattaatctctttatacaaaagagttatcttgtttcatggaaacatttatggagaataatataaaaacctttagtaaaagaaaaacacccttttttggattatctaggaccgatcactcctctctaactatgaccattcctcccaaaaatcgtcctaaaaccttcttgtgctctctgatgatagcaagttgcttttcctgttcgtaaataatcaaacctacgaatggtaatcccattgccatgattagatctgtaacaccctcgggagttgaccacatcgatttcacatatcttgctaccgcacccaccaccatgactggatttctaactgtaattaactgctcttacgaaaagaataaacataaacatatattatagtcaatacctaaatcggatgataatatatgctaaacagagagaaagagcaaaatatatcaagtccaaaggaagaatctacacaatcaaaatttattaaagagagagaacctgacaggtcagggcaaagtggttcccgaactcaaaagcaaagctgtgctccaaaccctacctgtctcgccctcttatatagcaaattctcagattgtgtgccttccaagtcccgttattttcggcccgaagcccaacacatacttcgaagtattatccaatcaattatttattttaaaagaaattatattttcttaattaagatttgagagggattttccaaattcagttatctcctagaccaggaaaaccaattcgacaaaacaaaaaccgagctcaaaagaatatggaaatttctttcttcctggctgtgttacaaagaatgatacaaatcacacaaatataaaaccacttcctttcttctaggctttagaagtgccacgatgatccttatcgatatgcttcaatagatccaccggatcacgaaaccctctactacatttgggacaaacatcaaccgtaactttgccacaattctgttttccattcctctcttgcgttttctctgaattgccatcattgccactcgcaaactgtaacttctggcttatatcgttaccgagtctactaatacttgcttccgcagaagcgaaaagactagaccatctcgaagaagatgatgatgatgcaggagcttcttttgtgtttgtactcaagaaacccatgaatgagaaactcgattcaggcttcttgggtccagaacaactatgatcaggtccaaaccgatgtttcaaacaatgatcgatgctacaatctcgacatttaatagtattggagaatgtcaagagttctctgcatctaggaacaggacatttcttcttcttgacagctttttcgtagttagatggatcacagtctgtattaacatgtttctcccaggtgatgttgggatcttcgtcagggtttaatctaactcctttagcacataatggacaaataaccacagtgacatctcctctgtttccttttggacaatcgtgtttcatatagctacgatgatccagacaatacaccttcaataaattttcaaaaaaaaagttcaaaagatttgatataagcttcctctccggattcagataaaacaaatgaatcttttcaatcatttagcatctaattctttcgaaatgacgattagtctagattcaaatcaactactgaatttgaacataaaaagagacgaactcatgtataaatcatataattgaccagagacttagaagaagccacgatgattctctatacagaaaaatcatggcattggaatggtatcgaaagaaaacggagaaggagaaagggagacctgaaggcagcgatcgcatgtgaagggcaagaaatcgatctgtttgcaataatcgacggagcagtgtttacccagatctggaaattctggagttcccattgttgagaccgagctttcgagaatattacacaaacaacaattccgacaaaaaaaaatcgaaaagcaatcgtaggatagtatagagaagtaagaaaagatggtttattagagtttcccggcgagatagacacaccgggaaaagaaaatccccagattccgagaatttagatcaacagaaaaactcgggcaaggaagaagaagaagaaatttgtaaaggaaagtcaacgtcattcccatcttcttattttcttcttttttctctctttgactaaaaaaaattcgatttcaccaaccaattaaaactgtgactgggcttactaaggtctaaggcttttattcatttcatttcaaaacttgggctttaaaacatattcaacgatgttgggaacaggcccatttatctagccttctcttctgcaataaagtatttttgtctgattaaaacatattttccaggtagattatataaatctcgttgtaatcataccttatatcattcactgctagatccaaattccatattgtttcaagccgtaaaccccaattataagaagattcgtatgattgaattcaaagtgtaaaacagatacgtatctagattactaaagacattataaccgacaaatcaaaaaaccaaggttggaacaaaatctgacttgagcttttgacaacactcaagtctcatgtaacaagataaagtggtattactctacgcttttgtctacaacaacctcgctgatcttgacgccaggaggtataagcaagaaatcagtgtgctcttggtatggtgattttgagaatctcgtctctttccagaattccggtgtaaggaatccgtatgtcttctgcagacaatcaaatgttgcctgaccaaaaaaaaacaacaacaatttgaattacattagtcagaatttagcgtaatcaaacaacctaaagcatttcaattcaagcaatcttaaacacaaactcacatgctcaaaccaatacaatcagctaaatcctaatcttcaatataaattcacttaactggtaatgattactttttcactgcctaattcagagttcatcaaaccaaaacagccattgtgaaagtacataccttgacgaagtttccaagagttttggtggatcctctagaagaagtaaagacatcatcaattccagcgaattgaagaaccttcttaggaactctagccgccacaataccagaacctctcggagctggaaccatacgtacagtaacagatccacatttcccggttaccttacacggaaccgtatgtggttttccaatcttgttaccccaataacctcttcgtatcggaaccacagacaatttcgcgagaatgatcgcgcctctgatcgccgtcgcaacttccttggagcatttgactcctaatccgacgtgaccgttactatctccgacgacgatgaaggccttgaatctcgttctctgaccggctctggtttgtttttgaaccggcatgattttcatcacttcgtctttcaatgaaggaccgacgagtaaatctatgatctggtactccttgactgggagagaatggaggtagatctgctcaatctttgtgatcttaccttcctttacgagacgaccaagcttagtcactggcacccatttctcctcctctggagcacgacctgcacggcgaccacgacctctcggaccacctcttccaccgccgcgaccaccgaatccacgtccgaaatcgccgcgatctccaccacgttcgacaccacgttccgccattgtcgatgcactcgattttgcgtagaagagctaggagatttgattcagttttcggtgtgttagcgagaaacggcggcaaaaaatgattctacttatatctccagacgagaagagatagttagggttttctggctaaaatgagcttattgggtttataagcccattactaaactaaggcccaacatatgattcgtgtaatgtaatgactgtttcttgattcgttttttttttctgtgtcagttattgcatgtttcttgaaaaatatttttttggggtgataattttttcactgcataaacattattgagctgacacattgacatatttaaaaataagaagatacagagatagaacaagatgaacaaaccccaccattgatattacctgccaaaaatcaacagacaaataaaaagacaagaccacgtaaaaatctaaattagttactagtgagttcacagataaaaatgaatttatatatatatatatatatatatatagtcatgattatcacatttattttgtaagagtaagtaatggttagttgagtcaaagaggactcaataggggagagtagaagtggcagagagagagggtggtggtcattgaaggagtaatggggacaacaaaacaaacacctcttcgttttaaccaaatgcatgtggtttttggtttttacacacactgaggacaaattgggaattgcgaattttaattttttcatatataaactgttttactatttacgtcaaaaacaaaagcaaaaaacttttttatttttctcattgtatgtttttcacatatatatacatatacataaatatccttaaattcaatgcctatgaaccaattaagttcatagaatcatggatagaaaaggaaaaagaaaccatcataattacaatgagaccattagtattcaatgttataaagatgtttttttaggagtaacattttttttttaatgaaagtaatttgttttcttaaagtcgatataattaaccccactctctctacttcaatcaagtcttaaacctttgctcccacaagctcacctgaaactctctctcttcctcttctcacactgtctctctcatgttcggagccacggcaaggctcgatgaccaactcagcaccacaccaaccaccatttatatagacccaccctcccaagaccagccgagtcacaactcggaccaccgttcaatagaaacactcgttgttgtcttagccgtcatcaccattttatccgtcttagccggcgttttcgctcggctttgtggcggtcgccacttatctcacggcggagaccacgacatcgaaggttgggtcgagagaaagtgtcgtagctgcatcgatgccggcattcctgccgtatccgctgctccttcacctccaccgccgccaccgccagcaacggcggaagagcggagtaagccagcagccgaggagcaaaccaagaagtgaagtaaaaaaaagggtaaaactacattcttcgttttagctttaacactatgtaatatcattaattttgaaaacatgttcctttttttgttatgtaccttagtctacggacattgatttcggaatttcctcagatgttttatgattatttatgtctttcaaaagaaagaacaaaagcaaagttctttgtcaacttttaactttaaataaatccgttgagattaaagagcaacggcattaaccaaaaaaaacaccaagatttactttatccttatagcaacaaaataagaggaacattcacgtaaaaagtaaatcatttaatacaatggacttttggtaaagtaggccaaaacataagagcatccttaatgggggattttaaacaagtttcttaacaaagaataaaaaatttatatgatttaaatattcataagtctcttaactttgatgaaatctaggcaaattgtctcttagttaagagataattggtcttggtttcaccaaatttaagaaacccataattaaaaatattatttatctatacttacacttcaattttgtttaagagacttaagcttaaaaactaccattgaggatgctctaagggttcgcttaaatgccttggtccttttggttgattatgggatttaacatttttatgtaagtacattgattattgaatggactaaagagtaaagtaggccacaataatgcaagcgctcactgaaaactaggttaattttggtatttagcatctcttattgaaaaacacacttataaattactagcattttcatgcaaaaaaagaagaaggcatatttcgatttaagatttacaaacttggcccatgtgacttgtatcaactatttgcacaattaagaaccttagtatatactatgaaactctattctcactccattttgcctaccaaactataatgctgaaattgtgcatattccttttcatttctagtactagtaaatcaaaatattagacaaataatcttattactttattcatgaaaatacaataacaataaatattggtgattttatatgtaaacaaatctttcgactatttttgcatatatctttactacatgtattaagaagcaatgcatgtagtacaatatacatgctatatataaatatgcatatctatgtaaatatgtgtatgtgcattacataattagctcagttaagagcatttaggagaaacggtgccttgatttttaacattggcatttttgcaagaagctgttcctccttttattttcacgttctcaagcacaatcccttgacatggatacttctcgctgcaattcaacgttatcgccacatccgtagcgctcgtaccagatatgttcttgtacacaacgtttttcacttgcactgccgactcctgataacatatttcacattttcaatccgagtgaatgcttgtctagtaagaagaagaaaaaaatattaatcgatcaatcaattacttggtcttcgcatttgtccttgtcgcagtagtcctggtcgattatgatcggattcttgacgttttccattcgaatattttgaaatttaatgttcttggcagttcctgatcctccctgaaatcattaggggttgttattgacaatttcaaaacatatggtgcaaatttgagtggagtgtttgtgaagataatcaaaatcagccacctgataagtcttaatcctaactccattgtcactctcagagaacttagcaccatccacattaattcccgagacataagctttcgaattgtcgtcccccaagctcccaatgcttctcatcataaagattaaacaaagatcaatatattagtttatatacttacttcattgaattgtaagaaccatcaaattaacatcaatactttaaaatataatatagtttcactactcttatattaggatttgaaagaaaaaaaaatatgttttgatttacctgatcccgtgaccggggccgcaagttaaatcaaagatttgaagattttgcgttccatcctcaatggatatacaatcatcacctatatagaagcaaaccaagaacattctgattatttacgaatcaataaatgatagctaacatccttagtttagccttagcatgcatttgttatacatatatacaccactaagttaacaatatatgaatcattacctgttccgatatctgagttggagactcgaatgttttgagtattagtgatatggataccatctgtgttgggactatcgcccggagcagtgatctcaacattactaacttcaactttgttgcatttctcaattgaaatctgaatctgctgcgcatttttcaccctcagattcttcacattcaaattctttaaattgtataaagtaagagcctgcgtttgcataaacacacccacttgcaaatatcaatatcaaacgttcacgtagtttagatgtgaagaaattaatcaatcaatacatatacatggagatgtgtttacttaccgttggagcttttgtgcatggctgcatacaaaaataaaatgtaaccaattaatattaatatgatgacaaagaaaatttgactaattaacattgtgacaattacttaggtattatttaaataaactatatgtatatgaagctattggtggactatatatgtgcataccttagatttgtcgattttgcatgagttctgccaccaggtttttccgttgccattaataattcccgtcgagccaccgtcgattgatagattgttaacgtcctctaagataagccaatggtttttgtctttgtaatctgaacgtttcgtagatgctgataaagtgcctaggatctgcagttaatcagtgacaaaaaaaacaactaattaattgaagattactgagtaaagttgcaaaaacaaaaacacaaatattacctgaaagttacgtaaggatttgcatgggcctctaaatcgagtagacttaaggagataagtctttcctttaggaaccaagaaagtagtaactccatttgttgaacatgctttcttccatgctttcttgaaggcctaagcatatatttcacacccatacttatgcatgcatcatcaatacaaaataaaacatatctatatcttttaaaaaactatgatcgttatatcttttcacaccggaatttggaaattccgtaactaattattgatattaataaagtttatatccaacaaacatatatgtttagacagaatacaactaacctgagtatcatcagtttttccatctcctttggctccgaagtttgaaacactaacggttgatgcttccaaagtggtttcgtctgagcttatcaagctaagaacatcatcgttgttgagcttgagcaagctatcggattcaaaacttccatcttcatgaccatatccatcatcaacgttgctactcaaagctttacacaacgagagcatcaaaagaacgcataagaaaacagcaagatgtctgcaacaacgggccatttcgattttgatcggttttgcagaaaaaagaatgtgtgctgttttcttgtgagtgagatgagaatgtttgcctgtcttgtttgggattgtgtaatatgaaattgaagaagtgggagggtgtaagtatttatagacgaattgaaggaggaaaaaagttaggtttattaaagttttaatggcgtacttggaggtatggagagaaattgagattgatacgaaaacatcactttaagcttcaagccttacctcctctcccccctattttttttttaattgttttaattttacattgagagtttcacagtttaattagttacgtatttttttctgtaaattagaaaaagagttaattttcatcatcatatactattcacagtaacatttcatcatgtgtaattactgagctaagcaatgcgtgatgtattatatcaaaagttagaaaagaatagaaaacaaaaatcagcaaaagtgacaagaaaacgtcgttgtgtcctgtgtctctcaaagttttgggttccttttgttatttcttggttcttctgtttttgtctgtgtctatgaggctctgatgatatcatcgtttaggaaaatctgcagaaaacaatatactgtattcatcatatttctttgtatcgcatttcgcatattaaatctcatatttttctttgaaaattggcatgtttattttaaaactcacatagttccgagcatcgagtattaaactacatgcgtttctcattatttttcaaaagttcccacaaacgacgtcatagacttgtaagttgtaactaacatgagagtttaagaaaaaaaaagacagaggacttatctggattattgtcttggatatgtgaaaatctgaatatttttgctatctaaaatgttaatcataattccttaaccagacatgattaaaattgtaacgaaatagtttgacacctgatttccatcctctaataaattactaatcattaaaccaacatgaattggtataccgaaattaaattgttaggcgtactcgtgagattagaatgaactcattaagttcatgtcgaaaaagtgcatattgctatgttgtggacttttaattaactagggtcatggtcagttatcaatacttatttgaaatagttaaaattcatttactttcgaagaaagttaggatgatatatacgtaagaagtgtaaatgtgccaaagtaccaaattcaaataagaagtgtaaatacgtaaacggcaaatacctaatgtaatgattgaaatggtatggtaaataataacgccaacaagatctaatttgcttgaaaatcaactgaaaagtttatcgggaacaactttgcattcaactcccaaatgatgaaaaatattagtctcaaaagtctttagtagttagtacaacacgtctcgtgaaatttggtatatatggttcattaattagttaattaaaaccatacattaatttatcataatgaaaataccaattttcttccaaaataaaaataaaaataccaagttactttggaaatttagttatgaatcttatgatttactaatatgtcaattatttaaagtttagtattttgttattgaaaccatgtcaagcattgttttctatgatttcaaaggtgtcttttagtataatttcaaagaaactagcggccaaccgggttgcggcttaaagaaacctacaaaaatactacaatgcatgggacatcatgaacaatggtgaagacttgatgcccatacatatattcctatcgattaataagcacaaaagatcacgtacttatccttattatactttatctaattgttttgtaattaccaattaattaatacaaatatttgtatatactagtgttaatatgtagatgcgcgtatggtgtaaaaataggcagaagttaaaggcatgtgcgtagtttgcttgagagacctaaaggtatggtcgagagtcatgtctttggaaatttatctagtcattgttataacttggccttagttattgcttccttctttgaatttatctcttgtatttttcttaattaatggttacgattcaacttgcacatcgttttcgtggatgtcactatttcactatttcatttttaaaatattactacttggtgtaggtaaaagagcaaagaaagataaacttaaacactgaaaaagatggaaaagacatgtacgtttgaattctttgggattccgtgcttcgaattgggttgatcgtgtatttatgagctaactaatgttttggggttttttaattttttgaaattaatgttgcactatgttacgttccatggaaaaatatcaacaaaaaaaaaatagctagatgaagaaaaaaacagagtaaaatattcgtatatgcgttttttttacaccaaacaagtaaaatatggaacacaaatattagttagctcatatatggattgtcgtacaacaaaatgaagtttgaagagacgagatgatgacgtactaatccatacacatttcattgttcaaaatatataatagtactagtatctgttaatttcgttggtgcgaatagtatgtaaggcgtcaaaaagtttatgatcatcatataactgacttgtcatcattattcgtattgaccctttaaattacgtactctacctggaacttcttctgattttttaggtattgtaacttgtaagagtgtcggttttcgaattgtttggctaagacgactttagatttgtaaagcgccaacaattctaaatatatatataattaccctctttatcagaaaaaatattctaaaaataaaatcattaggctttggttccaaatagaccaaataaccaggatttaattttggataattacttcaacgactatttctaattggggacttgaggttggccaacactaaaaaaactcacagtttcatttgagaggaaagccgaaaaatagttaattaggaatttaggagcaaattatttgttttaaggtactatattattagaacgaaactacaaggggacggtgcttccccaacttgacgagattacattattacaaagcgaagaatgaccattaatttcctaatttattgatgcctttatactacaaaatgatgaatgacaaattggtgaaaaaaaataacttattggtggtctagaccagaatctcaacatgccatctgaacatttcctccctcgtcaccggcagattcaaagtcacaagcccaacctcggcgtcgtacgtgaaatcagtctctgtgctttcaacggcgcattttagaggacgctgagaagagtaagctccaaaacgaccacagcctctgacactgacagataccagagctgttggagaacggttatcgctgagcgcgggagaagccgaggagatctctccatcgaagaattcaggattcttgtcggtcacgtgattgatatcaatcgactcgattgctccacttgagttgaacatgtctacaagtcctattggtgcgaacgaaatgttttcagtgatttcctgtatagccaaatttcgtcattcacattatgactccaagttgttatcaatccaagtcatggtaatatacaacaagacaaaacgtaccttcaaaggagagatgtggaagagttcatattcaaggactttgagggtgagaggaattgaagcacctttaggtagtcttaccacctcacctgtaaatcaaaaccaagctcatgcttttagtattgatctgaagtttcaagtttttttcttatttgaggaaagtagattgattgatttttatacctgatctgtatgcatagactattgaatctccactccaatcttcaccagccacttgagagattagatcagcatcatccgcacggattgaacccgtgagtgtgccaggagaagtatcatggatctggttcttcttcgtttccttgcaccaaccagcaccttgacaattgaatacaccaacaataccagtaaacttattcatgttccagatcttgagcaagctgaaaagaattcagtttccgcaggtgttagttaggcttaggcttagtcttaggagtggaaaataaagaagagaagagttagttagaaagcaggcaaacctgattccatctctagctggatcagcgaataagcagtcacgggtaggcctacccgggagcttagcccgaagaactgaaccatcaggaagaaccagcttcctcaatagatcaaagttgtggttgcctggcttatcactgctcatataatttgaaaaaaaaaaacatatctccagttaaaccctcagattaaaacattacctagtcagaacaagaatcaagttaaggatgagaggagagctttacctgacatagattgcgcatccacccactgcacgcgctgcagcatggtactctgcagttgggtgtagactctgaagacatcaaagcttcagttacaagtgaactcatacttcttagacttgtaaaaaaaataaaatgtctctttacttacatggaacatatcccagtcaggttgcatgaactctccaaggaaaaggctgttgtatgcaaccgatgcaatgtggatggtgtgagaagcaggatctcttgggtagaaatcatcggaagctctaacaatagcggtttgttttgcgctgtaaagtccgtctgtgttgtgacacatgcaagatatgcaaccattatctgtgaagttccgggcaattgaagcttctaaagcttgctggtagctacgagtgagagagactctcccgccaagaccagcacctagggtttcaatgatgttctggacgtcaactttgactccatctataccacatgaagccaagtatgaatgcagttcgttgtagaagttgaaaactttcttcggattgacaagtccgagaccatgaacagcaaggctgtccattactatatctggttggttccctaagacacctggagactgaactgggtatgctaatgcactatcatagtgttccattccagaagcagcgggttttactccaccccagtatccagctaaagcatgccatgcataaacttgcctgtggataaagaagtcaagccataagtatgcaatgttttttgtcaaatgcttgatgttgtgattaaacaatcagcttgaagaccagagtgttgtaaattaagaagaaaggacatacttcacattatggcgctgcttcgcattgtcaactacactctttagtcctgacacttgcgtatccttctgatcactcttctgaaattttgcattctccttgataccaacaagcctagtagcaaacctgcatacataagaatgcagaaaaagttagcaattaccaacaaaatattatggtaacaactgtagaatatcctcaagctcgagctgtctagtgagcacactcacactcggcttatgaactaaggattcgacaattccaatgcatagattgaaatagatgaatcttattttctttcaaccacatgaactttagtttaaagtactcaagcctcgatctagttttgctggactattatttggtgaactgaggacatatttaagatgcccatctatgtgactacaaaaataaaagaccgagagatcttactgtgctccttcctgaacaacgcagttttcatctttctctttgttttctatttgttgccaaccatcgtctatgatcagaaacttcggaggggtacctccttcagaaagactgcaataaaccaaacacatcagagactcaataaacttatactgcggtaagcaattacaagtatattaacaatatgccactctacttccatatgaaggtaccttttaaggccttcatcaacaccctcggcagtcacatctgtgtagaaagcgtcccatgtgcaccagccaaaccagtctaggaaagaaggaagctaaacaaacaaagtcaaagacaatgatgagatcatataaaatcagattgaactcttgttgtgaccaaagccatgaaatgttcaatcaccttcttcttctcacgatgatgaaatgtctgcatgtgtctctccacagccctgtaaaatacaaggattgccgcataagaaaacatatataaccttcacatcaatgaaacagagacataacataatattttggctattttgcaaacatactttacggattgtctgataacttcaaagggattggttccagcatgaacataaacaaggtgagttccctggctagtttccaccgccttatctcctgcaaacacaaaatcaaccaaaaacgaaatttcaattctggtctggaagttgtgagctcatttctatggataatctgtacaacaaattcccctaccactctcaaaacaaatctcaatctcattcttctcatttccttgcagaacagctctgaactggccttcaaggagagggagaaagacggtataaacagtaggagcatcatccccattcccttcaacctcatccttgctttccagtagcatgaactgtgtctccaaaggaatgtcttttccacagcttcccattctctgagtcatccaccatagcttaaaccggaaacagcacatgaaccgaagacccctgagaaagatttaaaaacaatttgcttaaacaaaccatcaaaggacctgcgtattgctcaaataagttatagaaagacgctatatcagaggaacaggtatatttaggtgcttactccaatacaccgatggggaacacatgaagactcttgctttgttcaaacgtcgcgcctataaatgaaccggaaacgaatccattaccggtaaccggagttaggataatgttgtcagggattttggtaaggatagtcttcccttgaacaacgaggttatcgttctgtacagagatatttgatgtaatcgtcatcttctcaacaccgcttctagattaactgtatcagataatcacaagggataaaccaacaacgttaagaaacagatccttcaagaggaattaaacaaacaaaatccaaattagaatctttccaaaaacggaacatgaatctaagatgccattttgagataccaattatctgctcatacccctaaaggtctagcaaattcgaaacaatgaattaaaacattcaatcaaaatttgagttcgaaacataacaatgaaaccagaagtactcaccggattgcttcctggttcgtccgagctcgcggtactagagcgagaaaacacggcgatatgagggttgagagatgaactggagtttgcagaagctaaatgttgcttgtgcaaaaaaaatagagaacaaggaatcgccgccaaaagtggtgactcctaccgtcaatgaagaatcagtaatcagaacggtgtgtttggctaatgaaggtggcggagaagacgctttatatatgcgaggagatttggtaagagccgttgcgatgttgccacgtgtcatattattactctttttccgtggagatggaaaagttgctagaaaaaatcgtgatatttttgtcgctctcctattgctgaatcagagacaactcattacaaaaaaaatatactttgttttttactacgttctttcgattgtgtcagttttttttttggtaaaaataccaaaatactactagcatttaaattgaatttcgtatatttttataaacgaataataataatagttgtagttaatataaaattaaaaaatattagttaaaaaatcagtttacccaaattttagcctactttaaaaatgtcaaacggctgttaacggaggaattgctaatatgaaatgttgaaattatggttgtttctagctgtgcaagaaatcatattaaacatcgaatcaaatcatattctgaaactgtaaataataaatcgtagttatttttcactcttgatacaaatcatcgtaacgaagctcaaatgtacaagaaacgtgtaacgtagttccatacgcctctttttatagtatatttttcctagttgaatcgcgtgtattatggaatgccagtaacatatacacatacatcaccgatcattcacccataagttttacatatctttaattaatatttgtttgatatcttttatagtcctaggaaatgacatatctgtattgctgatcaaatttgaaaaacttaaggacaaagtcaattcacgagtctggttcagtgggtattcaggtatctcgattatatcacattatcacattggcgagatattcaggtatacctcgattctcggattcaacattatgttctaaaagaagacaaaattgtgacatcggatatcttcgaggcgaataatccactttttaatgttataatttcgacgagactattactctttaatatcttaaaataatgcatgcatgaaattatgtagtcatgtaagatactcactctttaacgagaacgttacaaaacttaatcgttttttcttttttctctatcaaaaaagaacaagtcgtttttcttctatatgcgctattacatcttataaaaactttacatgcataatgtaattatgccggataattatgaaatatgttgtaaaaaccaaattgataaattcgggaagatattgtatatatggaccgaggaccgaagcaattccattaaaatgtatggttcatagtacttagaaccgtcttcaaaatatatataaacttttcaacaaaacgactatcgaagccgcccaatactataaacacacgatataaacagacacatgtttattactttactttaattgagaaagtattatgcaagttgtgttttagtttgactcctctgcggagcaaaccataacaacgtcgctaagatacggaccgtaacacatactcacacttgatgtcacgatccttatccgcttatctggaaccacgtgtgtggtcaacactcgacgaccggtttgagccgggttaattcacttggctgctctttcgtactaaaagctacttcctgttgtggataattcgtggaacgacacactaataaataataatgcatggtacgataatgttttaaatcgaacctaatatatactgtacgtaggtccgtcgatcggtacggattatgaagatagagtttggtatatatcgactcattacttattttacggattatcttttatcgttttcctttgttggtttttgcatttcgaacacttggttctttttcattattgattcagataaaacgaaaaaaaagaaaaaacaatcaagctctttaatgatgtcctcttattcagtcattcctaataattgcatttaacccccaaaatagttattaaagaaaaacgaaagaaaaagtacgtacgtaggtgaatttttgtaatgaaacggcgcaagtgggtctcatccacgtcagctctgtttaatcaaatgttaaaagatctaaagtatctccttaattagcattgatcagttcaccatgtccttgtctagattcctttttcactttggacttttatcattaggtgtgtgatacgattataaattttgttggctctatgtatataactttaatacgacgattaatcaatgataaattacggtgattactataatgttaactctgtaatcatgtatagtgtccttccaaatcatattgttatttactacaaggtcgacatcggacatgtgtatccttcgtgtaccgttcaacctcacgccttttgcatgattgatttgtttgattttcaataaaatttggcaacaatacaaaaatagccacgtaagtctcccgtgtcgatgagactactacgaggtggatatttattagacgtaccaaaaagcaatgatttgagttaaattgcttttcacttgtatgtttgtgattataatacttaacagatgttcagtgatgctatttttatctacattgtgtgggtatcagatttgtaggatatcaatatcatgaacagttgcaaactcatcgagtagatatgattgtaaatttttattttttataaggctgttgatcaaatattcaaatgactggtgtcttatgcttgatgacaataatatagaggacacaaatatttagtccacttgtttagatttgatgctgcgataagccaataacgacgtttattatatttttgtctgaattttccttcttctcgactactatagctatatgggattgataaaagtttatggccaatatagtttccgttatatacttatttaaaacattgtacagttttgaaaacaaaactgtgaccacaaagacaaagtcgaccaccaggacaaaacgaaatgggactttagtttctgattttatttgtacatctggctttgtgtaaattgagttaattacaaaataggcatttgtcttaagaatttatttattaagacatttctcatatgtcttcacgaaaacatgtacttatttcttgtgaaaagtcatctctaatatcatttcattggcctcatcttctcaagccgagaaagtctaattaatgttgtagtgttgtgtcgttgtatctgtgtatgcatcgcagactgtcaactaaacggtttgggtttacaagtccaattctagggtatatcgttttcacttcttcacctattttcacatcatcctaccacttgcaaaaatggaatatcaatttctcacttactccagaaggttaaaatcgtccgaaatcagacaataagcggcccattcaactgtgcaacatacctcttttgaaattattaaatttaaaatgcctatattcgatataagctcgtgtaagtttatctgtaaagcaagctctcattgtcaaaatccataactcatataattcttgaatggttatagaaaattacagattgatcacaagaaaaattgatgatattatcttttatcaacacaagattatacaaaatatctacacacagccaaaggccaacacggtttttctctcttgatccccatactcagctcgctcattagccaggatatcaaacacacaactcttacaactttatatgcctaaaaagctttaatcgtggtgtcataaaaaaaaagcaacccaagaagataaaaattaagaaattaagaaagatttgcatccctttgattcaatcttccagactggtgagtgacacagattaagcctctctcatcttgtatcaccattgacctgcaacgacgcatcttgcatcagtttgagactgatactgttaaaccgttctctcgagtactgtctcgaagcttttctccaatctgttcctgttttcatcatcgttacaaactcttcgtaacttattcttccatcctacaaaaaaaacaattttcatgatggttagttctctatgagatgggatttttttcaacaagaaaacgagagtgaaatggtgaagttaaccaaccttgtcggtgtcaacatcacggataatggcatcaacaacttcttcacttgtaccaagttcgtcagacaaggcttcccttaactcctctatttcgatatatccgttattgttttgatcaaagaacgcaaacgctttcttgagatgctcgtcattgcccattttccttaggtgtaccgatatggcaataaactcgtcacagtccaaatatccatctctatcgatgtctccctgcaaagtagaagaaaaccatccagagctcagttaactgcattcaaatcacacaaaaactggtattgaaaagtaatggtaaatcaaagctcacagcatccatcaaaatttgtaaatcatcttgcggaatggcatgaccaagtttctgcaacccgattttaagctcgtcgatgttaatcttccctctttggcttgtgtccattatttggaacccttctcttatacctgaagcttcttcatctgataaatgctcagcaataacctatcgagataacgtaacaagaccaaacgaaactattgttaggctttttagatcagaagagatatacattttcggatagtttataagtaatatgtattttaccctgagtgctcgtttcttgagcttgttcatgacggtgaactgcttcaaccttgccctcactgtttcacccaatgatacattgggggctgtctttgcattctgtaaccacgggtgatctgaggaaaatgaagcaaagaccgattaatactctttgtctgtctcagattccatataagcaaattgcatcatataaatctgtacctaggacttgttgagctgtaagacgacgcttttggtcaggatcaagcattttcctgataaggtcttttgcgttttcagaaaccttgggccatgggtcccttctgaagtctagtacagatcgaataattgcttgtgcaactccttgttcagtttctgaaaatggtatagaaaaaaacagaagaccaggttcattattcttatgatcacttcttcatatactacccctgaagacaacatgtgctacagacggcccaagaagaaggaaacatagactgacaaaactaacctgcccagaaaggcgggacaccacatagcagtatgtaaagaattacacctgcactccaaatatcaacttctggaccataattccgttttagcacctcgggagccatgtagtacggactaccaacgatttcgttaaacctctcgcctgcaaagaaaataacggtgtgggttaagattattgacaaaccacaaagcaatcagctatctactgagcagaaagaccacattacctggtttaaagaaaacagagagaccaaaatcaatcgccttaagaggtgcagtctccttcttgtttccaaacaagaagttctcaggtttcaggtccctgtgcattaccccatgcttatgacacacctgcaagaacacactcattaatctcacatctaaaatcactccacaagactttcaatttacatgaaaagaaacgaattttgaatctttctgcagcaaattgagccctttaaagcaatgctacaagtcaataatgtccaagaaactgaaaccagtaacaaaccaagacattatacgaggccattgcaattctgcaacaagtaaagactaaagagatacaataaacagcaaaaaaaccttgacgaacctgaacaacttccatgatggtcttagtgacagcagcagcagctctctcagtataatgccctctagcaacaatcctatcaaacaattcaccaccttcacaaagctccataaccaaatgaacagcatgctcatcctcataagtctccttcaaagtaacaacattaggatgctcaggcatatgcctcataatctcaacctctctcctaacatcttcaatatcaacagctgtcctcagcttcttcttcaaaatcgatttacaagcaaaaacgtcgtctgtctccttatcagtacatagatacgtaacaccgaattctccacgacctagctctctccccaacgtgtatttagactcgatctcacgacctgttggatcattcaaaacgataagcttaagaggtcttccacctccatctccaccaccgtggtgaagaccgtaatcaatcgagaaagggttttgcttcttccttccttttttgggtttgttatcgttttgagccaatgatcctgctgttccgcaacaattacccatgacttttccgatcaaacccaaatcaaaaccgatgaaacttgagagattgaggacgaaattccaggaaagtaggaaactttaagagaattctggaagagatggatgagaaaaaaacgaaggaggtgaagaacaatatatgaaagggtggaaattttcaacgcgtgaataccaagaagaacgtcaaatcatttgttcgaaaattaaaattgcgaaaaattaattacagagagagagagagagatgatgatggaaggaaggtcaagagaatcttcttccctcccttcttctccagctgctctatgattgtttttttttctttttttgtctgtttctttttttcactttaaatttttaattttcaaagaatgtttcttactattacattactctaatgtgaaatcaaaatgccttcagctttaccaaattactattgacaatattacccctatatgtgattttaattatttttggtgaatatatgtgatcttaagttaaggcttaaatgccgacaaaaaaaattaaggcttaaatagttaaatgtccaccaattgttttttttcaaactcctgcagaattttttttatttttagaatatttttgttcattttaattttagaaaactctttatttttatagaatgtctaacaaaattctagcaccaaataaatatatatctgtgaaatgaatcatacaaataattacgaagacaggggtgtttcaggaattttacctcatggattaaacagaaagcggagtctgtgacacgttcttaaactaagcgccttggaaataaaaaaaagttaagggtgaaaccgtaaatacgctcgtgtttgggttcataaataagcggccacctttattttatgttctgttttttttttataattaaaaggtcaaacacggcgattttgactctttttaatcactttcgtcggacccaactaactaatttttttgacttcgatacaaaacaaccaacatatgtaattactcaaagttatttgctttttctgtcaagttgatgattttggttttgcactataaaacttctaccaacaaatcgataaacgcattttgatttatcaaaatttaactgatatagaaataaatttatttttatttttttgtcaactaatttaataattgttcagattacagatatatgtgcaattgggtcgaaacctgtatttaaaagtaacataaatacttaaaattttactttagagttagtttatatataaaataattagcaaagtcaacggagtatgaatgtggtaagatactttatcaaatgcctctaaattaatatcaaagctcctgatggacattcctttccttacacgagtgtttgtcttactcctaccaagtcaatgattcaatttgtaatttgtttacttagattaccgttactaaaaaagagagttaagtgcaatatataattaggcaagaaatgaggggttttatacagtacactctattttctttagtatttgatcatttaccaaagactgagtcttgtttgttaaaacgaccaaaacaaaatatatctatgatattgatggacaaataaataggagagttaacaaagaaagggtatgtagatttctaccaaaaaaaaaaaagggtatgtaggcccattatggcagaagcaaaaaccgaaaataagcctttcttaatcagcccatctcaaaatctctttacttctctctttcttgcacttgtgtgtataaggtctatgttttgttcaccgtaagagtgtggtaagaaatacatacaagttgtatgcaaaaaggttttagactcgtctgagcaagattttagtgggttcgaaattccattcctgaaatacgtagggtttcgagctttgcagcctgaattagtaaattgtggcgtcttaaattacatttttgttaaagctcttaaacacatgagtgacaggccaaggtagagagagtaattaaatgaacagagctggaaactaagtaagagcttgaaccttttttttcttttctttaactctttagtcgtatcagtctcagcagatggaatgacaaaacaatacatgtaaacaattttcttggcttacaaataacattttattagtttttatgtggtgcagacaaagaaaaaagcatacaattacaaaatatatcagtacctttaaaactcttacattctatatatagttatatacacattgattcccaacagaaaatggtagcctatatatattgagacatttggatgtaactaaaactagtaatagcttagctaggaaagagagaagaatgatcgtttggccggaggtcgtccaacggctctcatgagattagcaacttcaagaaccctcgcaacctccgtccctcgtttaccttccgccgtggctctcctctcctccgccttcctctgagcttttgccactttgttttgtgttttctccatcgccttcgctctcctatcttccagtttcctctgcatccacatatatgtatcaatcgcataatctattattccaaagacaacatcgacgtctatttagtcagtcttttggatagctttatcacatttcaaatatttgatatatcaccaccattcaaggatctatcgtttatttgtgtttctgcttttttttcaaataaacccataattcttacattttgattttttttttttggttggataaaatatgcattttataatttgtaaaaaacgcttgtccacgtttatcgtttgcaatttgaaaacgttacatagtttttctaaattattttgttatacatgtaaaagcaaacagtttcaagaaaagcatgttataagtcatcttgttctcttaatcgatcggatctaactaagatattcgtaaaatagaaaaaaatgagtcacctcgattttcttcatccaagagttagctctatgaacctgctcattcaaccaaccgttaataacggcgtcttgtctcttaaacctattattaatcttagccaccttcgccgtttgccacgccgttatctttgcttccacctcttctctcttcaccctctgcaccgaagcagtcgtcaccatccggttctgaccacctgatgacgccaacacaatattattctctgaaccgtcccggttgttgtaatcgtccggtacaatcgcccatggatttgaatcctcctcaggcacctgaccatgatcaccaacgtcatcgttttcgccgatcctagtcagctcgtttctttcatcacgtatgacgtcacgatgaccacctgattggttagttccgttactgttgttgtccatggaagatccggcgatgactagagcgttgaactctctgctcacggtggtgaaattctcaccggaagaagtagttccgtcgctaaaagcaatagacctcgacggagacaagtatcctcctcctgatcccctttgttgtggccgagtaagctctgtcgtcgtcgtcatcgcgtgaatatctctcacgactatctccgacgacggcgtctcatcccggcgatcggaagcatcggtcgtacttgtggtggagttctccggtgacctttcttgaccgtacaaagtcaacatcagaagagttgtagtagtagtagtagtggagtgttgtaattagctagtttaggtctgattataattaggtgatggaaggagaagaaacaaggtcaggaataaataatcaatgattaggttttaataattcgtgtaacgaattaaaacgtttagtttacatgagaggcaaaattataacaagtgtaaagtcttttccatgaaagctacgttggtccagtaaatgtgccactacatttatgaagacgtgtgtctttcaagatatttagcaagacattgcttattttaattgcttgttttaatttttgaaactgtaacataaattcggtacaattttttttaatatttgagagcatcgtcagagatctttaattagaaaatactgatgaagatagaaaaatagatatatcgtagtgagggaagtgtcggcaaaataggaccgaccacgaaaaatggagatagtgcttttgacacgtgtcttgttatagcaaagattatctacgtggcattaagtgagtggtagtgtattcccgcgagaagaagctactcacgtcagcttcatgaatgtgctcggaaatcccactggacagacgccacgtactaaattgcatatcagattatattcgttttactaaattgctaattatattatttcttgtcattttctgattactccctaaattggtgttttgtttttcttaaaaaagggagagaggttgagttaaatttattctccgaatcaagctccaatgatagtttgtgtgtgtaacaagggaagggagagagagcagaagctcaagccaatataaggccgtaatggattacacaaaaatgggccgttgtgggctactaatgatcacattttctttagagcccaatcaagtagttttgaattttgatcatgtcatacggctagatgtgtttttcttttggttgacatatcgtatagtgaaattgacgtatacggtattaccaataaacaattaggattgttagaaacttgtcaacgtagaaataaaaggttcgcacgcttgattttaggaaacgactcgaaaactaacaaaattattgacactatgtggtagtgacgtcggaaacacgtttaggttagcatccacgagaagaccacgacctagtccacgacgttgtcttatacatccatcaaatagtcttggacattatctttctggtttacaaaaaaagagagaggcagtaataaatcaaactgaaatgaaatcttacctggatcactttggtatacaattctgttttctatgaaatatttgttcttaacttttttcttgttcatctcctgtaatcttattttcatgatccgaaaagtttggttttaggccatatatccctgaacatgtttttattttcaacagttaccaaaattttatcacggtttttcaaatttatataggcctaactttttttgtcttaaatttggtgcaagacgtacgacttgaactatttttcctatgtagtataaaaaatgcgaaacaaccaaactaatacataaaggacctatgccaatatatatacatgattcctgttgagtccaaaactaatgaatctttatatggaatcaaatttcgaaagttcaaacacatataacctccaaaaaaaaagtgggattcaattcaaaaatgaattagccaaaagatcataatttcgtgagcctccttgaagtttggattccaatattttaccaaccacacactctttagacatgtgtatttttgtattgtaaggtcgatttgttggctgtggaatttttttgggtgtaaataactaactcttaatatttatttgagaaatttcatatactaagaaaataataatagttaaacctttaagattttttttgaataagaattattttagtgacgttaagctttatttttagaaatgttagatcggttcagcttttgtcttttactgaattgaatactttaaaccaagataaccttcatattcaaagctcgaatcagaccaaactgagttgacaattcatagccgatgaaattcatatagcatggtttatacattgattcttaatattctttacccaaatggtcatagtggactcgtctttgtacaaagtattggaataacgcaaaagagaatgttcaaaagagatgaggacaaaaaacccaattgatgtccttatccactttccagtattcaaaattgaaggattgatgttttggtcaaaatcatgtcttgtttgaatacaagtttgaatttttggggacaaatcccatgtttctaaccaatcccatatggccttgtctatacattattggctcattttcacatttggcgtaacctaattaaatattgacctcttctttacgttaaactcactgtaacctttttgttttattcgtctaaatctctttcaaattttaccacttttggcttgttatccagaaatcatatccatgtcataactttgattaatcctcgtatgagtatgttttatattcacttagatctgtttgtttgataaacacaaatattccatttgcataatagttaaagtagatcttaaagtctcataattagttgagatttttttttcaaatggtgcggtctcataatcagttgagaattttcatcaaatcattttttttaattatacgtaataacatcttatttcaaaaatccttttcaggattaaagacaaaattatgggaaaaaggaaaagactaaatcaaataaaaaacaagagaaatcaataaaattatagtactccctctgtttctaaatataagatattttatctaaaagcacaaaattttagaaaataatcaatttcttttgtttttataatttctacattgaaaacataatttagtattaagtcaaagagagtttgagcagtaaaaaattactgtagaatataaaaagtcatataattctaaaattttaatttttgcgtaaaaatttaaattttttatccaaaacatcttctaccgtgaaataaattaaaatggctaaaaatctcataatataaaacaaaggaaatagtaattatcacagaatacaataataattacacataatttacgacaaatcaaaattaattttctttttaattaaaattattgtaatgcatcaaaattaacaaaaataaagaaaaagatacgatgatttttcttgaagttagcaccacctaaatttcagtttgttttatttattaaaacaaaactgagattgacgtggtgaaaatttcataaaaatcttaaatattagataatgtaatttttttttacatatttatatttttaatcatcgaatataaaaatatttggattgattatgttatgctattagttgaatattatcatttttatttaaaatttatacaaataatgaaatattattttcatttagttaattctataatattaataattaaagttattggttaaaataaataaataactgagctatcattgacttaaaagtaaaataacaaatctatttttaattttaagagaaaaaactaaaaaagtgttgactgagtaaatttctgggttccataaatattgatgttttattgtatttaataaaatgatgtttttcatttatttgttattatcttctcttccatacaaagaaatatatgtgaatttcatcccataaattaaagttttctacttaaattattcgtttttattatattgttttctattgaaaataaacattatattaagaattaaataattgtattaacctataaagaacctccgagatttcctagaggtagctttcctcacacaccgtcacggccgcttgtctccaagttgtcttgggactcgtcgacgatgcacacatagtatatttatatattcttctcctagccgaaccagaaatttccagagagataatcaaattcaattgcataaaaactgaatcttgttgttgaaaaagagctctcacaaaacttgtttctcaattctctcctttggccctttttctcacaatctgcggatataaatacgcttcttctcctccgctaattacccaaattcgatcctaaagctctcgtctttcttcagcgttttccggtgttcatattcgaggtaggaaaaaagggctttgctttgtgctgagatctgttgttcatctttctaaagttttgtgtttttattttgatgaatctgctgcatttgtttgactgttttctgcagaaaaaaggttcaaccttttttttgtttgatatgagatttagagaaaaagtaagttaatgttgttgtttgtttattttgatctcttatttgtgtgccattgctcaggctgtgttgtgtcttcttggaggcttagaaaatctctatggtgagcagttttttggcgcgattcacttcgttgctcttctttgttcatagatttctcacatttgtttgttgttaatagggagaagcaccagctttctttgtggatcatctggagaatggatacaccaatggctttggtgtcaaatccgagcctaagaacagagatacatctgtgcttattggggatcgatccgtaagccccccaactttgatggtttagaatgtgaaactgttcttcatacgtcgacatttgttttgatctgaggtttatcttttgcagtttgtgattggtggaaatcatgaaggaaacccattgttccttggtgttcagattcatgacaaagtcactaacaagtggtgtgtgttcattgatcattgatctgttagtttgttccatcggtgtggaattttaaggatttgaagtcaatttgtgttttgttgtccaggtccagtcctagtgttcttggaactggccctaaaccctgcaagggttactctgccattgttcttccaaaaggtcggattttggttatcaaaaaaggctcagcttctgatgactccatttggttccttgaggttagtatatggagaaaaatgatattgattggtgttgtgagtgtagagtttttggtgttctcattctcatatgtttgagtattcatataggtggatactccttttatccgggaacaaaagaaattgcttggaagagaggttgttgcttggagtaaaggagtaaggggaaatgcagagaagcctattgttataagcggtccttctggagttggaaaaggaacacttatatcgatgctcatgaaggagtttccttcaatgtttgggttctctgtgagccacacgactcgagctccaaggtgtatggagaagaatggtgttcactaccatttcactgataagactgttatggagaaagaaatcaaagatgggaagtttctcgagtttgcgtctgttcacggcaatctatacggaaccagcattgaatccgttgaggttgtaacagattcaggaaaggtaataaaaagataatatttgtaacatcaatctctttcatgccgttgatccatcaaatgatcatatattttggtgtgtatagagatgcattttggatattgatgttcaaggagcgaggtcagtgaaggcgagttcactggatgcgatattcatattcgtttgtcctccttcaatgaaggaacttgaagatcggcttcgtgcccggtaaaaaccagacattagagttgtttttttacttcagatttttcattgcaagttctcaattttaagtgctgaaaaaacagaggaacagagacagaggagcaaatccaaaagcggcttagaaacgctgacgcagagatcaaagcagggaaatcctctggcatttttgaacacaaactgtataatgacaaccttgaggaatgctacaagacccttaaggtgacttaacctaccttttatttatgaataaattcctgttaaacctcatccatttcaagcaacaatggctgtctgtttcagaatctcttggggattaacgaccttgctcctgtgaatggtgtagaaggtaataaaaccaaagagtagacacaatgtatactaattaagtaggaaaggaagtctgatggattttgtgattgtttgataaaagcagtagaagggatcaatctgcccaaggagcacacagtaacaaagatggatgacaagattttgattcaagaaacaggagaaggaaccaagaacaaaatgtacacgatcttagccaactaatgttctttcttatgttatccagtgtagagtttattaatgaaacgtcttttggtgggcaggatcgtgttggatttatcttcaatcaacgggggagcaccgggaagaacaagagggatcgttctggacacggttaagtccagttgacaatgagtctttttatttggctgcgggaaagctgaggaaacatttagacgatgatgatgaacattgctcgttgttttatgactgtggttggaaggtagtgttatgcgatcactagataggcactgatgatgatgattatgattatgatgattcaagaaagtcatgatctcttatgagagatgatggaataaggttattttgttctttttactgataaagattttgtttaatttaaatcttgaaagaatccattcttttggtgtttactaggacatacaaagtaccaaaaaaagttgaaatctctgcaaatgtttcttgagattcccctactggaataggacaaacaagaaacttaacatcgaaatggggatgatatatttataaaattgttcccacacaacagtgtttagtataccgtacaggactcaagatcttcttggacaaaaagatggcagttagtaccagtttataattgaaaatcagccaataatgtaaaagaaaagcatctcaaacagagaagaataagacaaggctataaaaaaagagaccaagttgtgggactttggagctaaaatgggtcatcgaaagatagcaagttgtattgattcgtgggtccagtgacagtgtaaattgaaggaaggttcgtagtagcccaccacagcttaaaataattttcttaaaagattgtgcacttaatggttatggtacatccctctcacgtcctactcaactacacacacttgtcacgtgacagtgtcacggtgacactctgtaatctgtacaattaagtagactgacgcgtgtggctttcaagcgtaggtaaaagtatctcttctggggccaacccaaatcctgctacagaggtctcgatataatgcttttgatgcagcagattctggttgggtcagacgaataatggaaatgaagctatattgggcctaaagaaaagcccaaaaacagaattagagtccaactaactgactaagcactactggttgacctgaaagccgtagaacaagaaagtctagtgagatatgctatcagatttcatacagtttcagttttaagaggtgaatttcagttataaaggtgtaagaagacaagaaaaagaaaaaagaaaaaaaggtgtaagaagagttctttgcacctaacatgtataaaccaaagagctttggtaacaattttcgactgcataaggattagaacacaatctatgaggggagtcttagcttagctacaaataaaatcacgaactggccgaagcatgaaggatctgaaaatgttctgcgatcctagtaatactataccaattacagtttaacgggaaggatgttttagcctattaatatgccaagcctgttcctttggatcagatagtttctttcaaatagataaagatagaagcagtgtaagaagaaacagagctaaagaaatgttaaagaagaagatttactcaaacagagctaaagaaatattttgtgtacgaagaaacagagctaaacaaacaaacaaatgagaaaaaagaagcaactatccttagaacagcttagtgtctccaaaaatataactttttaagacgaatgatattcatgagacaacaaagctgcaaatgctaagatgcaaacaacaaaaactgccaaaaatcttttcaaagactaacataagaaatgatcataagttcatagcacagatttgacatcctaatgaacaaacattggataaacaatgtaagaagaacagagctaaacaaatgagaaagaagaagatttactaaaacagataatcctaacttttttaagacgaaggataatcatcaaagttgcatatgtaaaccgaaaaaaactgtcttttaaagactaatataagaaatgatcataagtttaaagcacatatttgacatcctaatgaagaaacattggcattctcaaatacaaaaaactcaactttgatgatcacccattacagcaaacttatccagtaatcatagttccagctccttcatcagacataatctcatgaagcaaagaatgttgtctccttccatcaataatactagcagtcttaactccttgagctagagaccttatacaacacttcactttaggaatcatcccaccagcaactttcccatcttcaatcatcttcttcactccttttatatcaatctcctttatcaaactacttggatcctctttattctccaagattccagccacatcagtcagcagaatcagtttctcagctccaagcgcggccgcaagctctccagcaactgtatctgcattgatattgtaagcttgaccagaatcatcagcagcaacagaggcaatcactggaatgtaaccataatcaacgagcggacgtaacacagatggatcaactcttgcaacttcaccaacgaaacctaactgagctgaattgggaacaggtcgtgctgtgagaagacgaccgtcgtgtcctgataaccccacagcggtggctccggcggcgttaataagagaaaccagattcttattgacctttccgactaaaaccatagagacgatctccatcgtcgttgcgtcggtgacacgtagtccgtcacgaaactcagctgggatgttgagttgtttcaggtaacggttgatgtcaggaccaccaccgtgaacgaggatcggacgaagaccgacacacgcgaggagcacgagatcgcttacgacggaggatttaagttccggcgaagtcattgctgcgccgccgtatttgacaactatggttttacctcggaatttttggataaatggtagagattcggagagaatctcgactctgtaatccggtgaaggtgcatttccggttgcgattgaaggtggtgttgatacggtggcttttatcgagaaacctagacggtgatggttcttgttgcgagttggataacagagagatggtgatttgttggggattagggttttgaaaggattggaaacagtgaaggagaaggatttaggtgaagcattggatgtgacggtggccattcctgaaccttaccggagaaggaggaagcggcggcgaattagctgaagcgagatggtctctcagatcttcttcgacgattttagttaaacaacaaaatgaacaaatgattaatgtccacgtggagcgtagacacaaagatgctgtcctagccctaagtttaaacggtgacgtacttgtgaaatacaaaacgctgacgttgttgttctgtctctttttgtacttaaacgatgtcgtttcatcttgtagcgggaaataaaacagagctcaggctttttttttttttttttctgttcgtcgtcgtctccgcgagattgctacaaattagagtagagagtaatttcaatcagcaataaattaaatacctggaattgctgattattgagagggaaatggaggaggaattgatacgaagatcagaaccggagtctctagtctccgtcactgtagctaggttcatgagtacgcttctctcagctcgccctaaaaagctacgagagtctatttctcgtctaactcctgattctcaaaagggtgtctcaggtaataactgttttcaatttcaattttatccttaatctgtgtttatttatgtttacacatgctcttttggggtttataatctgtttgttttcgttaggctctatcgatgaggcactctggtttttggaaaagtgcgttatagacgctgctgagagagacgaagccatgagtgaaattcttgtacccattatcgaacatgtaatatcttaaaccctgtgaaaagttaaaaccttgcttgattgttgtaatgtccggtcttttatcttgtatgttcttacgtgttggtttctctacttttgttgttgttttttagacattaaggtttaaggattctaagcatggtaacccagctatgatacttctaaattggctatttcaagatgaagttctctttcaagccgtttcgagaaatctttcgaatatcattttgaggaacgaggacaggtttttagcgcttggatggtgtttacttatccgacgtcttgtagaatgtgaggatactggggatcaaggtttttggcatggtgagcattataatcatctggctatctctattgaaggaaagaaaacgctctctttacttatgtacttgtataaatttttttgttgacaggaattagggagaaacattctatgtttgtggagattgtttcatcttgtgtgcctcacttgttgatgattgtacgcaatggaaggtataaaacttctttgtcaatgggtataaatatcatctcctgctctctattttttgttctatatggagcaagtttgtacacttacatacatagtcatttccactttgttctgagctgttgttattttgtttagtattttacaagatggatatgaggtgccatctcgtctttctctttctgctgctgattgcttgctgtcaattactggagccttagcaaagagggataatactctgatcaatagaccaaagtcaccaaccattacggggtctcatcaacctgttgctttgacacctaatattagtgagaaaaaaaaaaggccgacttctctacctgaagactcaaacattgagacaaattgtatactgtggaaccacatggaggatctgacacgccttgtacaatgtctttttgctgtatgttcgctgatccatctaaatatgcttgagctgtgttctaaattttgaagtgacgaagtaatccatgatttgagtcgagtaatattgacaaatgattccttccagtggaacagaaaaactcgactactgcatgcgaaggggttaagtcaagtgctgaaatggttagaggagttgaaagagcatcatggtggctcccaaaaggaggcaggtctctgactgatgccgcctttccttgttcatttccgttttctgtttctgtttttgattcttgcttttcaaattcattgtttaatacctggatttcaggcacagaggtatctatgggtggagctctactgctctcttcttgttggaagcattacagtgtcttgctccacatggaagatcaaaagttctcaaagattagtaaggaattgttggagcaatatttgtctggtattaaggttagaaattgtcgccaatcttttttggtttcaaaattttgtgatagagataaatattacatacagtacctatgggtttctattgtgtccgtatctgcaactgctgcatatgtctaagtcctctgagtctctgacccaattttgtctaagaataagtttatgtcatcgccatctacagtttctattttttattctttgttaaaaagatagatatatccagtaacatttagtagagtcgcttgatatttgatgggaatgtatttgcatggtatatgtatttgctctggagtcttttgtttcacgcagaaaatttatataaaatacacagagacaagttgtagatgttatattggtaaagggctgcttactagctttctgttttagttagtgttgttcaatttgattgggtttgtaagaagctaatagcattaaaattataagttatggagtactgttttaatgcttctctagctttctgctctttctcttattattagtgttttcctaattgattgggtcatcaggaaactaataatgataaaaatgatgcagtattattcagaaagttatcctcagggatgttcggacaccaagaatggtggtatagagacacagaagtttttcttaaactgtttatgccttttgttgggccgctttgagggaaagaaatttgagagcatactatcagagtatggaatgaagctcgtgcctattcttctacatcaggtatctttcgctattgtttattgaataggggagtgatgacacactttacctgaagttctcttgtagttatattggttgttctgctagttatgctagaattcatttcttatattggcttttatgacttcctgctcaactcataattttgttctgctcaattgattttatgattctaacatatcgtgagaaaattaatcttgaagggttatatatatacacccatgtgatcatcttagtgcttacattcttcctttgtattcgaagcttcgcagtaacaatgaagagatatcagaaggcgttgtggctatatttaaggcagtcttctttaaattacaatctcagtccggagacagcttctctgatacaatgtgcatggacgttgtgataccatcactgcttcaccttcttgatgaaagggatggcgcggccaaagctgttagtgtcctgctggcagactattgttccaagtatgtctattctctttccttttggtactaaatcatgttagtagctttctagttaccagtgacggtacctagtttgtctctgacttaaagaaacattcaccagaaatgcaggtaatagctgtctcagtgaaattctacaacgccttgcttctggaactactgtgcaaaggctgaattctttggatgtgatatcagaagtaatccttatgtcaaaagattcatttccttctcatataccctggtatgcaatcatttatgtttttcgtcccaattttctatttctagcttttctgtatcttctttatttgcattctcatcccctcagaagtcagaatcattttctgctcttatttcaggaaagagattgcggactgcttgttaaagtgccttgatgacgaggaaacatgtatctgtaaacaaacttcagagttgctgaagtcaatcggttggtcttcttttagcctttatccgctattcatttggaagcttttgtttgtggccattattaatttctggtattggcagtcttatgtctcttatgacctctaaatatggcctttcttcatttgataagatgaattttgctgataataatcagtgttttgttaaaaggaggatttctgttaattattcattattcagatgagaaaaacttataaagatccaatttatggggtccaaaacttgttattccatattgcaatggcagttatagttcatattggataacatttattttctgctttcctatataatgaagccaatcaactgaatgatttttgttatcgttttttcttccagagccatcatttgtgctaccgaatttagtaaacctcatttatgcacccaatggaaaagtacaatcatcagctacagaaaccttgcttggggtcctgaaacaccataaggaggattttgatgttatatgtatgttgctgaccagtcttaggtatcgtgctctgtctctttttctcctttccccattgtatacatagttgtttgtttattcccatttaccctaagtgagatgtgagaatacactggattcttaggtcaagtttgtaaaagtaaacttacgaatgctcatacgtgaaaatattgacctgactacctggtttggtttttaattttggttttgcattgtatcaagctaatattgaaaaaggctttctgcttttgatctccacttttctcttgtagtaatatccaagctttggatactgcagaaagtaatggacattccactgaaggtatttggcttcttatttcattaccataggctacatgcgatacagaatctgtgttaaaatttgtcttatatatgtacaatccgaacgtattatataaaattattacaacacttcaaatttaagctggataagaaataaaattactggaatgtgaaacttaaacgatgtgaaatatgaactagtctggctgaattacatagcggacactatcaagttattcttggtcaaggcatgctcatcatcttcttgtactgttacaggtttaacttttgacagtgatcgagtgctaaagctgatcccagagtgggctagaagtgtaagtacaagaatacgtcatgcttgctttgctatctttgaaatcaatccatttttgtttctaaagtgcatgtataggcaccatttacgaactgttggtgcactactgaatagaaaatggtaactgaactattaactctgaaccttcaacacaaactttttcaggcattggttgtcccttttttcccttccagtactatttccttttatctaattgttttcttgtgtatgtgctgggaaactcttcgcatgggaatgaccaaagtgaccaaagcttgtgccagctataattaggcaattagaatatatttctgcctgttgactgaaatcaaattcttacaggtacaaaactggaactcactgatcggacctttgcttgacaagatgttcttggagccatccaatgccatcatggttaggtttcttagttgcatcagtgaatctttggcagatacgtcggacttggtccttccgcatgtactttcacatatgaagaagcaaaacaagtaagtacaatacgtaccataattgtgatttctgtggtaagaaaaactttcaacgactcccaaagataaaacaatattgattatctataatgtcaattctaatttagggtggatgcgagcttcatatccagatctgatactaaaagttcagttgacaaaactaaatcggagaaatctctatttgaccacctttgcccactgcttatattaagactgcttccccaaagagtgtttgatgatattgattcttctacaatttatggtaaattcctcagcggggactctgtgaatggtaagtatgcttatgcctttggttttcttttcctgataagagaggattggatatttatcataaggtcgtttgatccttattctcaattagattcaacgctttagctatattttcctaagcggcatgatcaagagtagatactgacaatcttagacttgattcactacatctatttcttgtcatgtgttacttatcagactaccaagacatcaagtttgaggattgtcaatgcattgctactttcattttggaaaggttattttactctcagtgatcatcaaatacaatctaccctaatacttattttatatctagcgaactaactctagtaatacagggcattttctaagtttgaatttgaagaagttcggaaactctctgctgagttatgtggacgtctccatccccaggtgctaattgactaccttccttgctcttgtattgttggtcaatcttgtctaaatgtttatatatgttttaagcctttgtttcaaagtaaattttatataccaagaaacaatggtagattctccttaataagttttctgtcaagttcactgctatcttcatgcgaaagcaaagcacatgcaaaattttctcccgtcataactaggttctgttagtatggagaagggcttggtgcattttcttatatctgaaattttctaaatgcctacttcagttttacttatacaacagtctagcctactcttcatcatccaaatttgtaatatgtcggcacttttactcaacaggtgctatttccaactgttttattgcaactcgaaaaggccacagagatacaagacagcctcaagattaaagcttgcctattttctatatgcacatctcttatggtaatatatttaatttttcgtgtccttaatgaacatattctgtgatccctgttgtcacttgttcgatgcactatcaattggattagttttgtaaattacaagttttccgtcacttgcaggtccgaggctgggagtctctctcacacagagtaacacctaagatcaggaaagtcctggaaaatattttgttatggccttctgttgaagatgaaagtaagacaccggctagtggctattgatttatatctcaagctctgttacctttcacttcctcacttcatggctgttatttttccttacagtttccaaagtacaacatgggtgcattgattgtctggcactgatgatatgtgctgaactgcaacatcttaaatcttcaaaaacatctggaggagaaaaaatacgttcaacagggaaggacacatctggttagtattgatgttgtctaacaatagcttttccagacttgtgtatacattgtatcctgatctttaggtgttgatgcgtcaggttattctgtcctagattacactatccattgtttaatagaagaccgaagtaactgctcgtctatcccaaagctgagtactgatatcctaacttgtgaaaatcctcttcctattccatttcgtctatgcatggcaaatgttatcatcagtgcttgtcaaaaaaaccctgagtcttccaagaagacttttgcccgaaaagctcttccgcctcttattcattccctcaaggtactttttgactgcttacactcatttcggatttggctaaatttgtttgcattttgtttagttttcaacaaaattccttaattttgtgcaggtcatatctgtaccggaggtccgtgcagcttgtatccaggtcttattctcggccacatatcatctgaagtccacacttcttccggtttcatctgatctgctgaagctttccctgagatttcttgaacaaggatccgaaaaggtaccagaaatctattaaacttatttctaacatgtatacaatggtatggaagtagacaaagagcttcacattaagacatgaaacttcctttctcaagtgactactgtcgacatttctgaatcccacaatccatatccgaaactgtctgcatctatccacatctgaactcgaatatttatgactgccttgaatttaaggttatgcggaagtcaaacattattctcttgttgcgtaggaaaagctggctggcgcaaaactaatggcatcactgatggcgagtgaagacgtgatactggaaaacatttcagagggattgctcgaagcaagatcagttctgtccaaagcatctttgtcagacccttctcgagacgtacgtgaagtctgcgctaagctattggcatgcataacgccgttgtaaagccatttgttcttcttcttcttcttcttttttgccacttttggtttgttctcgcgtgccaatgaagtcggtatgtagatatgttgtagcaaacgatggcctaactataatcttatgtaatatgcaaagaccaaatacgttttagtaaccagttatggtgaacctgcagctaccattttgtgttttctgaaactaagtcttgactttttttaatttgggaaagatcagattagaaactcaaatcaacaccagtccactctctaggttagcaaaatactcatacctgttctgctgcgcttgttcttcacagatggatccgagttgcagagacctcaacctgatgatggtaacaaggcaaaaaatgtgctagagagagacagcatcaaactctacaattatgtatgttttattgatttagaactgaagagatggaattatatatgaaaactagattaaccaaagatagtcaagaggtacgtacgattttacgagtgctagatttgactcgcacagacttttaccaacgcctataatactactattaactaaagaacataaacgcatagatgacatgccctatggcttttttcttattccttgcctcatcgttttactctcttataatcttctcttcttcttatgtcttcatcttcactgatgtatctttcatttcttctccctactcacaccatcatcataccacttccccgatgttttcaggctgcactaacttttgacagcaggggcagagactcttgacatgagaaatgcttgacttgagttgcttcgcatcgtttagactaagatcctctacatagtcaacataggcaaaaacttcaccacgattctcaacctcttcaagcttagctccaaagccttggatttcaacagtttgcagagttttcttttcgggattgaagtagaacacatagtacggtttacatgtatacttcatacacaagacaatatccccagtagcagtcactccagcaactgaaaattcgcaggaagcaaggacttcattctcaggcagagtgtagacatacttcacccattccagtttctcaacatcctctagaacccacagacacaactcaacggtacgtcttccaccagcgtcaacacagttgcaatcagtcacacctaatttacccatatagttgaccaaactcaatctagtaggatcctttagacgatcattaaagcgggcagcgtcaataaacttgaactcctcagaactaacatcaaagcgaactatcaaaaacgtcaatccaaaaactgtttcaactaagacagttttagctaagtaatacaaaaccccattaatgcatatcccttgattcgaagaacaacgctcatacagaggacaagggatattcttttccctccacttgagttctccagatcctaatgttagaatgaaatgagtatcaaaagccttgaatcgcttatcaacgggatcaaacactaaaaagcctcgagaccttctgtccttcatgatcacaggtaagcccgtatacattccggtgatagggttacaaatcacaatcgtctcagtatcaacgatatgcacagcaggaaaatagagcaaacctgaggcatagctacaaatgtagtggctaacatctcctgagaacttgctatgaaactctaaatgagctgatttctcataccgattctgtgactgaggcgatgagaaaaattgccactcattacatttgtatcgttcaacagcaaacaagagacgtggacgattcgaggatctgctcaggaacagcttggtgaaatcagtactgcgaagtatagacgcccactgcttggacagtgtacgaaacctagccactgacttcgaaggcaatctcgcgaagatctcgcgaatgagatcagttgggagtgatacattcatttttcctctatccatcggattcgcctgagttcgtgattgttccgccggagaaagaaagggtttggggctacgacgacgacaggttggaatttgtgactgtttattttgttctttctaaattcgtccggtaaacgaaagaaatagacatactttatagattgtgtatgtgagtctgttggaaaaaaacgcagagttctctttcatagcagctcattcagaaagataagtttcgccgatctcttgccgtcccaatcagaaagataagattcgccgatctcttgccgtcccaatccacttggggttaaaaacttctccctctacactagttctgtctgggatagagtggatccacagtccgaagatttctccgtgttctgtcggctttgttgctagtcaaggttgtttcgtggtttcatccgtttttcttctttgtagaagtttgttttcagagtagttcagttctatcaagctgtggtgtagtctgtcagttcagttggttttctcgaagtggttcttcttagaaaaggtcagggtcttgctcatttgtgtatcatgaatctggatttggataaagccatacaagaattgtccatcatggaggatgttcctctgattctgcctaatcaagaaaaattttgctcaatagaaaggaataactgcagtcttttaggaagatttctgaacccttctcatcaaaggatgtctaattggatattggacatgcccagaatctggagactttactcaagggttcgaggtgttgcgctttcacaagaaagatttcagtttctttttaaatcggaagatgatttacttgaaattttaaaaactggagtttggactcaagatgaatggtgtgtgataatggatcgatgggtggagaaaccaaaagaggattatctgatgtttcttcctgtttggattcgattgcggaatattcctgtcaactattacacatctgatacgattaaggagattgcgtcttgtgttggtaaggttttaaaagtggaattagacttagaaaagtctcaagctcaggattatgtcagagttcaggtactgtttgatgttcgaaatcctttacgaaattgtaaagaggttctgattccaactggtgaggttgtctcagttacttttgattatgaaagaatcaggaagaggtgttttctttgccaacgtctgactcatgagaaaggtgattgtccgttttctcagcaaagaaataaatcaaattttgaaaaaattatcagagatgcaggtttaaagacaggagaattagtttcagaaactagacccaagattctatctcttccgtctccctctatggttcctgttggaagtaatgaaaatagggatttgtttaactggcagagagagaaggatgctcaggattcttctccttatccagcctctcctgctcctttgaatgagttatctaaggaattacagagaggtctttttccattcaaagctaaactaaggaagagtcatgaatctgaagctttgtctggatttttggaaatggatttatcttctgatcctaaaactactttagaggaagcaagttcgtcagggttaagtattaggcagaaaaatccaagaaaaaggaaagtttacactttgagaaagaagtcacttggtagagaagacttaaatcttccggatgcaaatttcatcgttcaaggtgacacagatgctaaaagaagaaatcaagctgttggttctgggatttctcaagataataagggtgtggactctacggtggttccttgtgaactgccgcagtatcaatagggcgtccttagttggaattgccaaggactgaggaatccttggacaattcgatacttaaaggaaatgaaaaaagatcattttcctgatattttgttcctcatggagaccatgaattgtgatccttttgttatgaaaatctttacttggcttggatatgattattttcacacaatagaaccagaaggcaaaagtggaggtctcgctcttttttggaaaaataacctagaaattgagtttttgtatgaagacaagaatcttttggatttgaaagtgattcaaggttctcaaagttggtttgtttcttgtgtgtatgggaatccaatggcaagtctcagatatttgcttttggacaagttatgctctattggtgaattcaggaaatcaacttggtgtatgataggtgattttaatgatatcacatctaatcaagataagttaggaggcccttctagactgtcttcttcttttcaaccattcaaagatatgcttagctggtgtgacatgcatgaattaggaagttcagggaatagttacacttggggaggaactcgtaatgatcaatggattcactgcaaattagatagatgctttggaaattcggcttggttttctatgtttccaaaatcacatcaatggtttcttgaaaaaatgggttcagatcataggcctgttcttgtaaagtttgtgaatgatcaggaagtctttcgtggtcaatttcattttgataaaagatttgcagatgatcctaattgtgcagaagctattcgttcttcttggaatgagattgtttcttcagaagtgtcgtcatcaatgatgggattagtggagtgcaggaaagccattggtaaatggaaaaaggggaataatttcaatgctcagaacagaataaaatgtctgaggaaagagctggatgaggaaaaaagttttcagtttccttcttggcctaaagtctcagtgttacaagatcttttaagtgctgccttttatgaagaggaatctttctggaggttaaagagtagagacaaatggttagatggaggtgataagaattctaaatttttccaagcttctgtcaaggctaatagagttaagaactcactaagctttttagttgatgaagaagggaatgaacatactgtagctaaagagaaaggcaacattgctttaagctttttcaaagatctctttacttcgtcctatcctgctaatatgcaatcaatcttacatggattccaagcaagagtcacttctgaaatgaatattgacttgactaaagatgtatcagaggaggagatttacaatgcggtattctctataaatgcagagagtgcaccaggtcctgatggtttcactgctctattctttcagtctcattggtctttagttaagaagcagataatggaggacatcttgggcttctttcaaacgggaatcatgccagatcaatggaatcacacacatctatgtttgattccaaaaatttcacccccaagaagaatggcagatattagaccgatcagcttgtgttcggtattatacaagatcgtgtcaaagattctatctgctcgtctgaagaaacatcttccagagttagtctccccaacccaatctgcatttgttgctgagaggttagcttctgataacattctcattgctcatgagataattcataatttgagaactaatgataagatttccaaagagtttttggctttcaaaacagacatgtccaaggcctatgatagggttgaatggccttttttacaaggaattttaacagctatgggctttaatatcaaatggatttcttggattatgagttgtgtgacttcagtctcttattctgttctgataaatggtcaagcctttggtaaattgtttcctgaaagaggtataagacaaggggatcctttatccccttttctttttgttttgtgcacggaagctttggtgcatattctaaatcaagcagaaagagatgggagagtaacaggaataaggtttaatgaggcggggacttcaatcaatcatttattgtttgctgacgatactttgataatttgtaaagctacaaagaatgaatgtgaagagcttatgcattgtttatcagagtatggacatatctcaggacaagtgattaacttggaaaagtctgctgtcacctttggagccaaaattgacgaggacacaaaagattggattaagaatagatcaggaatccaattggaaggtgggtatggaaagtatctgggactaccggaatgcttaagaggttcgaaaaaggatttatttgagttcttaaaggaaaaattacaggccagactcataggttggtacgctaaaactttatcccaggggggtaaagagattctattgaagtctattgcgatggctctccctgtgtatgcaatgacttgttttaggctacctaaatctctatgctcaaggttaactggtgctatgattgacttttggtggaattcaatgcagaatacgaaaaagattcactggattggggctcaaaaattaattttgcctaaatctctaggaggttttggttttaaagaccttcagtgctttaatcaagctttattagccaaacaagcatggagaatctttaagaatgaagatagtcttttgtccaagatctttaaaagcaggtatttcctcaatactgatttccttaatgcctctaaaggaacacgtcctttgtatgcttggcagagtattttgtatggtcgtgacttattgcagaagggtttaaaaaagattattggcaatgggcaacaaaccattgtttgggttgataagtggctttttgatggtctgaatagaagaccttcgagtattcattctttgatggatattagcatgaaagtgaatcaactcattgaccccatttctggaaactggaatctgaatcttatgagtcagttatttccttggacggatattctgataatgcttaatcaaagaccgatggtaaatcgaaatgattcttattgttggtctggcaataataatggcatttacacggttaaatcagggtatgatctgattagtcgacaagctcatcaaaagatttatcaagaggctgcagtgaacccttcagtaaaccctcttttttgcagtatttggagtcttcatacggcgcctaaaattaaggtcttcttatggaaagtcttaaaaggagctgtagcagtggaagacagactaagaactcgtggtatcaaggcaatggatggatgcttaatgtgtaatgaggagaatgaaacaattaaccacattttattccaatgtccattggcaagacaagtctgggcgctgtcccttatgcaatcccctgaaaaaggttttggatcttcaatctttactaatatggaccatgttttgaactattgtcagaaactgagtagttctagtaatgtgagttatgttagtccttggataatctgggtcttatggaaacataggaataaaattctgtttgagggagttacttctgtgactcaaagcattgtagacaaagcttatgtggattgtaatcaatggtgttcagcccaacaagatgtctgtatcaaggaatcaaagtcaaagttgaattggagtcctcctcctcagaatgagattaaatgcaatattggtgtggcctggtctaatcgtttacaagcttctggtgcatcttgggttgtgagagatgctctgggaaaggtgttacttcatagtaggagatcttattctcatgttcattctatgttggatgcaaagattagaagttgggaatgggctcttacaagcatggcacaacatcattttgacagagtcactttcagagcctcaacacatgacattattaaagctctctacaaaccagaagaatggccatcattattaggccatacaagtcaactcttgaagttatcacaaaagaaaagtggttggttcatggctttggaaccaaaacactgtaataaaggagcttttgagattgctaagagtgttattactgggcacagatggcaatcttatgtctctcggggttttccccattggctaggaaatctctttgcttccgaaatgactcagctagggagattgtgacagtgttcattggaggcttgatttggttacaggtggtttaactcagattatcaaatcagtcggaggtgtcatctttgggaattagatgctcagattaattgctgagttgttaatcaaatagaatgttaggtgtggaggtggattagtttttgtccttttctaatgattgttttcttcagtcaaaggtttagtaagtttaggatttccacttaggttcttcgagtctagttttttaataatttcttttttcctaattttttcattaaggttagagtctatatattataagtgtttactcctttacgtcattaggtctcagtctttcttgttccttttctcttttcaatcttacctccatggcagatgaattgtgggatgaaattcaaggcctggatctaggtcctgaggatccagccctcttcattccccatgaagcttatgtgtatgttgaagagttcaatcgactgagtataattgcaagacctctcaacccaagagtccaaaacttgaacgcggtgattgcagccttacctcggtactggggaatgacggtgcatgtccatggaagaattctggatgcaacttatgttcaatttctcttccaaaatgaagttgacttgcagtcagtacaaagaagagaaccatggattttcaacaactggttcgtggctactcaaagatgggaacctgctcctgctcttaactttgttacttctattgatctttgggtgcagattagaggaattcccctgccctatgtgtgtgaagagacggctctagagatagcacgtgacttaggagaagtcatcatgctggatcatcatgacgcaacatctactcaaattacttatatccgagttagagtgcgttttggcatcacagacaggctcagattcttccaacgaatcatctttgattcgggagaagtggttaccatcagatttcaatatgagcgcctcagaagaatctgtagcagttgcttcaggtttacgcacaacagagcttattgtccctatagaccacgtccccacagcatagccagagaaagagctgtcttcagagacagtgttcataggtcaagcttgaactctcaatcgcagatgacggagacttcatttcctgctcctgtgacaccgcctcctagaattgctcatccaccactgaatcctgaagaattgagagctgcgtatccatactatgcatcagttagagatactcatacattacatgttggagaatctagtactgcaagacaacaatggtcatcgagttctagtaccactccaacaagagcagacactcctaatcatgataacaacagagtctttgaagtcggtcaatcctcaagaagacaggaagtaagaagagaagcagaggatcctagacttcaaactcgtctacacagtgcttcaagaatgggagagagtctgaaacctcccaaaaagagataaccactctaacaagacttctgtcaatttttgttgaagactacagggaatctaggatagcagcttcaagtagttggatatgtttttttggttctgacatatccttaactttgttaagtttcaggtttattatttcatgtttctcgttttacttctaagatcatcttgttatgtttgaatcaaaggtttgtaagtggttagaccactcaaacactttttgtaagaacacaatgacatgaatgaatgaaagataacttttagggaaaaaaaaaaaaaaaaacgaaagaaatagacagtgaatttgatgggcctttgggctttagcgtaattgtgaatgagctcatttattcattgtcgtaatttatggtttgttctctcatgtgccaatgaagtccgtatgtgtgctagcaagcaaacgatggtattggcctaacttttcgtagagattctataaaattatgtgaaatgcaaagaccaaataagtttgggtatagaatctccagctactttttaaaatacaaaataatgataccagagtacagaaatttaatagacagtagaaattgcactttaatttcgggtagaagatatcattaaactataggaaaaattgattaaccaaaaaaaggtcaacaatgctacaatacgattcacttcaaaatatttgtaatacactaccaaagctagatttgattcatactcacagatcttccaacgtctataactaaagaacataaacacatatatgacatgccctactgctttttacctcatcccttgtctcttttcttccctactgtctctttcatttcttctctccctttggtttaagccttttggtaatgataatcaggctgcgatactttgttacagcatgagcagagatgcttgacttgagagatgcttgacttgagttgcttccctttgttaacccgaagatcctctacatggttaacaaaagcataaactctaccacaattctcaaccgcttcaaggttagctccaaaatcttggatttcaacgctctggagagtgttcctctcgggattgaagtagaacacataaaacggtttacatgtatatttcatacacaaaacaatatcacctctagtagtcactccagcaactgaaaagtcgcaggaatcaaggacttcattctccggcagagtgtacacatatttaacccattcatgcttctcggcatcctctagaacccacatacgcaactcaacggtgcgcctttcaccagcttgaccatacttccaattaatcccacttaatttaccctcatagtttaccaaaatcaacccactagtatcatcaagttgatcattaaagcatcctgcgtcaaaatacttaaattcctcagaccttacatcaaagcaaatgatcacacaagacggtacaccaagagtctgagctaagtaatacaaaactccattgatacatattccttcactcaaagaacgatcatatgcaggacaactaatgatattactcctccagctcagttcctcagttcctaatgtcagaatctcatgatgttccctttgatcagaaaatggataagcctcagacaataccttgaattgcttaccaatgggatcaaaccctagaaagcctcgagcatttttgtacctcatcagatcaggtaagctctcatacattcctgtggtagggttacaaatcacaggcgatgcatcttttgagagccacaaatcagggaaacagagcaaacctgagacatagctacaaatgaatcggcttacgtctcctgagaattttgtatgataatccaaatgagaagacttctcatatcgattctgtggctgcggcgacgagaagaagagccactcaccatttcgttcggcagcaaacagcagacgtggacgattcgaggatctggtcaggaagagctcggtgaaaactggactgcgaagaatagacgcccagtgcttcgacaaggtacgaaatccaatgactgacttcgccggcaatctcgagaagatctcgagaatgagatcatttgggattggttccatgaagaagcgtttattgccgccggagtgtgtgattgtttcgtcggagaaggagaaggtttaatacgacgcaacaagattgggattgtatgggcctttgggctttagcatagttgtgaatgagctaagcccatttattcattgcgataattgggacttttggtttgttctctcacgtgccaatcggtatgttagatatgtggtagcgaatgaaggattagttttcacagggattctaaatatcatgtaaaatgtaaagaccaaatatgttttggtaactggttatggaatctctagctactattagcaacaaaaaaaaaagacagtagaggtagagcttgctttttgatttaggatgaagaacaattgtttaatggctaaagcaaaagcttagtatctggtgacaaatgtgtcaatacagagataaatttattaggcttagcactcctttttttggattaaacaatcaataaaaacgaaatagaaatataatcagtttgtgtttttgctttagtgaaacagaagaaaatgggttcagttattactttttctttattttttgggatttgtgtagaattatgtacaagtcatatactattaaaataaatgggattagggaacaatgtggtgagttaaatgtgatggtaagagaggaaggaagaagcatgggataatggtgaagggagcggcgcttaaatctgaaaatctcgagaatgaagaaaacacgtcacttcactctcacgatcgaacatgtgattcttgtgtgctgcgacgactcgtgactcttgcctctctttttctcatgcatggctctccgattctccgacgaaagaaggaaacaacaaaaagataaagatgagatatcgtaaaagctttaaagctttaaagtgtcctcaagaaaaataattctaggaacccaaaaaaccttgtctcgctagatatcttggtaacatgtacaagtaaaatattagagctagtcataacaaagaaaaacaaaaaaaaaaacatttgagttcctgatgattaacagaaatttttgaacataataatccaaaaaaaaaaaaaatgtgtgtgtgcaattgttctaacttcttaagctatcatcaaaaaggtgtaataactaataaggttggcattgcgactgtttggaatgcaggggacaccaagaactagggattatattattctagtttgagcctaggtagaagaattatataaatatgaagttgagatcaaaaatggttaaaagtttttttttttttttttcttttgaaaataacagaatatgagaaaagcaacggtcacatgcgcgggtgaaaaaagcaattctctaggaattgaagcgaaccgtgacattatttaagcactcacatactctttctaagctccattatcatatcctcttcttccttcttcactatcaatcttcttctccactacaacacaaatggagaaatcatcctcaatgaaacaatggaagaagggtcctgctcggggtaaaggcggtccacaaaacgctctttgtcagtaccgtggagtcaggcaaaggacttggggcaaatgggtggctgagatcagagagcccaagaagagggcaagactttggcttggctctttcgctacagctgaagaagcagctatggcttatgatgaggctgccttgaaactctatgggcacgacgcatacctcaacttacctcatcttcagcggaatacaagaccttctctgagtaactctcagaggttcaaatgggtaccttcaaggaagtttatatctatgtttccttcatgtggtatgctaaacgtgaatgctcagcctagtgttcacataatccagcaaagactagaagaactcaagaaaactggacttttatctcaatcctattcttctagttcttcctccaccgaatcaaaaactaatactagctttcttgatgagaagaccagcaagggagaaacagacaatatgttcgaaggtggtgatcagaagaaaccagagatcgacctgaccgagtttcttcagcaactaggaatcttgaaggatgaaaatgaagcagaaccaagtgaggtagcagagtgtcattcccctccaccatggaacgagcaagaagaaactggaagtcctttcagaactgagaatttcagctgggataccctgatcgagatgccaagaagtgaaaccacaactatgcaatttgactccagcaacttcggaagctatgattttgaggatgatgtatccttcccttccatctgggactactacggaagctt

SEQ ID NO: 1090 - DNA, 109016 bp, Arabidopsis thaliana
atcaggtttggcattgagacccactccgaggattacaatcgtgaggaagcttgtgatgtaacatggaagctcccaatcttcccacttgcgcgactgtcctggaggcggcggagtccggttcatgaaatatcctttgggtcgttcttcgtgacccggtgtcgcccaccggcttggaccagtagatgtggatccagatcggaagtggatccggtttcggagcgtcttcgctgcgacaatcaatggcttcgtcgacgccatttttgtgattccgatttcactctcagtgatatattgatgattagacgtaaataaactctagtgtgagaaaacctacaattacttgttgaaaacggtgtcgttggagaactcgtgctcacacaattcacaacgtagtcattttggagaaaacaaaaaccaaatttccaattctctcacaaagaaatataagaatccaaaatctctttactaagcaaaagcaatgttgttttcaccaaccataacgtaatcagactcaaacaatttcgtgtaaagaccagaagtgaaaccaacaaacgagacattattcacagtggaaggtctaaattcgagaggaacattccaagcagcattcacatcatcatcatctgaccatttcaggtcaacattctcaacgcgaaacccgttcacatgctccataatgattccagacgtggctctatggttcactagaccttgacatccaggtctatagtccacaagccctgcactgtaattactccatcttctgaaagtaaggttcatgttcttgaactttatatctgagagtagtccgtttggtgaacctgataaaaagactccgttttcggaatcgattgttatgtttacgaataggagattcgagattgagccttcctttgcagatgagtcacgagggcaagttgttatatagattggttctgctcttccccaccaagaaggatcgtagtatcttgtactaatgtttatgtttgaaaatgtaacgtcactcacatttcctgcacatattcgggttacattacataagtttctgtgttgtatgcagccaaagaaaagaagaaacttgtttacctccatcgcgtatttgcatgccaagtcctctgtgagattcaaaaatagtgatgttatcaaagacaagacctttgaaatcaaaccagctcgcactaccgagtttaatggctgaggatttggtccggatccaacagtctgtagcggttaagttgtaaagtggaccagtgtaagtcttgggacagattgcatcatctccagtatcgatatgacaccgagttataacagtgttgttggaatcttcaatgtcgattccatcgttatttggagtattgaagtccccaaggatcgatacatcatggactgatgtgttctcacatctcacaatgtgcaaactgcaatgagagtgtgtatataatcaaatcagagattacttagcacagaagcctaaattctcagctagagttactttatcttcgatctaagatagtgaaacaaagtcaaatttgttcatagagttctttgtgaaaagcagaagtttcaaaactaaccaccaatacgcaggctctcgtagtgtgatgttccagatctcaacgtttatagaatcaacgaatccaacaagcctgggtctacactcatcacccaagcaagctccggtttggttccagctcaccatcacgttcttcttctcgtcgaatctgaccacgaacttcgatccttggccatcaatcgctcctccgccagtgattccaacatccgtagcgttattcgccaccaccacgtaccaatccgacgaagtctccgccggataataatcctcgattctcggtccaccgagaagcacggcgttctccgtcacatcgagaatgacgccagatcggagatggagcttagcggtcaaatagttgccggaagggaaaacgacgcggcagatggaagaaaaagatgtgtagtgacgattgcaggcgtcaatggttgactgaatcgcagaagtatcgtagttgataccatcgccggtagcaccgaaatcggtaacggagagggtcagagaatcgccgggaagttgaatttttgaatatgacgtgtctgaacgtgattggaccagagaaaagaataatagtaacaataatatgcttcccatcatttttttttaaaggtcttaataataatcttatcctatgtctatgtgtgtagactttattggaattgataaacaactgaaactagaattccagatctcttctatgaggatcgtagtgtctttaccgaatcctggatagtttgatgcagaataataagctatgagagagtttgtaaaaacaaaaacaattaattaggcacaataatagtgaaataatactacaaaaacatcaaaaatttaagtaaacatatatgagcaaattgattaagcaaattgattaagcaaaagaattaaaaagtgaaactttctctcgtgtagatttcgtctaaggcggttaatttgttgaatcttaggctgaggaagagatcgataccatctagtggcgggattgatgatacacatcaatctttctatacggtagacgcaaacaaggccatcacagcttccggtaacgtgctttgcactcatatttatgattgcatctctgttcttatcgaatgagtcaatttagggttttttgttacctaacctaaaccataattcaagaggtgcattttcacttggtccagctcaaacaatctaaacatatagttgcattttgtttttgcttcttctttttcgtgcaactccaatatccaaaggatgcccctgcttcttctttctgtttttgtttatcgatactgatttatttccctaaatagaatttttttatctctatttattattagtaagatatatataacgagatcaaaatgatcatatcctactaaattctacattgtcgaaatctggtacaagaataagaaacaatcataccagtgttgtctctctgaatcaaatgactgataccttcttaacagatatctatatttatgattatatttatatagagagaaacgagcttatacgatgtatatacacattcatgatctctaccgttttcccaacttacagctccattttgacctgatttgggtgcaaattagcagaagccaccattacattttcagaaactgccatcaaattgctgttatcattgccatgagcttgatcctcttctcttccccataccggctggttcaagccgtcaaaaggccattgttgtgttggtggttgttgcagttgccggtgatgaaaggactgttcggtctcaatggcttgctgaggccaagcaagctgcattggtgcggcattgaagctcccatccattaaagaaccgttctgtcaaagaaaaaaacacagagccaaaaccggaaaagatatcagcaaagggatcattcatagagatcttgatctagtcaaagaagtcaactgttgttgctgtgttattattatcctaaaagaacaaggtttgatgagagggtccctggctatttaatggtggtacaagctgtaagaagaaagagagagggagcatttatttagtttggtccaaaacttttgatgagaatccacaggtgatcatgaaattagataggtcactttgaaataacaagattttggaagagacccacagaaattattgagggatgaattaactttttttttaaaaggttcatcaagtaacacatccgacataagtcacagaagacacagaaaggttttacagaacaaaggtggtccgagttttgacccactactgttatttgcattgggtgtgtgtgtgtgttgtgtatttatttttccctgagtttccttcatgagagtagacgttgtgatcttcctatgccttacactaaaatggtctaaattaatgtttgtatcaataaataccccaaaagtttctccttttgtgatagaaactagaagctactcaaagaggtatggttaacttaaatgagaaacacatgaaatggttaaatttttcctagagaagactaatcagaatgaccaaattattgtttgagattttgatacttacttctgaagccaatatggtgtcgagattgaagtcgattctggggtttaccgcagcaagtctcattgatagcatctgtggaaacacaagtcacagtttcatgagattgcggcacataattctattcattttcaaattgttttgagttgacccttttattgtgcccagggctattgtaaaatataggtataaagaacaaaaattggaccacggaaagtctcacctccacttgacgttgtaatgactggacatggttaatgatttcatccagcaccagcgcggtaccttgaatctgcaggtcaaagactttctgataagctcggattcatattaggtagatctgctttcacataccaaaaattctttctagacagctaactattgttaagatgatccaatatttcaacgagaaaataccaagattccaaaatacacagtgaaaaaagcagcaagagaatgacgtgctaatctaaagctattataataaatggtatctactacaatcacaagtaatcagtataccctaggggggctaaaggaacaatcaatcaagtcctcacagctcacctatagaatccaaattttaaacaaacactgatgttccatatcatcatctctatcacaccaataattgctgctaacttctaacatcagggatgattaattagctgtctgggggagtgtcacatcatgtttccaactaattaggtatgtgggactcaaagcatatcaatttttgtaaaggatcatttgctttaatcgtccttctaagagtcattttctatttttccttgatagataccgaacttgttagagacgatactaccccttcctcaccttccatagaaagattgcaacttttttcccacttatcatcaaaagatggaccccaaaacacactttgatcttgatctttccaccaaaatctgtcccctaaacccaaaaccttaatggcatattacagctagcacacttcctaaggtcattctcgtcatttatagactaatcttcaagctcaacgaacacacttatggaaaaagaattcgataaagcaaggtcctatcacttccgtgtgactgagttaaccttaaagctaagtgtgtacccgtgagatatttctccccacacgaaataaaaaaataaagttgagatctctaaaggcattactacacaattacccaactggctactttggcacaccaggaaccacttttcttaataaaaaagcaattaagcaatccactttttaggaagaaaaaaaaaagtaggtgtgaaggattaagacccttaacaaaaagactagatcatctaataataaattcttacttttggagtgaatcaattagagaaatataatgtcgttaatcacaaatgaagacctaatgattgattaacaaattgattacacgtctatatctaagagacaaaccttatcacagcctgggaccagttcctgtaacagcttcattcgtgcatttatcttctctcttcttgcctataatccaaaaattagtgatcaattagcgaattaatcaactgattaataccaaaaaaaagaaaaattagtgaaggcagatgcaagttactcgttctgctaagctatggctatcggttgcttgaccacgacgagctctaacgtgaacatatggcagcttctcgttctcttcagagcttttgttcttcttcgtcgagcttttaccctataaaaaatcaatctgatgaaacgaaggatcaaatgtaaaaaagtaaaaacatttgtctctcactctaaccttcttttcgaaatctttcctcttcccatttcgattgttctggttagggcaagggatttgattctcaatcgctgaatcagaaatcaaccgctgagatgaatcggtctcagcaggctccgtcttgactctgtcgagattagcacttgaattggaaggtacagagctcgtcggagtctccccggagatatttccgttttgttgctcagtggcaatcaccgagaaacgagctgctcgctccatgagaactgagttagaaggaaaagccaatgtcccaccgaaagagtgaagcggcggaggaatctctccaccgatccctgtcactgccgcttgttgagaagacgaagaatcagtgaaatggagaagctccactgcttgtgtaggtggaagctcaagcaaagccgtgaacgaaccgccggggttctcgggaggtaaagtcgtcactagttgccgaaattcgtcaccgagatgtagcgattcaaggcctattggttcccggcacggtccaacaccgccggatctagctccaaatcctccagtcagatccataaacggaaactcactggaaatcttcgaaaacaataacaccaataatcgaaaccaaattcagcaatttgtgtaatcaaatctcacgacaacaaaaccctaattgagcctccaaagagagcgagagagagacttgagtagaagacttttgtcagtaagcgagtaaaatgcggcgaaaaatagaaaggagagaaggtgggcaacaatggcggtctgaagaaatccctccttcttctatagctcagagaacttggcgaagaaggaatagttattctctcttcttcttcgtcttctttctcaaatgtgtgtggaagaaaagcttttacaccagaagaagagtaggacgaaagcaacgttagcagtggagtgcgtctgttaaataaaggccactgttagacaaaagaaagagaaaaccaattttggttattgtaggtacggtacggttcttttgttatatattttgctggatcccaatggatattacttgggccttttgggctttaaccggtgactttttatctctgattataaactttttttatcactccttaattttgtaattagtaaatttttgaagtattttgatactataatataaaaatgatttgaatagggcgtaccagaaaacggcacatatttatttaatcgaatcggtagattagatttattcttcagcaggaccagcctgctgtctctgaccacttttctttttttctcggtataataattggattttcgtatagtattattatcagtagttaatgccataaatggtgttacatcaggttttctgactttccacggactccgattccggtgtcaaattattttgttgacctgtaaataaccaagaaccaaaaacactttttaatatggaaaaataattgagctcaaaacaccattttagtaattatctcagccgttggatgaaatctaccaagcgtaatattaattttttaaaaatattttattttttttattttttaaaaatattcaaaattcatcaagtattaaaaactttagagtataaaaggcaaaaataaaataaaaattgagacgtactaataatattaattcaaaatatcttataaatttattaaaaggaaaaaaaaaaacaattaatgttacttctttaaaagggtgttttggggatagagaggaaaatttgaggacaaagatgaacagatgggtccagtggaataacctgtttcacacaatgggccgaacaggaaatccacttatgctctaataatctgagcccaaatcccaatttccatttcattgcaacaaatcatcgttgcttgattattttgattagccaatttcttcttcatgtaagtaaatctcaaaactgaaatttagtaaaaaggtgtagaagtggaatataaatgtgctaaaatatcggtttcactttcagcgattggtgatgtaaggtttggtgtagtagtaaagtctcaatcaaagagaggaaaggtacaatctttttttggcatttccaatttggcaacgttacttactctcccaacgtccattacttctttggtgtctcagatattgatgtggccaattctttaaccaacctaattcctacgtacatatgtgttactctttcacatatatacactttattctaaatataaagattttgaagctatacggctcttttctgtttttattcaattagatgtcaaaatgagtatgaaacatgcaaagtctttatcaataagaaacattctaattatgcaaagtctttgccattataaacgcagttcaattttagatgatttatctttataaaatttgttcccgagcacagtctcgaactcatatgagactaaagtttttaatattcacacataaaacctttataaaaaattaaagagatatattttcttttattgctgagaaagctgtgaggattatcttcacaatacttacggcatctccaacacatctctatttttgtctctacactctatttttgcttttattacactccaactcatctctattctcacttccattatagagatctctatttttttctctatatatagaaacaaaaatatggatctctatttttttcccctatttttctttctaacaaatagagatttctatttttgaagaattattggagtaaaaatagaaatctctattttctcttctatatttacaaaaaaaaaatagagacaaccattgcagatggtcttattaacgtatcacattgggatcatgatggatttaaaaggatagatatgggcgagaccacaaagatttttcggatgtatacgtgaagcatgaaaaaaaaaaatgtgcgatgaataaagaaatatgtttagaaaatattatagataattcgtttatatatgagtgggtctggatccgcgtgttaatcacgtgacactggcccaagaagcctctcttcgtagtggagtggtgtgggaattcccttcttcccatattaaaatgtttcgatgaataaatgaatagctctctctaaccttcttctttttgtgttttaatgaaaatgttttatttttctatgtagcttgcattattcgacagctgttacaaacctgacatgcatgggatccacacaacaacacacatatctctttatatgagttattcccatttcccaaattgctgagcaaacgacatccgtaagcagagttaagactattgaaaagtgcataacaattatggttgtcaaaacgttgtttgtaagttggtttagctaataatcattataaaggtagattgtcaatggaaatatagttgtaaaagcatttaatatcaaacccccaaaaggaagaagcaatgtatcacaaacgattcaatatcttaggtgaattttgctaacttcgactaattttatgtagagtacgaatgtccacaagcaattgtctatgtaatgcaattgttccacgttatatgaagcattgctcgtttctatcgtcaactataacatttttattttcatcaaaagattgtttggattatttagtcgtataatattttgaaacatatcaaacatcatgaatgcacttcacctcccaaaataagaagtctaagtccagtgctaaatttggttagcgtcgtaatgattataaatcgtcaataacattgaactgtccaagtgtatatatatatatatacttaaatgattacgaaggagacgtctctaaattttctacgttatacgtttacacgtatagaattcgtcgtacatttaaatacacgtacatgtatatacatatttggcacaatgatcgatactgatacagtgttgtgtaatagtaaatagtaaatacgttataggtaatgagtgatgcaagtcgaaacacttctatcgatcattgttcacatgttagtttcgttggattcaaccgattttcttataattcattatatatacattcaacttaaagaatgaaattctactttcaaatgcattaattgtaagatagcattaatttgctcatttgcaaagatactttgttatatgtgtctgattaaaaaaaaaacgaattgatgtcagaaatgagtgccacaaaatctgaacacaaagaaatacaacaaatcgtcattgtttgtaccttaatggtttgtttaagatccattgtaaaacaatacctcatcgtaacaatgtgatcatataacattataagttgatgcgtagacatggattagaaataagagtctcgcatacacacacaatgaaagaaaaattaaaattgataaggtagaagaaaatatagtgatgatgataaagaccggaacatacgaagggcccaggagacaaggacgaaacaaagtgggcccataaaagaagtacccaaaaaaaaggacttgtgataaagttgggcccatcgtcgatgatcccctgtgaatacccgaaggccaaaaatgatgggggggacccactgaccaagttgcacggcgagtgatgtgttctgtttgggtctaaatgggccgcgaaaacgatgggcccaacttattcattgctttgccagagtcctttgtgttgtttgtagattgtagtactaacggcaagctgttcgagactattgccagtttccggaaaagttttctgacacagactaactttttgttgggtttcccattccaagtatcaagatattattagtttaatctggacgaacgtataaataattcatttcgaaaattatcgtatgtagtaaccaaccagttcagtattcttaagtgaaaaaagtacaaaatttcaatacgatcaaatatgtactagtttaaaaaaaaaaaacatttctcatgcaaaataactggcaaacataaaaacgggttgggtaacctgaaacaaaactccagcccaaaatgatgcccgcttatacggcccaataaagctaaagtttgctgcgaacttaaaacggcagcgtttgctaattagattgagtaaagcgatttcacggtgcaacagtcgaagcttctcgacttgttattgtttcgtagcttcgtcggtccaacaagaccttgcgctagaagaacagtttcggctttgttttgttcaattctcacctcaccccggacagagtccaaaacaacggtttatttcttgcgtttgtcgggaaatcagagttgagtataataaacacccttcacgacattctttgcttgtccaccttggtaatcctccattcactctcttcacgtgtttctctcttgataattctctgatacccgtacgcaattttatctttccttcttcgtttcttcgatttcaatacgtttggattgtgtgttggtttcatttttctgatattagaaatttagttgaaacattacctgcaaatttgcagttcttaactagatagcttgctcttttagcgatccttaaggtatattttgttatctagttatgattttgtttactataccattgcctcattggatctatcaatgtaaaagacttggaaattgcgttgttgttctttgtgtaggtatctgaaattgggggactcttattataaaagatatgatgatttgttactctccaattacaacatgttctaggaatgctatcagtatcaagaggcatttaggctctcgcctctacggcgttgtggctcacggatcatctaaattctcctgctacagtcttttatcaggactttcaagaagacattataccggttttcgtgtatcggtctctaatagaccttctagttggcacgataaaggactttttgggtcagtattgatcaatcgaccaactgttgctcctaaggaaaagcttgaagtttctttcttgtcccctgaggctaatatgaaatgctcgaagatagaatctaacatgagaaatctctattgttattcaagatttgcatatacaggtgtgattgttagcttgcttgtttgttattcttcgacttcccaatcagcgtacgcagattcttcaagggataaagatgctaacaacgtgcatcatcattcgtctgatggtaaattccacaatgggaaaagagtttatactgattactctatcattggtaagtgtccaataatattgttgctcatcttagtcttatgtcgaccgttgtttgatcagaaaatgacaatggttttttaggtattccgggggatggcagatgtttgtttcgttctgtagctcacggattctgcttacgctctgggaaactagctccaggcgagaagatgcagagagaactcgctgacgaattacgtaccagggtaagtatctatggttaagagtttttatctgtcatactttgccaccaaagatcaaagtaactgttgaattggattcatatggcatcgttagtactttttctctctgcttcagcaaagcctaggtcttaatttcatctatcaaagttcctatctatgtgttatctttgaatgtgataggttgctgatgagtttatccaaagaagacaggaaacagaatggtgagtttttcatgctttcagaccaattttcaacttcattcactggctatggactactcttaaacttatacatcacatttgttgatctcttattaattacgaactactagcagctttttctttgcatctactcattctgatgattctcatcaggttcgtggaaggagatttcgacacctacgtcagacaaattcgggatccacacgtgtggggaggtgaacctgaactcttcatggcttcacacgttctccagtaaataacctcatcctctctgttctttttggttccttaacgttcatgatttcagtttctcatacacaatctagattgaaatctaacaaactccgaaattgtgatcataggatgccaatcacagtgtatatgaaagacgataaagctggaggactgataagtattgcagaatatggtcaagaatacggtaaagacgacccaatccgagtcctataccatggttttggtcattacgatgcccttttgcttcacgagagtaaagcttcgattccaaaatctaaactttagtatacttagttttgcatctttgacttttgtcaggtgttgatgatgtttttgtttactgacacaaccactatctgtatgccttgtagaatgtaacctttttttaccttttactttgaataaaaattttcagtttcaaatgatatgctcgcttcaaaatcttagcttctggatagatacaaagcttattgtagatactcgaaaagagtatatgtggtcagtgtgatatcaggccattgtggttgaaaagttgaataatgatttaaaatggtcccaaacgtgacaaaagttagttctacttcatagaattgagtggattacacactagagacattgtagctaagaaaagtgtaaaaatgtcggactagagaactattggtcacccttgaagtcgttgacgacatcgtatgggatgggagtgatagtctccaaggtcataccttcgaccatgaatcctagtttgggtcctttaggctacctctttgtgctaatggtttctcctctggctttggatgcagccttgagctcatcatttttcttcttcctcagcttgaactccacagcacatcttgactgctgcacatgctccacaagaacatggatcctcttccttatgatcttatcgccaatctgataaacccacctcaagcaaaaactcaaaaatcagtgtagagcagatattgtcatagcttctatagagacaaagaaagaagagtaactaaatctaaactgtgaaagtacaaggttagtgtatttgttctttgatgattataggttgctaatcacagtatatatgaagcacaagaaagttagtatatatcgcaagttagggtgaaaagtaaaggagatcagattaaagtcctatatcccatggttttggtcactacactgcctttttgattcatgttaagcaaaacttcaatccaaaagtaaaggatggatatgcttgttttgaaccggtatgaatgccatccggtacggttgttgttggggacataagtgggatattcacatgcatctttgtaattggtgactttttgtcaggtggtgatatattttttttttttttatgtttctgacacagccaccacaatctatagtatgtcttataaaatgttacctttcaagtaccatataccctttaatttgaataaaatttcaaataatttggtcgtttcaaaatcatagcttgtgtgccacacattgtcaaaatcgtgataatacaaactacaaagttcataatatttgtgggcactcaaaagatatggtcagtgtgatataagtagtgttgttggtcaggccactgtgcttgaaatgaaatgatttttttttttaactgaaaaatgaaaaaaactaaaaacaatacttcaaagatgttctgtttgctgatcaagccaagtaatgttcaccagctaagtttagtaattagtgttgtttaggttcatgtctcctactacaaatgcaaattcaaaatcttgtcgtcagactcggtttccaagtaataaaaagcctaactcgtgctcattttccaacaaaaaccaaaaccaataatcatctacatcaccatcttaacaccaacaaaatttagaattttttaaacaaacaattaaaaagcacagagcaacacacctgcatcagtcaataactaaaaactttggatttatcaatcaaaataactaaactgtcacagagcaacaacacattattttattagtatttcaaatttatatccattaccaaatacatcttccaacactttttaagctcccacaagaattcaaaaaactttcctatgtctacattacaaccacgttgctactttggaaccccatcaccctaattcctctctttcgtcttcttcttccctcgtctctctctctccgcaactcctcgttgcatcactttacattgaaacataatctgtagatattaaacaaagtcttttgcaagattctgattctctagacaaatatgcagtttcttcgacttcttacacttcttgtttcttcctacttcttcttcttcatcaacttctcctcctcactgaatccagatgggttgtctctacttgctctcaaatccgcaatcttacgagacccgacacgtgtaatgacttcctggtctgagtccgacccgactccatgtcactggcctggaatcatctgcacacatggccgagtcacctcactcgttctctccggaagaagactctcaggttacataccctctaaactcggtctactcgactcactcataaaactcgaccttgctcgtaacaatttctcaaaaccagtgccgactcgtctcttcaacgccgttaatctccgttacattgatctctctcacaactcaatctccggcccaattccggcccaaatccaatccctcaagaatctcactcacattgatttctcctccaatctactcaacggttcactccctcagtcactcactcaactcggaagcttagtcggcacactcaatctctcttacaacagtttctccggcgaaattccgccgtcgtatggccgttttccagtctttgtcagcttagatctcggccacaataatctcaccggaaaaatacctcagattggctctctcttaaaccaaggaccaacagcgttcgccggaaactctgagctctgtggtttcccattacagaagctgtgtaaagatgaaggtacgaaccctaagctcgtcgctccaaaaccagaaggctcgcaaatcctcccgaagaaaccaaaccctagcttcatcgacaaggacggaagaaagaataaaccgatcaccggatccgtaacggtttctctcatctccggagtctcaatcgtaatcggagcagtttctatctccgtatggctgattcgaagaaaattaagctccactgtgagtacaccggaaaaaaacaacacggcggcgccattggatgatgcggcggatgaggaggagaaggaaggtaaattcgtggtgatggacgaaggattcgagctcgagctcgaggatttgctgagagcatcggcttacgtcgtcggaaagagcagaagtgggattgtgtacagagtagtggccggaatgggatcaggtacagtggcggctacgtttacgtcatccaccgtcgttgctgtgagaaggctaagcgacggagatgccacgtggcggcggaaggatttcgaaaatgaagtggaggctataagtagagtccaacatccaaatatcgtacggctaagagcttattactatgctgaggacgagaggctcttgatcactgattacatacgcaacggcagcttgtactctgccttacatggtaatttactaatcttcattaatcaaccactaattatgagactaatctcaattttgttttatgaatcttggtgttgacaaaaaagagaggtttgttttggagtttgtgctcttgaaccagttgattggtgaatctgtatagatagagttttttttttgtctatattagattgtatgataatagaaaatttgttggcgtcttcttcttggtcttttctgtttcaaaatcacatgtttggtaactgttatggttccagagaaacttggatttttcttctcgtcgaaaacaacaacgtaaattctgtttttgcgacagttttggattaggatagagcaatgtagaaggtggtgcaaagattctatttgtcttagcttgatgagagaatattgttggttacgtttaagaggttaagattggtattaaggtcgtgtttaatgagacagaaacaagcagaggtcagattaagatatgagcatagagttgagatttttttccagaatttgtttgttgtttgtgatcattgatttgagaagagggttttgatttttttgtaggtggaccctcgaatactctgccttcactctcttggcctgaaagattacttattgcacaaggaacagctcgtggcttgatgtatatacatgagtacagcccaagaaagtacgttcatggcaacctgaaatcaaccaaaatcctgcttgatgatgaattactgcctcgcatctcaggcttcggtcttacacgtttggtatcaggttactccaaactcatcggttcgctatccgccacaaggcaaagcttagaccaaacctacttaacctctgctacaacggtgacaagaatcacagctcccactgttgcttaccttgcacctgaggctcgggcttcttctggttgcaaattatctcagaagtgcgatgtctattcgtttggggttgtcctaatggagttgttgactggccgtttgcccaatgcttcctctaaaaacaatggcgaagaactcgtgcgtgttgtgaggaactgggtcaaggaagagaagccgttgagtgagattttagacccggagattctgaacaaaggtcacgcagataagcaagttattgcagccattcatgtcgccttgaactgcacggaaatggatccagaggttcgtccgaggatgagatcagtgtctgagagtctcggccggatcaaatcggactgagcacgttcgagggaactcagaaagtaagttagaaatgttgcaattccgttgagtgtaaaattcatgcaccatcatgttttgcttctcaatgagtagtatatttttggcatgttgtagggtttagggatcatgatcatcatgtagccactctcctttgttatacatttgtaacggatgaaggaaagtacttgattgtttcttgggtttaacatataagccttgaccctctttctagaatatcaaatcaagtcgctttaaccctttaacaatgatattagatcttttaatgtagcattaacaatgatgtgtgtttcaagagaatacaaaacggttattagatcataaaacaggtgaataatactaatggttttagaaaccaccaagctagccaatgttagagttaacgcacagtcggttactacttagcatggtctaaaaacatacattcacaatataaatactcgtaacgaaacattgcaaaccataaaataaagaataaaagatggcttcccaaagaaaactgataatggttgtgatactatcgtcgttgctcatgaaagtagcattatctcaatacggtgtagtgatgggtaagagtatattcaaatgggaattttttccaatgatatctgtatacatcacaaacgatatcggaggtggtttggtgctacattctggttgttatactagcagaaatgggtatcgtcgtattagagacttttttccagggagtatgaaaatattcgctgaattcaggaaaacttactggggacgaactcgctatcattgtgaatttagatttggagatgaaacacaaatacatcgtttttctctttataaagatatcagagataatattgacaaatatcagtgcagacactgtttttggtccatcagaaggaatggaccttgtgctcttaattcacatactggaaaatatgatatttgttatgcttgggataaataaaccaattatatatatatatatatatatatatatatatatatattgttgtttatatgatgataataagtatatgataacaaagttaatatttgaactcatgttcattattaggcaatggtttagtgaatatgtgttgtggtgtgggctaagaaattttaccaataccacccacttacagatttagaacatgatataatacggagtatgacttttgttaattaatattggagaaatcaataatacatttcttaagtcttgaattccgaccaattaacgttattagcttttatgaaagtcttattgtaaaaaagaatctcattgacccatttgaaaattactatctcggggttgtcctaatggagttgttgactggccgtttgcccaatgcttcctataaaaacaatggcgattggagaagaacttgtgcatgttgtgaggaaactgggtggctgagattttagacgcagataagcaagttattgcagccattcatgttgccttgaactgcacggaaatggatccagaggttcgtccgaggatgagattagtgtctgagagtcttggcagtatcaaatcggactgagctagtttcgaagtaacttagaaagttagttagaaattttccaattctgttgtgtaaaattcatgcaccattatgttttgattctctatgagtagtatctgtttggcatgttgtacggtttagggatcctgatcatcatgcctctgtcctttattgtacatttgtaatagataaaggaagatactttcttgttacttgggtttaacatttaagccttgacactctttctagaatatcaaatcaagtcgctttaacataacctacaattagatcttttaatgtagcattaacaatgatgtgtgtttcaagagaatacaaaacggtcattagatgaatactaatgttttttttttgtttcctttaatttagaaacagccaaggtagccagtgttataagttaaggcacagtcgtcagttacaagctaacaccgtctaagaaaaatacattcacaatataaatactcatttaacgaaacattgcaaaccataaaacaaaagaaaaaaagatggcttccgaaagaaaactgataatggttgtgatactatcgtcgttgctcatgaaagtagcattatctcaaaacggtgtagtgatgggtaagaatatattcaaatgggaattgtttccgaaaatatttgtatacatctcaaacgaaagtgatgtggacttgcattctagttgttattttaacggaaattcgattgatcgttaccgaggattagttttaccgtggcgtaggagattactcgttcaattctggaaaaggttttggggaggaactcgctatgtttgtcaatttagatttgggaatgaaagacaaatacgtcattttactatttataaagataacagagataatattcacaaatatgagtgcagacactgtttttggaccatcagaaggaatggaccttgtgccttaaattcacatactggaagatatgacatttgttatgcttgggataaataaaccagtaatatattgttctttatatgatgataataattaaagggtgatgaactaatactggttaattttccagttgaatgatacaacgtatttaatataatcggactgtataatttttgagtcacggccgtatcaaatcggctagttttgaggtaactcagcaagtaagttagaaattttgcaattccgttgactgtaaaattcatgcaccatcatgttttgattctatatgagtgagtagtatctttttggcatgttgttgggtttagggatcctgatcatcatgtcactctcctttgttgtacatttgttatagatgaaggaaagtactttattgtttcttgggtttaacatataagccttgaccctctttctagaataacaaatcaagtcgctttaagcctttaacctacaattagattttttaatggtagcattaacaataatgtgtgtttcaatagaatgcaaaacggttattagatcataaacccccaagctagcaagtcaatgttttaagttaacgcacggtacgttacaacttaacatggtctaaacaaattcattaacaagcctataaatatatgaatagaaaacgaacctcaacgaaacattgcaaaccataacataaagaagagaaaagatggcttcccatagaaaactgataatgcttgtgatactatccttgcttatgaaagtagcattatctcaaaacggtgtagtgatgggtgagaatatattcaaatcggatttttcttttgaaaatatatgtatacatcacaaacgatatcggagatggtttggtgctaaattctagttgtcgtagtaatgggaattattaagaccaagtatttttaccggggcgtacgacggaattcgttcagtttaggaaaagtttacggggactaactcgtaacgtttgtatgtttatatttggtcataaagcacaacgtattactatttataaagatagcagagataatattgacaaatatcagtgctgaaactgattttggtccatcatagtgtatggagcttgtgctcttgatgcacagactcgagaatatgatctttgttatgcttgggactaataaacatattatatatggtgataaactgataatagttatatacaaaaaaaattactatctgaactcatgttcttattatgcaatatgtaacggtaagatctgtgccgttgaacggttggatcggtaaggcgtagagaaactcaggtaggctttgatcacagacaaactttactcggttatttgcattaggttttacaagggtaaaaatgtaatctcagagacaaggagacgatttttttaagcgttgatcccgcctgtgatgcaaaatttgaaatttgtttcgcacacgtgtgagagagccttctaccgcacgtgccagtgccttcggatttgtttcctcattataatcccgctcaggaggcgaccttgaaatattgcccagatcgtcactctccccaagaaagctctcttctctctctcactctctctctctcattgtctctctacacagttttggagtttatcaatagctttattgaagattcaaaggtaaacacaaatccatggtgtttcttcttctatttgattgcgtttatagacgttagggtggggtttaccggtgttcttgtgactcgatttgaaattggaatcgggtgatttgtgatttcattttgggattgtttgtgataacctttggttgtgttctccgtttcttgatatattattctggaaattttggggttgatttttaaggagaaatgaacgatttgatttctgggtaaaaccctagggtttcttcattcagttttgatgtttcagtctctaattgaatctatgttgttgtttgtttcagcgacgttatcaaaatgccagaagcaagagatcgaaccgagaggcctgtggattactcgactatatttgccaaccgacggagacatggtattttacttgacgagccagattcacggcttagtttgattgaatctccggtgaatccagatattgggtctattggtggaacgggcgggcttgtgagaggcaatttcactacatggaggcctggtaatggcagaggtggtcacactccatttagattgccacagggaagagagaatatgcccatagtgaccgctaggcgtggaagaggtggtggtttgttgccttcttggtatccaagaacacctctacgcgacataactcatattgtgcgggtaaattgacaagctcttttgtgttttcctgttgattcttctttgtataatcagttttggtctggcatgggttttgctttgcagcttggttaaatgtttgggatctctcttgtttgtggtgtagcacatggaaaatggtttctctgagtctaagtttccccattggtttttgtaatccttcttttgagctgaattaggaatctgctactgataggtttggtttgttaaagcgtttctgtttattattgatcatagcaggcttgcttagcctatctgtataagttttatcacatagatttgttgccttaaggcttgcttagcctggcgatttattctgttgacactcttgaactacaggctattgagagaagaagaggagctgggactggaggagacgatggccgagttattgagatcccaactcatcgacaagttggtgttcttgaatctccagtaccactgtcaggagaacacaaatgctcgatggtcactcctggaccatctgtgggattcaagcgtagttgcccaccatcaactgctaaagttcaaaagatgttacttgacatcactaaagagatagctgaggaagaagctggcttcatcacacccgagaagaagctactcaattctattgacaaagttgagaaaattgtgatggcggagatccagaagttgaagagcactcctcaagctaaaagggaagagcgggagaagagggtgcggactttaatgactatgcgatgatctttacttaggagaagagaccagatgcgatgatccttacttaggagaagagaccatagaggtatatctgcttaaaggttcctgcacagtgagtacatcatcttcttatgatatcatagatggatctacaggtcatcctctaatgacatatcttcacaagttcggtggtttcttagacttgtatcattttctgatgattttattagaagcgtcaatcatcttttgacgattttataggatactcgttttggaaaatcattgttctgatgatagaatagatcaggaatcatctgctgatgatgatatcataggaaagattataatagttcacacatttcatatctgaagtgtcatcacttgtagacgattttggcttgttgttgactttcaataattgagttgtatataagtattgaatgtttggttttattgctttgtaactgttgacatacggtgtttgcctatctctttctgcacacttgatttcgtagctaaattccaagttctgttaaatattccaagctttctatctcaatcattgacaaaaaatgttccaagtagcaaacaatttactaacaagcactaatactacttcaaaagtctaaaatcagtggagtataaattttagaggagtaagattttgactttcaagtgttaagcgtagtttcaagttagaaatatatgtatttctagattcacaactaagattcgttactctatggaatgaagacttcatatttcacttagtagaatttggacaacactcatgaacgaccagagaacataattatgtattatatagaagcaacaccaactgaatcagtaccaagaatattaacagttaaatagagaaagaagagttttttttcgaaaataaatagattccagtgtcttaaggtgccaaaatgaggagttttcaatcacccaatgacatctaaacataatgacacaagacgagaaaatattcagagcttgtcatcagttttggtgcgttctcttttttgaggttttagacaagagcaggatactgcttggactgcagcttcacccttttcttgtactcaactggatcctgcacaataatcatcaacaatcactcgacttagttccttcctatgtttcaaaacctaatattgtgtttagagttttcatttctaaatgtacctgacagaagagatgataaccatctgtctgtgcagggtcagcgggattcggtgtgtcaagtaaatcctgaataccaacaagaatctgcttcacggtgatggctggtctccatccctatggatatacacataacaaaagagagcttgaggataaagctggcttttgctcatggagaaatgcaaagaaagaaacagtagagtacttacataatcctcgttaaggatagagagacagacagttccagatggatagacattagggtggaaaaacccttgtggaaatttacatttcggaggtttgctcggataatcctcactgaagtgcatcgttaatggaaagaatccaccttcccaatcagtctgcagcagagaaacatgtaaaattagctataaacaacagtaaagattgatattagcaattgctcttgcagtaacactcttattagccatgtcaaagtaagatacacagcagagttcagtttcaatgtcgtattcaagaccaaaatcatatgcaccaataaaaaaacatcatacaagataaacaaggagatagatacacagctactcttcccactaacattcatattagataatcttccacggctctatgtgtaagcaaatatgagagaatcatcaaacagaatcacaaagaaaaagaagggaagagactggtgaagcttaaaactttgaagaactaagaatcagaagatgataaaaacaaagactttagcccaaatcaataaaccctaatttcaatctcttttttgttgctactaatacaaaccagaagaaaacaagcagaggaataagaaaactgaagaaacctaatttcacgattgatacttaccccagctttaccaggtatagtgcaatgccacaccattagattcacagttccatcctgccccgtctccggctttgccacaaaaccctaaatttcaccatcaacaagaagaaacccaatcagtaatcagagaccatgaacaatcaacagaaacccaaaacccataaatcaaaatcacgaatttggagaaatagaagacacgaaatcacttacatgaggatgattcttcctccacgatttcctctcttcagctaaacgaccacgagcgattccactagccatatctctctctctctctctctttagaatctcactctacaatatctaaatctctctcttctgatttgtctcgctcgctctccaatctctatctctctatatataaactcgaagaagacacaaataggagattgggggaagatggaatgtgaagttacagatgtacccctatgttaaagctttagaagggtaatcggagtatcgtacggtccagatttcgcggcgaataaatgtcctttcgtcctacttcctccactttaatggttattgaccggtcaattattaaattttaaccaggtataattattatctactatatcataaaataaatgaaaagacgtaatgaaaaagtcaatggataaatgtggcgtgaaacctacgcgatgatacccaaaaaagctaccaaaagattctttctctgccataacgtatcatcccatttgtcacgtggcccattaccatatctgggcccatttactttgtgttcttaactcttaagcttgctttaattattcccctcttcttcttaatggttggtctttctagaataaaagtatctcacctggcaaacatttgtcaaacagaatggtcggaaaaaaaataaaatatcaaagctttcaatgaatttttgtgtaagaatgttatttagcgaacatatattcccaatatgatagtttttttggttataaccaactttggatgtattagaaaaatggttttttcttgaaacttgtatttgaccattagaccaaactgtgacaacctctaatctcaacagcaaccaacccaatggcaccaaactcctaaagctccagtgataaaacacaaaaaccagagaggcatagattatgacttactaaccagtgacaagaacatcaaaaccacacaagatacttctttactactttcaaacaaaagtcttaataatgttaaaagacagacggatacatcatcaccatcaccaagaaaagagtcatcatgacatttttaacaatgaacaaactaaaaagagtcatcatgatatttttaacaagaacaaactacaagtcttatagaagttttcttcggtattggaagcagtttttgcaggtcagagcatgcaatcagttcttgcaggaagccttctgaagaaattgagaggaacggatggtagtttgtatctgaacctcggatgtctcagagcatagattccaatacaaagagccacaacctggaaaggtgtcacatagagaatgactgcggcaatcaagcagaacaagacgaagagcgctgttgcacgcggatcacgccagcttagcagagactgaagcctttctccttgagttgctagatcacctaccactgtctgaatcctaccagcaatactcctcaacctgtcatacctcatcctgactatgtcagatggtcgggaagtaggaaaagtgtcgaactcttcatctagctcgtcggggtgggctgagtcagcgtgagagagacgtgtgtccatgtgaggaggatgcctcggtctccaacggtagtaccagataccgatgaggaagaggtagaggaagatggtgggcaagattagttcgggatagagcacaaggatgatgaacaagagatggatcaagactgttgtgattggattcttccagttgcagatttgttcaaaccattttcctactgcgattaacccactcaaaactcccataatcctgaaaaagtttgctttgcttctccgcatactccacatgtgagaacccacatcaagcatatactcaactacttctttccttagaggtggttctgctcgggtcagcctcatcgatacaatctgagtcgcttgatgcctcaagttatcaagctggctaaccgtcagtggatggatataatgcatcttcggtaagagaggctgtgagtacatatacatcatgttgagcaatgaagagcaagtgaatctcacagctaagtgaatttctcccattttcttgactccgttaggatggagcaccaaaagagggtatgaatgtgtataaactcgatcagtctcgagagtagaaagcctgattcttaccttcccgattcttgaatcttttgctcctccaatcttctcacctccatggagatggcagttatcaaaaactccaacagtaacaacggtgcacggatcaaaaacctcccaagtatattgctcattccatcttggtgtaaagctgtcaatgattgtccgagttcgaatccatttctgtccgtacttcgccacacaatatgcatctgtggttccccggccgtctttggttttcataggcatcagacctgtagcattcagtatccccaactccagtacaccgatattaggcttccatagttgcttcgctgttggtctaagatcactgctgtaatgcgtagactcatcgagaacgtgataccctccttccaaacatattctcatgtgaatcctgctagcgaatttggtctccttcttctctccatcgaccataatatgcttctcgagattgtaccacctgctgttcaccggtttatggtcaaatcttctgtccaaatactgcaacgggatcgcacatctccccaagacttcatctttgtttggagcaactctatcttccacgctgaggatcaaaggttcctcaaatggctctgctgcgacaaacatcaaatcctcattccacatgggattaatagtcctgctctgcgatactctagtcctcaacgcctggtttcccactatagccttcacataaacctcgggatatctttgcttatcagttggtatcaaatcttgagcttcaattacattaaccctgaggtaccaaagcttaggagaaagataaaccttggaacggatgttggcaagagcatcagtaccactaacagttgcagcatcagagtgccaagcttcagggaaagcttcatcagcttgagtaccaaaccaaacagccaacataagctctcccttgactttatcacctttcctatcctcgagcctataccattgcggagccaagggactatcaggaggaactctcttaggtacctcattcaaatcaaagacaacccgaccaatcaaatcatctttgacaaaatccttgtccttgacagtagcttcaaggaaagaagcttgaatcctatctttagaaaaggcgaaaacttggttccactcaggattagatttcttctcgaaatgcctagtggtgcctttgtagtttccaagcttaacctcaacataagggtcacaactaccagtcatatccttgccaggtaactcctttgccttaaccacacgaacatagagatactgcatttgctcaacaaggtcataagtactggtaagcttatctccagagagttttcctccacctagatgaggtctcgtctccttcaaggagaaatcttcaggaggtggtctctgcatcttgcaggctttaagaagacacactaaacaaagtttcctacacagttccaaaaccacaaaaacgattattaaacattcatattcaatattagcttaaaaaagagttaaaaaacttactagtggggtttgtcgagacaactaatttcttctccacttcaaaatcagtaaatctgagagaacacaaccatttcaaagaaagctaagtgaaaaaactcaggttttgggtaggtgatgaaaatgcagagaaataataaagttgaaaaagaatctcgaataaagcatcgtatattttttttctagatcttaaacaaaaaaaaacctcgttagtatctccaaggcagaatctaacggcacaaattcatgaatccaaaaaaaaaaaaaacatattcatgaagcaacttcatcgagagaaaacatacttttttcttcttctcggaaacagaactaccaaaaagacaatgaagcaacgcgaattacgctgtgggtgaagattttaaaacccaaatttccttcttttgtttctcgatttcaatgagagacaacaccaaacacagaaaacgacagagagaaaataaaaccatggaaagggaaaaaaagaagaagaagcagagagcatgcgagttggagaaaatagccattagagtaagttacaacgaagagaaccctctactcaataaaattctcaaaatacatggaatagcagttagacgaagattaaaaaaaaaaagggaaggtaaagaagacaaaccttagatcttgagagaagaatggatcagaataagagacccggaaacgattaagacagtctcctctcctcctccataaataaatactaaaagaaagagtctcctctcctctcttcttcctcgtttttttcaacccaaaattaaatttataaaaaattaaagagagaagaagacaagtaataaaaagcagaggagaagtactgggaaaagaaagttctggagagagtaaataaacattgaagaagggatttgtgtgtgctctctctcttgtgttttattgtcgtcgtcttcttcttctgcttttttctacagtttccttctttttttaactcggtgaaatacaaaaaaaagagaggcactgttgcataccaaatcgaggtggggtccatttataaataaaaacacgcaaagacatacttctctcagttttgaaataccctacattacacacgtgtgggagacgacggtcctgcgtaatctttcaacggtggtcaaattttacaaaattataataatccctcttattaacttactaaatatggaattttagcagacaaactattgcataattgtgcaattgatctggccactcaaaagaaatgaaaaacactatggaattgaagaagtcattggattcctcatcctcgagtgttttgggtgaagcatacgtacatttatacaaaagccgtgttttgctttttgctggaccccgttactattttttgttaatttttctggtcaataacgaaataaataagttagggggtcccatttcgttttatcttgttgtctgtctacataagtatttttattttatctttctttccttcaaaatttaccttaaacgtctaaatctctatcacgatccgaattcataattcctacatttatgtgttttatctatctagacatgtgcatgctttttttacttgatataggatttttttatcttcgtttatccaaacaaacaaataaatggtcactgcttttgctttttaacaagtttttattttctgtctatgtaaaagccatcatgattcgtttaggtgaatcagaagaaaataactctgggtaaaattccaaaatgtatactatcaaatggatatagatagacgacaagttttaaacgcgttagcgaactcttcttgtggctttggtattttagtttattaggtataaaatggaaatcatccacacttcggagcaattgttacaaaaatgcgattatctttctaccgactaatgttgggtagacataattagtttacaaaatgttctttttccatttgtcaccaaagttttcttcattattttatgaaacaagacttgggcagttggacatatatactatattagtagttaaattgcatatgtttgatctgttgatttgtatattcagttcttaaactaaataacaagtactaactatatttcagtatttgtatataatcatttagtatcgaaacggtctcgtggtcgtggcacctttaattgctgagagggccgtcttttacttttcgttctagctttatgatgtgccaccgagtagttaagagaatgcttctgctccaagtattttgacataatttaatcaaaagtattagctactttacacggacaataatctaattttataattagagtaagatagaaattaaagaagatattggtagtcgttgcaaatgacacgtgttgatcatgctttgctcgcatttgtatagcttcgacttgaaggatttcagtccaccgtacgtttaccacgatcgagtcacccactacggtcataactaatactataatttgataagtgtaataagaagacaaatgataaaaaaaaaagaagaagacaaatttgctaagatgacagtttgtaatccatatcttatcacatctacaagagagatatatacaactctttttcttaagagatgattaatgcgttaaacaagtttaaccagttatcaaaaatatgtaaatcttttctccagaggtttaaagacaacgtcacggtaattgtttcgtcgaaaaatgactattttaaactgtacggttcatggtcactttttgtgtatttacataaagaaaaaatattaaattttatactcagaattaggtatgggcacgaagcggatatccggaaaaattatgatatttgttattcgattcgttttaaacgaatacttgattttgtgattcgctttacttcgaaaatttccagatatccggaatttcgaatatccggaattttttgtgatatttgcggatatccgctttgatacatttaaatattaaaaaaatatgtatactatataactatatcatatattcaaaaaatttatccgtgcgttccttaattggtgtctccgtgtgcttttaaaataagttctaaataccaaacataaccgttgttggtatcaccggtcaacaaaatattatcaaactaattccaaaactaaaacccgatagttttttgatgccattgatcaaaacataacataaaaaaaaatgatcaaacaaacatcttaacataaaaacataaaatgacaacaatacacaaactatttatgatatctatatatagatatactatattttctaatatatataaaaagatacggatcgaagcggatattcgattttttaaaaaacaatatttattatttgattcgatttttacgaatactatatttttctatttgctttgctccaaaatcttacgaatattcggatttttcgaatcaaattaaatcaaataccgaatcgaaacggatcaaatcaaatcaaatcagaatattgagctagctgaatgaatgagataacctaagaatccaaaagttgatagtgttccctttccgaattccaatagtagcttgataacatttatttaacggcgataaattcaaccgttagtttgattaccaatcaaataattgcttgcaatagacggatgaaacgagtggtaagaataggtgattgaaacaaacggttaaaagcttaaacaaaataggtgagtttgcaacctctcttgttcaccattggaatattttagttatttaacgtttcttagatttttaaaactgtaatgtatttgaattatttactaaagagttttgtttttctttgttttttaaatatttttagttatttattaaatattttaatttagttttttttttttactgtttaaccgtttgttactaatcataactattatttaacggttcattttaaattatttatcattttttcttttaatatattttctaaccgtttttttttatcagtcttttttgtaagtgttaaataaaataaccgccttatttaaacgatattaccaattggtttaattttaggttgttcatcttttctaaccgtttttttctacccgcctttttctgtaactgctaaaaaacataaccgtctcatttaaacgatgtttacccattgcaaaccattttccttaaacaagcggacaatatttaaattgcaatgaaagcgagttatgagttcttttggcctaaacttcccaattttatctctctttttcccactaatcttctaacaattttaattaacagtgacaacttacaagtacttaggtaaccaagtatatttccctattgtaaaacctaattatgagttgtgatgatcaccttttctccttttgacgaacgcttaggacctaacttattgcaacaatggcctaactaaaacttaaatgcgatttgcattcaattctcaaatgggcctctttagttaacatgttatctccgttcatctgacgtgtcatagctcagatcaaaggttaatctactcgtaaatccaacgaccaaagaaacgaagcgtacgttactaacatacacgtgcacgcactgtaaccatctctctctctgctcttctccttcaatgaaatgattcgtcacccaaagaaagatctgcaacttcaccaccggaccagtctctctctatctcttctgtctctctacctcgcgcgacgaatcaatcatgactgaagaacaagacctcatcgaccaatcaccaccaccttcagcacccgaccctgaaccaaactcgagcacgaatccgaattcagtaatccatccaaggcgtgtgtctttcgagcacggactcctcccgatccagaaactcgttttcaccgacccgatccaaaccttagcccctgtcaagcagaagctagccgatgcggcttcgaataaccgcgttggatcggctgcaatcgccgacgttctccagatctccggcgaccatgcgcgtctcgttctcgagactctcggttcggtgcttcattccgagtctgaccctctggttcgggcgaaacctgaggaagttgattccgtcggagctgatttgcgggatcttattttgttcctgtacattcaatcgtataagaagttgcttcctaggacgcataaggactccgcagcggtggctgatgtttggccatcgacttcagcttttgatggatacttgtctgcgttatcgccaattcaggcaagtttcttactttttttggccctcttattataatgtgcctcaatcccagcgcctgcgatttgtttggtattgaaatggaactgttgtactcgagtatggaattggaacgtggtagagaataacttatttccatttcgcattgtatttaactaaaatttgcaatgcaagtttaagttttctgagtcatttgatttacctgaaacttagagttaagcaatgtcggaaatttgggtgattaattgaattgatggtggctatagtttcgtaacaattctcaatgaggaagatgcttacttgtatttaattgccagtcccctttctctgatgactctggggcaatggtaattggttagtttactaactaaagtcaaacagtcgccagcttgctttgttttgtggttcggaatctgattctttttccgttgtaccttattttgtttggtcctttcacgtggtttatttggtgataatgcttggtgtgttcttgaattttgactcgggtctccagtcctgtaatattctgtttcctgtgtggtatggatgttctattgagtcttttagaaaacagtcatataatcttaagcttttcagtgttttctacagtcactgttctttggtattctatcgtttctcatcacatgggtcgaaccaactttattggagctaaaattgttatttatatctccttttcatcatttctgcagcttgttcgcagcaacagccgtcgatttatgccatcacaggcagatgatgaagctcatcagttgtcatatctgcaaaaacatttagcaaacatcatttctctccttgcagagcctgtggagggagaaggagatgaatcattggtaagttctaatctttcttatattctcagggggtgtcactgttctaagctacaagaatataaaattctgatgttggaataagaattttttaggaaatgaaagagaacacaagttaattttttttttcttgtccaatatcgttcaggttttctctatggaggcgttcgagcatctgcgttttcttgttcagtttggtgataagggatctgatgtatctccattgagccaagctactcctttttttgcaaattctgatccggatatgcccgctgttccagtccccgcttcccaagtgcatgactggcttctgcaaaacatagcttccgctttagaaagcattactgagagaatttctggaaaagagaacggaccttctaacgatcaagatgatgcgatgtcagatgtttgtgctgctccgaacaaggttgcacctagtactagaggcccgtgtttaatcgagggagtctccaagacttcacttgttaagcaagcctccgatctaaggggtagatctgtgaaggtctgactgttccttgttccgtttttcttccagtcatggaatctctgtgcaagcatgtcaactccttgttttgtgtatttttcaggttgtcaattgccatgattctgtaatttatcttttagcaccattgcgatatgcaactgtgcacggatgttctgatactactatagttttgggagctgttggcaaggtatggaaacaatgcttcttccttctttatcttttctgaagatagtcaaagcaacatttaacaagttataatatctgccaacttttattaaaagatgtatcaaacataattccgtatttatttctgcaggcaataaaagttgagcactgtgaaagagttcatgtgattgtagctgccaaacgagtgtgcattgccaattgtcgtgaatgtgtattcttcttgggagtcaatcagcggccacttattgttggtgataaccacaaactgcaggtgaagcttctctttaagattgtggtttaatttacaagttttatgtcatgttgctcttatttacctttctgatattaaggtaaaaaaaattgagtggctagactttttactagatttagtttggttagtttggttaataagccgtttcggacacgtcatcaagtctagtggaaacaaacttggaggggtggctagactgctgctagatacgtttagtcaaatgttttcctcaagaaggttttactggtttttaagagtgcgggcattgtcagatattgcttctagtgattatgggcttctatttttaaagtgctggcatcaatttgactttgtttcaggtcgctccatataatacattttactctcatttggaagagcacatgagggaggtagggcttgagccaacgatcaacaaatgggacaaaccattggccctgggagctgtggatccacatgactccctgtcacatcctgccggtgttgctgatgcacaggctgaatcagctgcttctgtagaccctgaccagttcgtaaactttttggtacattttctatttgggtctaacatttacgtcaataattggtgaatgcttttcagtgtcatgaagcatctaatgacgtgtttttcggtggtatcaatgacaatggcacagatcccaaactggtttagcggcgcggagcttggttcgacgaaagacaatccatttccattgccagatgcttatatggcagctcagcagagaaacgtatgttttaaagttatacttaaccagataaacaaatgcatttgttatttttgtccatatctgatcttgtatctgcaattttttttgtcatcagcttaagaactttgaagaaacaagacgatcgttaaaagaggcgcctctagaagaaaaccggaaacgagagctatcaagtgcactccatgtttatttcaaagactggctttacggtaagaaaactttctctgaatcgatccctactttactttattgatatgcatcattcattaggttttgacttagtctatgtttttgttgcgacagcatctggaaatataaggcaactctactgcctacaaggtgactaataagaataatagaccaagcggaaagtgtcttgttcatgtagagctccttcgatcatatttggcatattgctagtgaagaaaccccaccccaagaccaaaagaaaaaagaaaaaagagaaatcagcctgattcagtgatttgtagtttggaaccaatacttcacaacgtaacttatctgcacagaaatactctcttaaagctttcgtttagattattgttttcttgatttctgcttttctttccttgacatttcaatccatcgtttttgttcccttctctattgaaaatctcatcttcaaatagagcatgatgacttgaattgttataagttataacttgtaagcaaaactgttttgatagatagtcttgtcttggtcaaatagatttaagtggacgcaagagttaggctactaccatggtaggtgcaaatttctgaagaagttttagagctccaaaatttctcatatttgcagaatctcatattcgtagaaacatccaaacaatgcaacataacatgaacatctcaagatacaaaaacagaaggacatgggatggaacagagatatccatgagcgcaggatccagctaataatgagttcttgctactttagtcattgtaatgtgtgctccattgaagaaatctctcttagctctaaagttctgcaccaactgttcaacaccaatgaacacctccaatggcagcaaaagtcagcccgtggcttcccatcatcttcaacgttctgatgagtcctggaagagcaacgtttctttcaatacgagggacgtctttccagttgcaaaaccagtcacagcatctttgaatgtcttcatcatcgctccattttcctcttccaagtatctcatttctgtaggatccatgataatttcttcaaccgataaagcttagtcctttttatgtcaaacgtgatctaacaaagaaaattggcagcaacgacatagtggagaacacagccaaatactattattattgggcctaattaaagcccattaatgattctctttttttttttgttgttctcccttcctctcagcgcgaacgcaagctccgtcggcaatggcagaatcgacgagaaatctgactgggcttggaggagaagcagcgaaagaagaagatgatgagtacatgggagacctttctcagtttattcctcaggaacttagccagacctccaaaagaaaggtatcttcaggccaaaattttcatcttcttatgtccacaattgtcaagctcctgaatccaaatttgtccaactgattttgaataatctccaacaaatttcgtttagtttgatagctgaatgagattttgggattatatttaaattcgtatataaatgcttttgcaggaatctgagaagaaaactgtaatcgtagaaccatcacggaagaagttaaaaaatctcaattggcacgagagacgaagattggagaaagagaggaaacagatagaagaagatgagcagacattggctcgtatagtagacactccaataggagagtctaacatagggtttaagctattgaagcaaatgggttacaagccaggttctgctcttggtaaacaaggctctggtagagctgagccagtgactatggatattcgaagatcgagagccggtgtgggaagagaggatccacataaggagaagaagaaaaaggaggagattgaggctgagaatgagaagagaaaagtggatgagatgttggaggattttgggtctagacagaagtctcaatggcgtaagaaaagagttttgattaactttaggaaggctaaggctgctcttgatcaacttgagaatgtagaagttgttccggagaagaaaaatgaggaagatgaagatggtaagcctgatgaagaagaggaagaagaggaggagatcactgaagaggtatgttctcctaggaaacaagagttggaacttttggtgtctttcatctttatgagtaatgggaccaattgattagagtttgagacactgttctttaggttgacaagtttagttttactggttgcaggatttgcaagaaatattaatgaaactgagagctgaacattggtattgccttttctgcgggttccaggtaactgaatgctttgaaatcttcttttatcgatgttttttctgaatcttgaatgttgagtttgtgtaagtatacactaatatgaaatttcacgatatgtgaatcagtatgaaacgactgaagctcttctatccaactgtcctggcgtaaatgaggatgatcactagataagccacactagtatggaagcacacaaacacaatccatgtctgcagaagcttcaggttgaaaatttcctgatgtggctgaagaggaagcaagatacagaaggaagactgtgtttgcagttgaggtacacacttagaatcttaaggacttgctaattctcatgcttttaaatagatagtaggatgataaaagcatgtggaactctgatttgataagacaatatattgatgataatgttgatgtttcaatttgatctccaagtatgtaacctgagtttctgttggatgcaaatcgtaaactatcgtagagatcatcaataaaaccaaagttcttaaaaagataaaaagccatgaaaaaaacatccaaacggaaaggcattatcgggcatcattgcctggttttaaagtagcacacaagagatagttgataagattttagtaacaaactgatgaagatcttaaaaggtgaaagagattagactcaaagagaccaattgaaatgttgaggagaggagtcataagctcttgtgttctcgggttccatgtattgcttcagaacctgctgatgaagatacagctcaaatccacccattgtggtgccattgcttatctggaaatctgctggctccgagatttgactcacaggagacatataatgtgaattgctcttttcgcccgcgatgacttcccaagtttggctgaggtactgctgatgtgttgagatgggcggctgatgggttgaaatgggcggtggctgagccattgtaaccttatcggagaatgagatcatcgagtcgaaaccagaagatggtcgccatgtatttgttggtgtctgaagttgctgctgatgaattgggtatgagtttgacagaagagagagagcacagcttgaatctgtgctattgttgtttatcatctctggacatgtagtaaagcttgagcttccatgtgataaaacattcatgtgtggatgggtttccctaactggattaatctgccacggtccaggccgctgcatcactgatcttgcggttgaccacgcagtaggatctcccaaaacgcttttaatcattgcagcattggggtttcctgacacacaggaaattcaataacttgtttttgagactcattgagctgaaaagggctgtgtatattgggatctaaccgtaaagagatggagcgattcgagagtaatgagaagtgaaaagagccgttgtgggttgtggttttcttcgtcgttcgttatgacaagcgagtcttctgcgacaacttcttttctccaagtcaaactcagaaagctggtgaaacctgatttgatataaagaaaagaaagcttcaaagaaaagcaacctaaataatgcataagacaagagacaagaccacataataactagctgtaaagtttaagttttgataagactcttcaatgacgttaagagccaaaactcaaaaagctcaaaaggaacataaaacctgaaaaaagcgtaaagctatggttcccttagaactattccgatcaccggaaatggcaaaatgagtaaataaaaggaagaagaaaaaagggggaaacctgctacattgttgacaaaacctttgatgaagaccagagacaatgactttagatgatttagagtgaatgcaacaaactttgtgtctcgagtaataagctttaacattgcttagatccattctacaaccttccacttggcacctcgccgtggtagacgacttacgaacggtattgacccggttcttgcttctggatccggatccatcctcgaagtagatcttctgaccaaacctgagtccaccactgagtgaagaagactcggtggaagaagaaccacctgactcggcctgacccgaacacattaacaactccattatggttttggcttcctcttactcagacagagaaagagatgcttctgctcatcactctctttctttctaagtactgaactctggaaatagtaaggacggaggagaatagaggaaagaaaatgtggttttgcagattttagatgttgctatcttttaaagaatcagagagaagagaagagagagaaagaaagaaagagaagctgacaaaagaagagacactcaagagtgattgacactagtccacgacagctacgtgtttttagcgtttgcgttttgggatgttggtgcgttttggtggtttttgtaacatctgaacaaataaacacaaaagggaggataaggatatttttcttctttaacgtacaaaatgatatccttaaacgagaccagaccagatcagggaacataactcccatgtaaaaatctacagctaatttattctaattattgtatactagttttatactactaaaatagtctaatgatgataaaatcacaaaactattgatctttattgtagtttgtaaaaatatgaatagatcacagacctataaatggatggctatttaactacttctaaatactatttctaattaaagagaaacaacaactttattgctcatttttaaaattctaaagtagaaagaattgaggattatgggcagatagaccagagtgttggaactcaactaaggatgtgactcttcaaaggaactagaaggttattgaacactttttgagtttagttctatttttttttctttctaaaaatactttagtgattctttttcttttaagcaatgagatttgttcttcttcttctcaccatatcctatgcaaaatctttcttgataattgaacaaatatttatgcaaaaagagagtatgggaagttcgattttcacggtcatgtatccatcagaaattgtgtacttgaattttcttagggttgtgtgtatcagtttgatattattccttttactttttgctttaagttcctttgttttgatttccaaaattctacaaaaatacaacctgaaaaaaggcctaaagccccccccccccactaatctggcttgactatcacaaatcttcttgatatttcttcctacaatgaaccttttctttttcgcttttcacaacttatgactgtttcatttttgcatagccgtcaaagagcatttttaggctccactttgttcaaaagaaagagtgagtttcagaacgccatggaaactaggagggaagagcaatatccgaaaaatcgaagttttgattccatgtaatgaaaccagaacgcacccgcatcaaactcgggtttataacagcaaaagtatctaacaaaaacaacaaaaaaaataccaaaaaggcggtttcaaaagcgttaagaacctcttttcaaaccccattacattcaacaacagcttcagcagctcgtcttggtttgttcttccttctgctcccattctgcctaaacccaatagacgacgatgatttcatagaatcttctgtgcttgattttgaccctaccccattctcttcttcagttatgttgctctctttagactccactggtttcttcctcttcctcccattctctgtcacattttctttacttgttactgaaccatttgtatcatcatccttgtcttcttcctcatctgtcttcttcactagctcttcttcttcttcttcttcatctttcaccggcttctgtggcctccctcttttcctaaaagctggaatcttttcttcctcgccgctccctcgatcttctctagcagtagcattctgcctcttgccttttcctctacctcttctcataactctattcaaaccaaaaaccaaaaacctcaagcaactagacaagaaacctgcaagttgaaaaggttgctttttaattaccagtagtaactcatacctcacaacaacacaatgaaggcgaactaaactcaaacactatagaaatttgttgaagaatgcagactaaaaagtgtgaaaagcaatgtcatttttttcgatatgcacaaaagtagaggatcattcaaactggcagacactccatagaggaggaactattcattgaagaatcaacacaagcgcaatcataaacacgaaagcaagattccatttttttcatgcattagaagcagtgcattgaacaagttatttaacaacatccaaatacaaattctttccaaaaagatctgaacaaaggaaacatatataagcaacacttgagtcacgagacattaaacaatttcatctcttaaaaacctatcctttagagctcaatagaaaccaagaactaagctacaagcaagttcaatcaattatcttccacgaaaactaattgcatgaacagtctaaacaagaaaacaagccctagtttccttacaatctcttcaaaacagagagacagagactcacctgtgaacccattggtcagactgagacaaaaaccccaaaaaacctataaagggtttctctttttactaatttatagttgggttctcaatcgatctaactcacgagtttctacagctaaaacccagatcagaggaaagactaagagtctaaagaaaactgaccaaaccaaacggaggaatcaaatcgaataaaaatccaaaggataagactcaagttaaaagaaagagatctaagagaagaaggaaggaagaaaacgaagagaaagagcaacagctagagtactagtgttggttgaaaaagattaaagttgattgctttcaaaaggcttctcttttctttgttctagcttctgtctctgagtgaaacttaaaagaaaaacgtaagaatgacgctttttcttctcactaccatcactgagactgactaaaatggatcttaagcccgttgaagatggatacggatttcacccacgcgccccctttttggcgcgtgctttcacattctactcgttttcgaactcgttgggttcggttggataagagacgacagctaatagccgcgtttcatccaaacatttcaaaacactttccacgggcttcttcttttcctttaacgtttgggctttggcccattagagttcactttatttgttatctctctattctctctatctatatactaataatattctatatgtcaaaatcatcacattttgtaattcagcttcatcagctatataaattgaagttacatcgcttcaaaattgttttcaaaaacattcaacaaaggattttgtcaccagactcaccactaacaactacaaaaaaaactaaaagagagagacacatatgattcttcccgggcttcttcttttactgggccttttatgcttatgcccattagagttcactttattgaacccgattttatatgaatagtggcattaaaccatttcggtctagtactcggttatgaatgattcattcattgagtaagaaggacaaaaaggtcaaagcagaaaaatcataatttcttcggtcctaaaccctactcaacaatttagaaaccctaagttctgttccggtggtccttgttatttttttttattttggtgttgttcttaaaattcagttccaaacggaaattgatttcttcgtcagttgcgttttttaccaacactcgaaagcagaacccatattttgttattgaatttgggtttttttttgtctgtgttaagaagattaagtaggaggaagaagaagagctagttttgcgagaatgaggaagaaggttgatgaacgtatcaggactctgattgaaaacggtgtcaaattgagacaccgttccatgtttgtaatcattggtgacaagtctcgtgaccaggttctcgaaagttttctacttggacacttatctccctgagagaatgttttgttggatactaaatcttcaaccttttttttttctctaacagatagtgaacctccatcatatgttgtcaaaggcagttattaaatgtaatccgagtgtgttgtggtgctacaaggataaacttgacattagcaggttctgttcttaatcccaaattctcaaggctttagatgattctcttttagctcattttatgcttgtgatatatatattgagaatttagctgggcacaagtgtagaatggaatgtgaaatttctgattgtcctttgaataaagaagatagcttttttcagtaatggtgagagtctgtatcgtttgtttgcagtcataagcaaaagcgttcgaagcagctgaagagattgagggagagaggacagttagatccagagaaacttgacgctttctcgcgtttgcttgatgttggaagagtcactcattgcttgtacaaagattctgaacgaattcttggaaatacttttggcatgtgcatcttacaggtacttttcttcttatttatattcatttaggatgactgccttatgtccctgtttcgttttgtgagtaattgttactatttcttcttgataaattcaggattttgaagctttaactccaaatctactagcaagaacaatagagactgtggaaggtggtggtttggttgtattgatattgcgatcacttacatcgcttactagtctatgcactatggttatggtatgaaccacagtttaatttcttattttttgagtaagtgggagaaaagcattatctaagtaatgtgacatgacttttttttattaggatgtccatgacagattccgaactgaatcgcattctgaggctgccggccgtttcaatgaacgttttctgctttcacttgcatcttgcaaagcatgtgttgtcatggatgatgagttgaatattttgccgctttcctcgcatatcagatctattactcaagttccaacagaaaaggtaattcttgtagcaaattgagagaatgttatccaaagttccaggtagaattgataactttacaatgttatgtgctactaaaggattccgaggggctctctgaggcagagcgggatctgaagagtttgaaagaagacctaagtgatgattttcctgttggtccgttaatcaagaaatgttgtacattggatcaggttcaaagctatcaattttatgtcttgctaatgttctttcttgttgcatggttgatattaaattgtaggagattctgcgttttcattttgtagggtaaagctgtagtaacatttttcgatgcaattttggataaggctctccgcagcatagttgctttgattgcaagtcgaggacgtggaaaatctgctgcacttggtttagctgttgccggggctgttgctgctgggtagatttcttgaattaattttactatatgttcttctactcatcagtattaatttttctggatgtttgtgagaattattgatgtgtgatttacttgctcttaggtactcaaatatttacataactgcaccaagcccggataacttgaagacattctttgagtttgtttgcaaaggctttgatgcacttgaatataaggtaatgcaaagttcttttcctacagattatttttatattgtatttgttctatttcattgagaagaacctgcaaggtgagagacatatgcatagttattgagataattattgaatagacctacactatctcaaggatagaagaaatcattaaaccattttgcgatgtggtcatatatggttctaaattacgttccattattatttttataggagcaccttgattatgatgttgtgaaaagtgcaaatcctgacttcaaaaaagctgttgtacggataaatatcttcaagcagcatagacaaactatccaggtttgttaatccctcaattaattcatgatcttcaagctgtgatttgagtccctttccgacgtgttccatgctcttgatattttttatgcagtatatacaaccacacgaacatgagaagctttcacaagtagagctgttggttattgatgaagcagcagctattcctttaccagttgtgaagtctttgcttggtccttatctagttttcctatcctcaactgtcagtgggtatgtgaaactggatctgatgctattaaaaagtcatatgcatgttctggttttaattcagggataatcatgctactgtatgttacccatttttttgtttttatgtttaaagctatgaaggcactgggagatctttgtccctgaaactcctccaacaattagatgagcaaagtcgggctcctgctactggtcttgaaggctctggtatgtaactgctgcaccttgctttcattcttggctatgaaaatgattagggacattttttagagaccgctctatcatccttcagaggatagactcgtttttcttagaatcatcgctcagatacccctatttattgtttagagcttcgttttcattttttcccttaaagaggcttacaaagattaatctaaattccatgcaaagtagcccgctttactagtgtctgatgaattcttcatatgtagcaacgctaattatattcgcaggacctgcattttgtggcagttctagttaatgtgattcattcccctgattctctcaagtttcttcggacaggttgtcttttcaagaagatagaacttactgagtctattagatacggttctggagatccaatagaatcctggcttaatggcctactttgccttgatgttgctacttgtctgcctaatcctgcgtggtatgaatttttaactaaaattttatagtgtctactatcctttctagtgttactgattgtctagaaatgttttttatttgatttgtcttttctttcttctttttgtgtagccatccttcgccaagtcagtgtgatctctattatgtcaaccgagacacactcttttcttatcacaaagatagtgaattgtttctacaggtaaatgtagttgattgagatccgtacattattttgacaatagactgatataagtgcatcctacagagaatgatggcgctatgtgtctcgtctcactacaagaattctcctaatgatcttcaactgctggctgatgctcctgctcatcatttgtttgtgttacttggtatgctgcttgtccttttcccacacctaatttaattttcagaactattcctaactgcttttaaacgcaggtcctgttgatgagtcccaaaacaagattcctgatatactctgtgttatccaggtatatttttgcttatcctgtgctcacattgacctagaacagcgattcatcagtcttcatcaaatggactaataaagattaaagtatcagctatcagtctgttataactgcttttttccagtttttgtcgaaaatcatagtttctctagcttgtgtccttatttatatgtgtgattttaagcatcattgtagctgttatattcaggtctgtctcgaaggaaagatatctgagaactctgcccttcaaagtttaagggatggccattcaccatacggagaccaaattccatggaaattctgtgaacaattccgggacactgaatttccaggtttctctggtgctcggatagttcgcatagcagtccaccctaacgccatgaaggtatttatttagttctgctcatatttttaattgtccagttaggttctgtgtgcgattaacaagcttctgattaccctctttgtagatgggatatggttctgctgcagttgaactcttgaccaggtaaattcatggaatgtgcatacaagtttgtaatgatgttatctcatgcattacctatagcaatgttatatgttgttcttgaaattttggactttgtactcttaattaggtgtggtcattctcttactaatactgattgatatttgcagatattttgagggtcagatagctccaatctcagaagctgaagataaagttgatgtggagcatgcacccattaaagtgactgaggctgctgagaaggtttctggtttttcctatatatctatttatgtgggctttggttgttacttagtgcagaatctgcttcttttttaagtttactataatagttatttctctgtttccattcttatctgaatccatttttgacaggtctccatgctcgaggagcaagtaaagcctcgtacaaatcttccacctctattggttccactccatgatcgacgacctgagaagctccactacattggtgtttcctttgggcttactttggacctcttcagattttggagaaaacacaattttgcgccattctacgttagccaaatcccagttgagaatatttccatcctcgcttatacaaatttcttttttaatagttgtttgtaacacttattatctgtgtttcgatcagagtgctgtgactggtgagcacacatgtatgcttttaaaacccttaaagaatgatgaactagaagtcaacgagtccgatgagttgggattctttactcccttctataaaggtttgttgattccttgatcaagaactgaactttcactatcttccaagtatctcataatttttgttcagatttcaagataaggttctctaagctgttgagtgacaaattcaagaagatggactataaacttgcaatgaggtaagcaataacatttttctgtctttactttttgataacatcgatttcgtataattatttattcgtgtcatattattctttgtccagtgtcttaaaccccaagatcaacttcgccgaggttgattcttcagggagttcatcaggtggatttttgaagacactcaacggcatattatctccgtatgatatggagaggctcagagcatatactgaaaatctgactgacttcaatctggttagatttcttctttcttttaagaatggtttacttttgaaaatgtctgtgaactaaattgacatttttggtaatgattctcttggaaccaaaattggacgttgaaatggtgcagaagtaaaaacatatgcctttgttgtaaactgctttcagttctccttcagtttgtaacctgtttcattgtcttatcgttgaaaggtttatgacatctgcaaaacgctggcacatcagtattttgaagagaagctccccgtatcactgtcatatgttcaagcatctatattgctatgcttggggttgcaggagacggatttctccagcatcgaggtaacatgttttactctaattttgaagattgcagccagctggttcattatgtttcaacaaatccatatttaataaacatgcaaacacatttgaatgtttcagagacaaatgcagttggagaggggacaaatacattctcttctcctgaaggtcgcaagggagttatacaaatatctcaatggagttgcgggaaaggaaatcaaatcagctctccctcgtttgaaagaggtaacttcatgttattcattactttgtaattggtcataatagtttacatttacgaaaccaagaacaaagtttggatagtgtgcagaaaacttttagttcaaagtcttgagcattcctgagagaataagaataactaaaagtcgctcaagctgtttatagttttgtgtttgcaattgaacagtgtcatctgttttgcttctagagttgaatacttgtaaaaggctaaattgctgctcatggttgcagagagagcttaccgctcacaatgtatcagtcgacgatgatatcagggaaggagcaaaacaagtcgaggtaatttctcctaccaccctgtgccgtgaaaaatgttatatgtgttacttcggttataacattgtatgaaattgtacttctttcgtctttaaaggaacaaatgaagaaggagaagattgaaggattaatggattctgagcttcaacaatatgtaattggggataaagaagcagaggctctgcaacattcaaagatctcttcaagtggtattatcagtgttaagtctaccaaatcagagaatgagaacgggtttgacaaatccaccaaaaagagaagcagtgataagcgttcctcttcttcctctaaatccaaatcgtccaagaagagaaagagcctgaaggagtgaattttaacaaatgatcaaatctgttttgagcatgataagctatgagattttgttttgaaatcaaaaattttggttatgtttgttgtaattttgagttataatgggaaaatagacgatgatacggctgaaaaatttaaagcaaaatcatagatgtttaatttcatacttatgtgtttcgagtcttcaaaaaagagagatcagcataaagagatatgtcattttaaactggtccaaatctacaaaatatattgatgttaatgcaaatatgtaatgatggcttggatcgagtcagagaaggtggatacaattgatgatgatgagcgtaaatgattgaaatttgcaagtgatatgatgtagtgaaagattttcaaatgattatatgatgatcacttttatttaatttcttctatgactttacaaactcttctatcaatttgcttctcttagttatcaaaaacaaaaaaaaaattgctatcaactatttcgcgtgtatataactttgagtgtatgggtataacgtactaccatccatttctattgaatgtcgcaattttagattcctattatatgtttttattcttgaaaaatggccactccacgattggatttctacttaagtaattgtatattaacattcacaaaataatacttaacctatgctgaattgattactcggtcccataaaaatattcttacaaataagaattagagatgaacatataagcttaaacatcaagaaaaatattccctaaccaaaacatgtatgatacttttgtattaaacatatactcaaatttgaaagttttggtatccaaaatcttagaaaggattgagatggatactgatcatatgccaccgttaagaattatgcattaatcatatgtttactttcgcacgtatatgtgatgtaaacatggaaccagctggttaacaaaaggtaaaaatgaatgatagaagaaaagaggagtagttgcaagtagtggttaaaagattgataccaactcttttatcgtccgtgtcatctatggatcctccgcacgcgttgctgatgcactttggagacacctctttcttaccttgccttcttctccactctcttctttcctccttcctctatttcttcctactttatgtatgatatttgtacattttactttacaaacttatgaaaattgaaatgatgtagctaaattgaagtaagttaaggttagttcattcatgcatggatctacaagattcattgaatatatacgcatatacggaattgagatcatattatcttaaagtcgaataagactcttacttttaaaatatctagaaattcgaactatcacatgtacacataaagtttaggttaacaacattaacacaaaacataggcaggtttcatgtcatggccaaatttgtattgaaaataattttcaatgctctaatttggtgaacctttaaagtcaaagagttcagttcgtcaatagaaactaatttggtatctaattacaaagaatgatagtaagtttcttagaaaataattagagcttttttccacaagtccaaaatgaaaatcgtaatgtaacgcggaaatttgcataaaagttacttatattggtcaaattgatgtatgtgatgccaattaaatgtctttcagtatgcattattgttaaaacatataccaaacaacaatcctaggtaccctaatctactaagtactaccttgaccagttgataaagataagtcaatacaatatactttttgtaatcgataggaagggttctaagagttacggtgatttaaatcaaaattgttatttctatctcattatgcgtcagaaactcttaataaagtttgattacgcacaaagactaaacttcaaaatctttattgcattgctacatgtataaatagataaagaggagatgttttagttatagttttgttgttttagttttagttttcacaacatatttatcagaaaacaatataagtcaaatttgacatgggtatataaaatttaatacagcagatgtgcactgcatgtgtattttggtctgtgtcttcgtgtaagatgaaatccgagaaagacaagagctccagatattcaggtggccgatcaactggaaatcagccactttgatttcttctctaatttttattttccaaatctcgaaaaatatttaatcatctgtctaatatcttaaaaaggagtatactgttatctttagaccagagccacactggatttattattattattaagttagcaattagttttgttttatataatcctcggtctttgagggttttcagcgaagcttaagccttaagcgccgttcgcggctatttaaaaaatgactataccagacgaataaattatttttttgtccacaaacaaataatgctatattttatattttttatatagtttttcatgtataaccatatctttctttcttcttattgttatagagttgtcttcataaatggataaaacatttcaactttacaaacaaaaactgttagaatatttgattaaatttggatgaacgcgttacgcgtattaccgatattaagttctatacgtctttctttctttagagactaatattgtgagtgtaattttatactcccatacatacgtaattaacgtatgagtgtgtgtgtgtgtgttgaagacatgtgcttattgggatttgtttggcttcaagaacccctagaaattcctgcaactggtccaagattccatgacgacaaggacctttggcctaatttgcattgatccgattgcctaaattttaatcccttcgtagatccaaatgaacaccagccaacaaaataaacatcaataatttactttctcattattataaccattagtattgtgaaatcataaatcatttatatttttctggctgatacacgaaacaacatctttaagtaaggccatattttggcatctgcctccaaaacttttagcttttacattttacattttttatttttgtacgcaggtggtgtacataaaaaatcgaagttattcaaccacttgattgcggtattattgtattgacgttaaatatatatttttatgtaaatataatagttatcaatatatgtatttataaaggtatattgatggatatatcactctaagtatgtaactagcagcacaatttgaatgatgccgaatttataagtttcagtcatgaagactaaactcgagaatcccaaattttgtttatgtgttgatcagtcagaaataaaagaggaaattttggtgaaaacaaaagtgttggatattttattatattatataaatcaatgttgttgatccgatctaagtttgggaaatgtgggaatttggttgaaattaagataagtgtataaataaggatttaggagaagttgtagggtagagttttggtcttatttaaatcaccaaacaccttgatttattgatttaactactgtaattacgtctataaaatagtatatatatagactctcagaaggttgtctgcgtttatagtaaactaacttaaattaaacagaagtgaaacatgaagtagcgaatctgagattacaaaatagttaataatattaatataacgacaaataaaacataggaagtgtttggtttctttaaccttacgcaatgttttaattagtttgaactcttcccgatacctaattgggagttgaaaaattcagtcctcagccaaacccgtttgtggctcactctacttcttgtgttacgccacacatatacacataatcgtttcacttttctggcaaaaaaccaaaacttactcaaaatcaagaggtatcatatttgttgttttctttaataaagttggcttccaattaatttgtactatggaatcatggataaaagtttcatgagtgaaaagtaaatgaccttctatctagctaccacgagagatagtcatataattaagttttgtgaacatatgtcaatcacaaattatatatatatatatgagtatttctatcatatattcaaagaagacagaacaatatatgttgtatctataaatagataacgttgtgtgtgtgtatcaatataatatgctaattgaaaaatagaaaactaattgtggttcacaatctattttgtgtgtctatcctaatcggtaacttaactcaaagacacctacaactatcttatccaagaccttcttcctttacttataagcattttttacaagtctatgacaacattttcttgatagaaataacgttgtaaatagcctttcataagattaacaatatatcaacgaaattcgtcatacattcaacttcgtggaaaattctacggaaattcacattcgctgaaaaaacaataaagactatgcacagtcacacacaagacaatcatattcggagaaaaccaattacgaaaacgcccactagtccaaaagtttagttaagaaaacaacaaggaaatgagtggctaaaaagtcaagaaaatcctttataaagtcccgcgagtgttgatcactttaatgcaaacagagaaaacgaaaacacaataagtgtgagaaaagagtctctctcttgagtctttaagtcatgcagctcaaatcatcatcaccatcttcttcttcttcttcttcatcatcatccatgaaactcaaaactctaatccaaaacctcctcacacaccctctctaccgtttcctaagagctcttgcgaaagccaaatcaatctttctagagatctcaaaacacaacagcaacaacaagaaacgaaaactcatgatgctttttccaacaaaggcttcaaagaaccaacgcaagatcttcttcggatctttcagattgcattacaactggtgttcctctcatgttgttcctgtccctcaaccgtttcctttcccttcttcttacatcaatggtgaagaagaagatgattctcagctttctggctacctcgagtggcttgaacacaagaagttcgatgatgtggaagagatcggagatgttgtagctgatggtggtgatgacgatattgatcatttggcggatatgttcatcgctaattgccacgagaagttcttgctcgagaaagttgaatcttaccggagatttcaagaaatgttagaaaggggtttgtgaattatcagaggtgaaacatagattttgggtcttgtctgattaattgataatcatgttgtaaaatcttagctagtttgatttgataatatacagtaccacgaggtcgtgacatgtgtatcttgaaagttttggggggtaatgtacgagaagttgaaacttttgggttattagtgaaacatttgatattgtgaaaacaataattattgttgtccatctaattgggcacatctcttaagttgtgagtttgattagtgtttggtatattacgtccaacttgcctaattttttttattatcttgagaaagtttaaataaactaactaaacgaggtttaaggaatcacaacaaaaagaggaattacctctattaattgaaatttcgagtgttaatacaatacatgacataattaaacgtgacattaccgagtgaattgaaatttattactataaatacgtttttataaaatagtatcatgcagtttccagagtctgtagacagtagacacaaagatattaacgctaaataacaccaatatttgtattagtaagtggaatgtgtaactttcaatctcgtaaatatcttggatttatgatattataaggaaaaacatcgtgatcataatagccaaaagagactaaaaggatcggacaaatctcgagaaaaatgatctaaagcacaatttactgtgccttctcaactactaacagatccaattttcacctaattttggactttatagggactatgttgtggtatcctcctgtaataacaacagtcatttctccaaatgattgcatatttacctataaataatatataaaaagactcgagaaataatagtaatgtagagaaaatacacactgaacatcaaatcagacgaatttttcgagttatagttttagcgttgattaatactcttttttcctttaagaaaataccacttattccgccatgtttgtttcttccaatgttctatgcatagtttaacataattaagaaggcctttaccaaaaaaagaagaagaatagtttaacaacattttctcctaaaattcattaataaagtagcagactttatgcgtttagttgaaacttttgtcgaattaatgaaaattttgtagtatttattttgctaaatatgcatgaggcaggcccgtctcaatagagtactactatagtctatagtcaattttcgacaccggccttagatattgtttcgttgacttttgcagtttataactttacgtagcatgtaaattcaaagtaaattctatatgtttgaacataatgcggatataatacgcacctgtaataagaaaattggcgaggttcctctgggtggtctgtagtcaacacacttttttaatattatgctatataccggaaattatccaattaaaaattatccatatatttagttaaaatataaataaatgaaaaaaaagttagcaaaattgtgcctacatttttttataaatcaaatcgttaataacaaaggtgaatcgattggatatataaaccacactacgtaaacttggaattatttatctattcacatttaattcgttctcctatttcttgaaaagaaaaacaaattaattaatactccgtaaattagtgactcattcttcaccaaataaaaataaaaatagtgactcatttaagtaaacggattgttacacaatcattaacttcttccacaagtcatataaactcacttctgcgacacattcttgagccagagatcgtttgagttctttaaaccacaaacttcatctctccggccgggttcctctgttctataaattctctctctagtctctaatggcggaccagaaagatcaagagccaaatcctcccgccggtacgtcagaacaaaacttccgatgagttgttttgtattgaattctcccattgtagcatttcgaaagcaatcttcagtaactagggtttccgagtatgaaataattagcttgggtttttggattcctctgtttttcgttttctttcttccattgatggcaacagctgctgataaagccagagattctcgtgatcttgattctgttatttctcgatcgtgatgcagcaaagccagagtgtctcccattaaagaagagagcaatggctgcaaagtcactcgttgacatagcatatgagtctgactccagcagcgatagcagtgacgaaggagatgtgccgtgtttacccaaggatgaggtcaatgaaaggaaactccaaaatctccagagaaaagctttctacaatcttctccaaactttcgctttcgaaaactccacaatgtcaaacgtaacaataacctttctcttggttaaatctttcttcttctttgctaaattattcgctctgtttctgaggcttgtggtcatgtctttaattgttttccagaagaggactgagatcataggaaaactgatgaacgagtgggggattgctaacgaaactcatatctcctttgcggatcagattcagaagaaacttctgactctaaaacaaacgtatgtatatcctcttgtcaaagctggaagatatgatctcttccttgtttaaaaatcatctttgtcttctcaggaagcattctggtgtgaaggaaacgcagataccagcgacgccattgaccaacactgtaaggcagagaatttgacatctctgatttggctttaattaccgcagagttttaactgtgtttacctttttctctgttttaaggcaacgccgagtacgttttttgttcctaaacctgtcaaaagctggggcagtgttaatccagagtctcttattggaaaatgggtcagtataaggcttcctgataaagctaagttcactgaatacatcatcaaagcatatgatgcggaaaaggtactaaaccctttcttatatctcatgccttgttccatcagactcaagccgttctaagactttgcaatatatctctccaggaaatgcatagcctattgaccgaaacctcgaacccaatggaggttgattgcattgacccgtttagatggatagatatcagagatgtaatacacaaactcttatcatctccatttcatcaaatcttcaaagtctttaatatcagaatgctgaaacatttgatctcaaacgaacttattgtagatttcgcctaacgatatcatgtgggaaggtggacaaaagccaaactttgctgctcccaaccaatctgctgcagctacaggtcaatgagcccttttctgaaaacattgacaaggtaactttgccaatcccaacacacacaatttcagtgaaactctaatggttttggcagaaatttaaccagtgaagctctcatggttttgatgcaggacaaagctgagaaagaccaagaccctcttttgcattttgttttgagatctttagttacttgtacaatcacattacacaggactctttttttttttggtgttgtttgctggaattagagaagaaaggggtcagtgttaaagtgtaaaaaaattcaaacttttgtttttgtaaattggttgcctttgtttcttgttagcttatctcatctataatcggaaaagttttcgttccggttcattggtccagttttatgtgctttatcgccggagctatatctataaatgattgtcatttaacttagaaaaacattttagtttttactaaaacaatttgttagtagcgcagttataaaggacagtactttaatgccaaaaaaaataaaatgacactgactatttttcactagccaagtattaattcttgaaactctactactattatccacaaccgttggattatagttttaatccgtaactaatccagtcaccaatccaaacagtattgagtaaatgatgttgaaattaaccgcagactcactcttcaattgctgacgtgtcaagtgatcaagaagtaccttcttctacaagaagtatagtttcactattttacgttcaaaatctcgaaaagcacataaaaaaaactttcgtaacttcttctcttatcgacgacccatgcaacgtttttgaagatccttctatctctagggtttctctcaaacttcttcaacaagacgcttctctccgattcctatgttctcaacaatgtcggaccacaaagatcaagccccaaattcttcctctcgtaagtctcttcttcactttctcatgggttttgcgatttcagcaatcagggttctagagtttcggattcctctgttttctctcccattgatggaaccagactgatcggtgatgaacggtgatggattttcttctgatcttgattccgttgaagaagaatcaactgatataccgatcaagaacacagagactgtgccgagctataaaggtgacgatgatatcctgttcagccccttggacaagaaagtgaaactcagcatgctccaggatagggcttactattatgttctccatgccttcaaagcagaatctcctgcaatatccagcgtaatctaatcgttcttgttctgtatatgcatttgattcgcttcttggaacttgagttcatgtcttctcttcttcagtcaaggatcgtgatcatgcaagaactgttgaaagaattgaagattgagtacaagactcaccagacttatcacaatgcaatcgaagctgatccaatggtcctgcaattgaggtatcttaatcattggttttactactgcaacgatgtgatcttctccccttgcttctctaagtttgtgtctgtttctcaggaatgtttcattggcgtctgatgagaaggaaatgcagaaacttactgtcgctgaagaaccggaaattactggcgtagatggccaacctctgataatccgtatcaaactgaacaaggatgacaatgccaaaattgtaggttttgataatcatcattttccaactcctaaaaaattcaatctggctttaattctatgtctttctgattgcttagcaagacagggttttagctcctgcaaagataaaagatggaaaggttttagctcctgcaaagatacaagacgaagaggcaaaaccgagttctacttctgatgattcacctgactcgagctggggccaggtttctcctgggtctcttgttggaagacgggtccatatacaaatgcctgacgaagacgagtacattgaattcctcatcacaaagtatgacgcaaatacggtaagtcacttcatgtttacttgtgtgttgttcatcaggtcagatctcagcccttctaagaaatatagttttgaatctacaggaaacgcaccacttgttgagtgctttcagcaataaggattatgaggacccatgcaactgggttgatctcagacatgtaaaatcaaattgttcttcctcttcttcaagttttatattcgtccccttttttgtcagcagctgaaacccctgatctcaaactctttgcaggttcaggcagaggatatgaaatggccagagggagatccagatttaccagtatggaaatgctctcctaaaccaggcgaaactctcttccacgaaaccagtacaactcaaaacaagaagcaagttcatgaggtatcttgctaacagctccaacaaattctcttgtaatgctaaactctctcactgacaaaatttctcaataaaacctctgttaggttggcaaaactagcactgggattcctgtcatcagaaaagttgataagggaaaggctgttgttgacgcataatctccaatgcagtaggatgctgaagatgacagatgcatgaaacattctacattggaacgctcttataaccttgtttgagatctctggctctttctacggtctactaaactcatattttgctgctatctggaattagagtagtgtataaacaattccaatactcttttttaaatgactgcctagtacacttcttagaaaactctttatcccatagaagatagttaagtattgcaataactcatcacctctttgaacgcttcttcggacgagtagaagaacctgtttccttttcactagtttcactgtcccgctttgccatcagagaagcagtgcctcttttagaggcgacaccactgtttttctttgtaggactacccttttcaattgttggccttttcccagttaatcgtttctgaccagcaggcagttttactgcatccactttctcactcttactattacttttcctctgttcagctcctctctttccattagaggattcagccttcactgtctctacgactgtttcagatgatgaaacccctttcattctcttaagaaaactagcagcactttgcttttttgagccaccactggtgttgatacccttcttttgttgaacacttttcttcagcacagagctaccgtttggagatcggcctctattagagataccagcattcaaactggtcttaacgtttctgctccctacttttttagctgttgagggtgctgctcctctagccatcttcttagaaacaataggtttctcatctttatcagagggtctcccttcctcctcttctgaaacttgcttctcatcaactgttggaactactctagtctttttcttcaaagtttcagtgactgacgctggagatctaacagccaaggaactacgtttccgacaagctataataggcactgaaagtgttggtttaagagaagagactttgacttcctccttagacgtcaccaaggcatcctcttttggtggtggtaaggtttgtttaggaatcttgaaactcatctgtttcttgatgagttggtaaagctgttttgctgcattaaactcaggcgatggctcgccatagaaaactctcacattgttgattagtagcagtaaatcccgaaaaaacttggtcctggcagttttgtagtaaccctcttccacacgacttcgaatcatctcaaagtctatgtgttgccttattatcctatagtagtcggatgtttcctgcaacttcacaatcaaacaaataagactcaggctttaagacacaagccttttgaaaaatgaattaatcatgatactaaaataaatacagtagaacatttttcatttaaaggaaaaattaaccatcggcagattatcttaaataaaggattgtttattatagaatcaaacataatgtagaaaattatttttgattacaaaaatgacagaatttgaattgctgacaatgtcataattttttttacctgggtttcgagccggcgcgaaaagtgagagccaatggggtgagactgaagaatctcgatgaaatcactcaacggctgagattcaacgaagatcttattgacggtgagagattgatctttgttatccggttggtcttggtctaccgtctcctttctcgggaagctcgccgagctctgcccatcactcgtttctttcgtatcttcctctcctttcgactcgtccattgactcaactaactcaggcgagtcatttccctctctttttggttctgctctatccgattccttcgccacgctctcgcaacttcctctacccgaatcctctcttgccggcttctcgtcgttgtcttctccgccgatccggttcggttcttcgtccactggttcagcgattttaacagctctgttcgtgttctcagatccggttccaggactattatcattcggatctggagaatttttcagctcagtaaccggtacgccggagttgttgcccgattcagtgtggttctctttcgtctccgcgattctatctagatctgaattctcagttttcaagctcttctctctttcatcttccaatgttttcaccttcaactgcaatgacctgtaagtactcacaaatccacgattcaaatctggaatcggaacaaaaaggaagaaaaaaaaaaccaatggttgattgaaatttacgagatggatagatcgtaacgttcgacttctcgtcggagttcatcgacacggagctttctcaactcctcaagccaaggaacggaagagatctcggcggcgagggtttcttcatcggcagatcctggcgagaccaggttacgggagaatcggcgcttgagatcgttgtacttgtgacgacagtcgatggcggtgagtgtacgaaaagtggagttctgtttatggacttcagaagcgacggagtcccatgaatcagtaccgtgacggtgaacggcgcaggcgaggaggagctcctccattgtgctccacgtttgtttctctggagaatttttgtcgttttctgattttgccattaagtaaatgtaaaaaggaacaaagtggattttgcttattgtcacttctccaatttgtagaactgaaatagaaataatcgtcttctgcaaatctttgctctaggcctccactaaaaaaccttgagactgattttttttttttttttttaatctgtctgacaaagaatttatttttatttatgtaatgtttcgttgataacatgttcgtgcaaaggcgcaccaattgagagaatgttgaaaaactttgctcgtttttgtcgtatcacactttagtaggcccaacctttacaccgaatccattacggcattaccggtttggaaccaaaagcaccaagagggtccaatttcgtttctcataacatttaaaattggattgtacggaagcagctaatgtttaatccaaactaaatatataaaaaagagtactgtagagaatacattctttcagattttctgcaatgtacaaagaattgtgtctaattgttcaccataacattgaccttcaccatttgatggatgagcatccggatctttcgtatctatatgactatgtcttccgaggatgatactgagatgtcctaaatcgtctagattacttttgccatcgacaaatatagttttgctgctacttagagagaccggcaaatctcttcccaaactcttctcgaattgtaatgcatagataagttcttttaattcaactacacttgccaatgccttaaaaagaagatatacaaaatacgttcaaggtaatagagctcagtgtatcaccatcaagcttcagattgattgatactataatagaatactgattcaaatcaattcaacaatcaacctgcatataagttcaataaagagaattgaaaagcataatctcatacaaaactctgaagattccatcaaaagattcaaaacaagttgtgcaaatctaatccagataattcaacgcatatatatacaaaagcaatagctgattaaggtcgacaaatgtaattgtaattcgagtaaagcctgcgattaccaatagccgccatagaagcttcaagcagctcctttcaaagctttcttcagctcctcagctacattgccctcttccttgcttttcttcccaccgtaatcagacgttgtcgttctctcgctgctccaccgatcagctctcgatctcccgttgttgttgttgttgttgttgttgttgttgttgttgttcctctcggattcgcgatacttcgagtgtgatccgtaatcaattgtcgccggcgagtatggacggacgtttgatattacttcccggagatcttcaacggctctctttaactgcttgttctccgttcgaagctcctctatcacctccgccacgtcaccacttgttgtgaactgagccggacccgaaactttacccggatcaccagtggatttggtcactttagcatctgcgccgtccacgtgttcgattcctattttattcatcaccaaaaaagggaatctcctcaacgaaatagcagccgttggatcgaaatcgcgtctgatctccgtaggaaccctaacgccccaccggaaattcaaaacggcgcgtcctctcacaggcagagacgtcctcgccgcaacctcaacgccagataacaatccagcgatatctccagcagaagttgacggcagaaccgtgacttttctaaatcctccgccgcatccattgaccgctggagtatccaccacctcaatcgaagaatcatcttcggaaacagatccattcatcgatttgatcaaattcctctcaaatccagacgaagaatgagactttttgatagagaaatcgccgaattgaggtttgaagtggagcataaagctagggtttccttgacctaggagattgaattcagcgctcatgagcatagagcttgaaatcggagaaccgaacgatcccgatccggttttgacgattagagagaaaggattccacgaatcgtttggacggtaagcgactttgagagaagggccagattcgaagaaagtggagagattgagactgagctccttggattctccggcgacgattccagattgaaagggtaaacctaagatgcttaaaggaactttagccctaaaaagaggcttttgctcttcacgaaacttcatcgatgccttcatcttcttctacgcccaaaatcaataatcgaattcagcaagtagcttacggagagtaccagtggtcgagtagaaggatttgtatgagttttaaactaaatttaaaggaaaatttccacttttttcttaagaactaggaattgtgtaaagattttggttggacatgaggataaaggctccagaagtgtttttccctaatttaccctcgtgtaataagaaaaataaccgataatcaagactagtctgtggtgtaattatggggaagttccaaggcgaaaagataagatggttaatgcttaaaatgaaaggtggacaaatgcctggttgtttgtttatcccttctgcttctgtctgtttttttcttctctgtacacacataaagcccgtaaatatatataagcttagaaagcccatttatattaaagaggcctttacgctgggctttcgttttgtttgtgcgcgatttagggttttttttgtttgctcacactttttttttttttcttggttatctaatttttttaatcaacgatacgatttatccatcttcttaaagaggttaaacaatagcaaaagagtgagaattgtgagaagttagtatttagtggtggctgatttacaatctgcgtggatttatttgtccatttttagtcttttgttgatacatgtatttactgaaacgggagactccagtacattaatccttgtgaattcttactgtaattttcgatcaaaactaaataaaataaacaaattaagcactgtgttatgcagaagaacaagggtttaacccgcggtttaccgcgggtctcggttttatatagttttaattaagtatttgattatattttatactgtaaatttataaaaaaaaaaaatcttttattttaaacttctataaataatgtttaggatttttattggttggttgttatttagtgattagaataatatgttttaatatgtttaaatatgtttatgtaatttaaatataagtaaagttgtaacaaaaatgtaaaatagtaaaagtggtgtaattctttttgtgattataagtgttttttgaaatatttttttgtgattataattctttttgagtggaatatgctcatatatagatatcaaaatgaagtaaaaataccaatattgttgaacggttaagattgtctactttggatgctaaacgcgattaggtatttgaatccgtgattaagagaccattactcctaacccacccaaaattaaaaatgtagatcctataagctttaataaattgagttaaccaaattacccttaatgcttatgtacaaaatgcaaaattaaaattgaaattgagaccaaatttatctatttttcaatttgtatttttcttttaataataaagggattggaatcttcatcaaatatgaaatagcttatagttttatagcataatttacaaccagacgactttgcaattaatatcatcattcacgatatcaaacacaaaaaaaaaaaaatcatattaaatttgttgaaaaataatgtttgtgtgggggtctttccatattccagctaagctagagatgtacaagaagaagttgtgaaactgggaaccacgtcaaacacatacggagatcgaggaccacaatctatacggcttaggtatggccacgtgtttaacatccagttgtttagttacccgcatgtgggccgaatctagaagagagcaaaagactcgtgtgtgttcgactctgagtctctgacgcactcatttgtacaaaaagctctcagactacaaaaccaaatcctttccgttgagtttcaagctcactctctctctctccatctgtctcccttttctgttacagccgttagatctctttcatatctctactcttgatccgacggccattatctattgtatcatatcttgtagtgcatgattaaaatgattcaccattgtgtctatttccgtgtggatctcagcaacatatagagttggcaaaaatgttctgaggcaaagttagattgtgcaacaaaaaactagtggtttatttaaggtttagtactatttttaacaaggaggttcgacacacgtatatgttctctaattaaggttttgtttgttcacgtattttaagtagttagcatagatatctatagctaggatactagttggctttattaacttatttttcttgcaaagttgtcatagagatattaataatactatactatactatatgtgtagctatgcattttggtatattttttttcttattcgtggttgatcactaatatttatgaggagcttgctgtatatagaatttaattattaatgtttagataatgtatatatgtgttggatgatcaaaaaaagaaagtgttaattattaaatatttttctgtgttggtattttgataaagagagaaaaaaaaaagggtgaagaatagacgtcaggaagtgaaactgcctcgtgcattaagagatagaggacgtgatcagacgactaaaggtaaaaaagctaagtgagagtcaccgcagagtcatgccatctccatgtcttcacattctacttttcctttatattatctctatttgctgattaacttgtttcttttgttcctttagttacttttatccaaaaaaaactttagttgattgcttccttaatgcaaactcagtgaataattaagatatacatgtgtaacaaattcacaatgacagtattctgcatgtatgagtatatgtttttggctgatacaattacaccaaacatgaatctgatgtaaattagaagtgcagacaatgatatgcaaaaattgacctctattatcaactaaacgttataatataaacgaatattgttttgttgcaaatatataagaccaatcatataagtttgttgagtttgtgtgtcatggtgccaagtttgtgaaatcctacttatctatgccacttgcatttatctatacacaagaacgcatatatattaatataggctcagaacagaaaaattccaatattacgttaaatattaaagaaaatacaacatgaatattaatttggtttgtgggaggaggggaccagtgtgcttcttgttcctctattccatgtcttaagaagctagcatactaacacatctttctcataatacaatagttacatgtaattagtttattccaactagtttaaaaaatgaaaaattaatttagtccaactagttagtttctccaataaatgtatatatcaacaagaccagagatccatttgtttaaaatatagttttcttactattaattacatgatggctataaatttataattttggatcgtgttttgagtacaattatcaaatagataaacaaagtgaccattaaattatttgcctatatctagttcatatatattaagtactccccatagcactatttaaaaggatataattaagttgaacagaaaaagtttaaattattttgttctttcatacttatcatttcctctccttctatataaccttcaaatatcttcacttacaatcaaattcaccaactctctctagccctttctcttttctctctctctctatatattgctaaacaaaaccctacttattctaaaaatggaagccacgatcttcgagaaaagaagaagctcgttatcaagcatagcggtgcacaaacagtcatactcgataaccaaatcaaagccaaagatccgtataattcacatatttgctccggagatcatcaagaccgacgttgccaacttccgtgagctcgtccaaagcctcaccggcaaaccagacgaccagagaacttccaaggcaaaacctagaagagatatgcatcgtcttcatcgtcaagtccaagacatgatcaacacggagaaactaagagaacccgagcattgtgatcaagagttctgcttaaacgcagaagagctctcgatgacttggaacggtaataatggcgctggtgaaagctctggagggttcttgaatggtttgggagatttcgaagggtttattcaagaacttggtgaatttccttatttgcccttgtcctccattgatgcttctgcttcttctaactcctcttcttcctctcatttacatggtggatcagttttctcagatcaattcgcttaactcggtctctcaaaggatgtgtaacctttttcatcttttattttgtttactaggtttttgtggaaatgaatttttaatttattacttttttttttgtttgtttagtatgaggctaattgatttaatgaaattagctgagactccttttatttctcccttaaggtctttatgatttgtccattgtcttcaaaatgtaatgtacactgataaatgttgtgtctagcttttgctttcttggacgtcctctaagcatttacaatgttaaatgtttcatatatatcagagtgaaaacattcactaataaaatcaacagaggcaaattttggcaatcgaatgagacaaaagacgaagtagatttaagaaaagaggtctcagtgtgtccggagatatactatagtgaggtcggtaagttgtatacactttttgttcttacatttacagagagaatcagagtaacaagagaacctgtttttaactgttgtattcaagattctctacaacactcgatgaagacatcggagacgatgtttccaccctcgttagaacttcaggcactcctgcggtatctcttacaatctacataacaacaaccaaaagactcgttttataattttctgtaagctccaacttgtatcatcataacatttcaggaacttacaagaatctcgtcgtctagataagatatcatgaagaatctttggtaagttccacctgaaagtcaataacaacaacactacttggttacaatgttacatgtgaggagtggaaaatgttaaaatgatggttatggctttaccaagggggattcttagaccattggctagagtatctttgataggttcaggaagctgttgcaacgtggtagtagcttgacccaataaacctcttagttggtcaggtactgcttcttcaataaccgttggcgactcgagcaatccctctaaatactcttctttcatccttaaaggcccttctattgtcaatttcgatgacagggtgattttgttttctatctgcatcattttcaacagaaacaacaaagaaactctaatttgagtctgcttataaatccataattctcatccttggaaaaagtaaatttaccgagtttaggagtttgatgtttgctgttgcctttgtgttattatctttaatgaatatttccatattggatagactcaccaatgtcgaagggaacctcctgccacaataccaaacagatgtaggaatgcttaaaaactctctagatataaaacgaatgtttatttgattatcgatgagcaagaacactgactcgaacataacccgaacagcaagagaaccaggagtgttgactccaaaccactcaaaactccatctaccttcaagataaggagacctgacaaagctagctattaggaagcatcaaataacaccttaaagcttaaaactttgaagctcaaaatcgagcaacatacgtggttggtctaggagttggattaagccgctcaagattcgttatcctttcattgacatcaatcttttgcatatcagtgatcttccctgtaactagagcctcaaatcctccagcatcattgaactgtaatctcaaatggtttcagaactccaacagagagcaatcaaattattcactaagcaatctaatgatgatttccaaaaccagatactaaattcaacctaatttctaaccaatcacagttgaaagtttcaatttttaagaatttttcgaagacttacggcgagaataagcgattccttagcagagagacgctccatttctctggcgtaaactgaaggaatcccttgaaccgagtcttgaaccatagctctgcatatcattctccggtaacaactcttcttctccgactgaaaattgagagaaacccttgacagtggaggagaagacgacggtggtgatacagaggatgagaagctcaatcgaaccgcagaggtcccagaaaccgaaccatgttggatcaatgccattgaataagggggaaaaggtcaaagattggctttttattagtctgaggaatgagtaggtagaagaagacgagagcagcagcagcagaagaacccaactaaatttatcagttttaatttaaattctgaatttgcataaataaagataataatatctgaaaaaaaaatcttgtaacaaaataatattagaacatacaataaaggtctaataaaatttttgggaaatggttttaaatgtaaaatgcaacaaaatattaattttttactagaatactaaaagaacattcatgatataaaacaggcaaacaactatacgaaatttacctccacaatatgattttgtgcatttatttccctatgacactcaaaagatattagatccaatagaaaacaataaatatgaatgaagaacatttagatttcacataaagaaagtctaaactctaaactatgaagaaggagaagtagagaaaaggaaaaaataatgttggcattattagtggttaaacataatcgtaattaatgatactccgcgtgcttcatatcgaattaatagaggttttaacatatatttatttccattagctcgttttcttggtccaaaaaaggaaagactcgagcttattaaaggactttagacattgcagtgaatcttctttttccttgtctcatcacttggaatccgagtatattaggtgagacttgtttatgtgaaaccctaattaagttaatattttcttcaagttttctcggtatatatagagattaaactcaagatcggtttcctgtttttgtaggttattatatattttctctgaagaatatgatgaagtcttgttcctcaccgaagatgatgatgatgaaatccgtgaccgcttgtctaattttaacacttttgatcatgtccgtcgccgcaaaaggcggtggtggtggcggtcatggtggtggaggtcacggtcgtggtggtcacggtcgtggcggtggtggtatttttttctttggcggtggctctcatcatcgcaacagcgcttccgttgacggttcaaacatgggtctaacggtgacatgcttggtgtcttctcttctgttcatgttgttccaaagattctgaaccttttagaatgtgaagaacttatcatatttctagctttgtttttaatagcttttcataagataaatatagacactttcgagttcttcttctttttttgcgtgtaagtcacgacaccaatcataaccaaattttttatattagcttgtgttccgatgatattttggatctcgtgttcgttttatttgaaacaagagtttgcttcaatattgtgcacgtctaacacaccgtgtaatataattagtggaggaatctcgaaacaggaaggtgaaaaaggctagtcaagcttgacttatgtaagttcatcacagtaacagtttcttctcctctttacatggcgtagaaactttcttttgtgtgaactatcgactgtccacatttactgtaattatctttcactattcacatccattcacatatacatcacaatgatcacatcatcatccctactcaacattaggttcacaaatcacaattacattcgactacacaccaaacaaaattacagctctatgtattattggcttaaaaaactctctacgtaatttttgtttgttttggttttaatgttaagctcgaaaaagtctctacttaattcaaagactttcttaaattttaacaatgaacttaacgatcccttccgatacaagcaagcaaacatcaatcactctctcgaatggtgttttactcgtcgtcatacaaaaacagcgaaatatcgcattgtcaaagttaagagggcttgcttttgtgacaccaaaaacaaaaaacaaaaagcgatgggtaagtacgttgggctttaaagataatgttgggctttattattgaggctcgaattgggctttcttctctgttttgcatttgttgcgttcgacctctgcttgaaatgctggtttggcaacattccggttagatctcttcggccgccggagatgatggccgccataagagcagcgattctgaagccgcaagactattattctcacctcaaaacagctcttttccattcgactcctatcttacaacgcaaacatcaatctgtcagtctctctcttttatgtttcctcttctgcaaattctcaatcgatgcttggattgtgcctctctttgaattgtgttggatcaatatcaccttattctcagagtttgatcttgtggataagtctcgttttgatttgacatcatcttctgacagaattcaaaagctcgaagcaaaaggtttggaagaaagaaggcaaagcaagatttgcgtcgtaatgtgaatgcttttgcacaacacttatttggggtaatgtcaagtctctgtttttgttttgtcgtaatgaaacatttcttttgtcaatgtaagaactaaaaagctttcaattttgatgcaatttttgtaatttggtttcccagatatggagtgatgggtttgattactctggtaagcacacctcatggtttgagaaacagtactctagggtttccaaaaggaatcggaatggtaaaacacacatccctcaacatttggataaaagtaagtaagacaactactcttctttgcctctgctttctcctcaatggttgaactatagttagtgtaactgcttctacaatgaaggaaggtttatagactgtgtagctaccaatgctagtgatatagtttatgttaaggaaaagtcaattaagtgaaatttaaaaggtgttgtttgttggtttcagtatttgcatgtagatattaatctccaacaatgctttcatttatgtaggatgttttgattttagcgaagttgatgagggataccaaattgagtactttttaaagactgcgttgggtggatcccgaggtttctcttggtcaaacactcgtgaggggggaactcgctcagggaggtactctaacaactttagaaaatcttggggttcaagatatcgcttagatgaagaagaagaagaagaagaagaagaatacgagtattcttcaacaggagtgagcgacacagaaccaaatcaggagtctcatagacagacacttggtttaagttcatcaggtcccttaaaccttgaagatgtcaaaattgcgtaagtaaaactaggcacttcatctcatcagagagaagctatatttacatagatcatgttttattaatctccataactcttgcttgccaactttgttactcagataccgagcttgtgcattaaaatggcatccagatcgtcaccacacctctaccaaggtaactaatacaagcttcctcctctatatttaccactttattgtgtttttcgcaactgaatgcatccctgtacgtgtttcttgacactaactacaaattggtatgacgaaacacagaatgaagctgaggaaaaattcaagctctgcactgtggcatatcaatctttatgcgaaaagctagccatgaactaataggatagctcagagagattgcaagatcttttctctgaccacagcgatgcacattgtttattgactctgtgtttggtaccgactgctattagtgttagactcggaatgaatcacatttaaacctggcttttctccagttttcttgtgttgacaaatgtagaaacttccttttatgtaaagttgtaaacaaatggatagagagggaaaaaaatggagagaaagagaaaggaaaaaataaatccatttatatacattcatttcttgtataaatgttcatttgattttatttgcttttttttagcttgtgcagtctaatatgtcaaatgtcaaactctgcatatatctttttttaattccattaaatcatttaaaaatatcaatattacttttactaatgttgtttttgataatatatactccaattatcaaaaatatatatattttacactttatagatctctgatgccaaagtacacaaacttataaattttaataatttgtttttacaaaatgataatgataattaaactatttctatattttaagcacatgtatttatacttgatcctttttttcaaaagataatcttaaatgaccttttaatatttttgttattgattgaggttttaacatatagtagtatttattttgattaactcttaggaaaggaaaaagagtcgagctaataaggactaacttcagaaaacaactccttatcgcgtacttgtttatgcaaaaccttattaagttgctattttttttttgaatatttcaccgttacagcttaaaatctagagcgttttcctgtttttttttttacaagtttattatttaccctgaagaagttgatcaagtcttgctcctcaacgaagatgatgacggtaaaatctgtgacatcgagtctaatcttaatccttctgataacttacgtggccgcaaaaggtggtggtattcgcggtggccgttggtttggtggtagagttccaagccacggcggttctggtcatcgtaatagcggtttggttgacggatcaaatatgggtttaacgatgacgtgtgtgttgtcttcttgtgttttgcttatgttgttcaaaagattctgaactcttcagaaaataaagaactggctttttaattaggggcttttcatatgatatactcttttttgttaaaagtttttaatatgatatacataacaatatattgatttttttcattttttgcaaaaatttgtcattcctaattggggacatctgattagaaaaatatgtagtacttatttacgtgaacaacaacgacatcaacattaaaaacggaacaaatacttttcaattaattatcttttatttggggatacattatgtatttgatgtcaacttttgtatttagaatctaaaataatacttattttgaaacataaaaggacattatctatttatctgttttaagaatctcgagagttcaaaagtttttacctttaaatatttttcagccatttgcttatttaaaaatattcgatcaaattgaacaagaaagttaaaatttatagagataaacacaagaacgaatgaaacttcaaaagtttatctaaaactaaacaatgagaataaatggaaaaacgaagaagaaaaaggaaaatctccattattattggctaaaaattattatttatataatcgattattttatttttctagggaaaaaaggaagagtagtcagtaataagggactaaacctagacaaaataggaattggagaaagtacttttccttatgcaaaaccccaacttgttattttgtcgaagtttttctctgttacaaatcaaaaccacaagcgtcacttgtttgttttggttttttttataggtttatatttctctttcgataagatgatgaagtcttattcctcaccaaagatgatggtgatgctaaaattcctgactgccggtctaatcttaaccctttcgataacttctgttgcgggccttgcggcaaaaggtggtggtggtggcagcagaggtggtggtcgcggtcggggtggtggtgtttatgcgttcggcagacactctaatcatcatcttcatcatcatcatcatcatcatcatcatcatcatcataatagcactgccactaacgtattaattttgcttttatcattgcttggtttctttatatttgtttgcattgtgatatttgtgtatcgtcgttggttgtccaaagaacctgaacctttgagaacgtgatccatatcagaacgatggggtttttattttatttcgtaagatagacattttttcagatattgtaattttgcgtgttaagtgatgctaccaaatactatttgatcaaacatccaattcggcaaaaaaaaacaacaacgaaatactagttttgtgtttggatttgggaggtattttggatcttggtttgcaagagcttcacagaaaagtttgtctataatgatagtctcaagtctcaatccaattacttccatatctctcaagattttaatgtaaaaccaaagttttcggaaatactgatgatgtacattaccttcaataatattacaatctagatagtaataatacgatacatatatgaatgtcaatatctccgaattttcttggttttagaacaaagacatattataggtttttaaatcagggcccaatggatccactggcccgtttaatttatggagtcagactcgagagtcgacactaccccaattgcccaaaagactcacgtaactgtagtttaagttgagtttctattttctaatatatatatttttctcttatataaattataacttggaagtttttataagtcgaatttataaatcacctatacttgagtccttctgtgaatttataagtagttactaatgtgttaaattctcttcgttcatgcttgtcaatcgattgcaacgttgtgtgtgctcaatgattcgtatcggttcaattgtggacttttcctaaataatttatatggatcaatatgaccatattgtaaaatttcttatccatttataaaatgtataactttctattaaaacgaaataatacaaaaatagtttagcatctaaacaagggttatcacaccaaaaacgaaagacaagtaatgagttttggtatacatttatagataaccatttggtatctttcaacattctcgtccttcttatcattataatcatctttttaatcaaaaaaggtttgcacataacataagcttttttctttctctcttaatcagaaaacaatcttgtctcacaaaaatataattaatgattctaaatttccctaaccgtccgatcacaaaagatcgtgatcatcgcgtggaaactttagaccaatcttttccctaaaccggaccgtaccagattccttctctctctctctgcttagagagttttaggttcgttttcccacttaagccaaattggacaagatttggacgtttctgtatctctcttaaagctaaaaaaaagggcgaatttttccatggcgttgtcggagtttcagctagctctgagcttggtggtcttgttcttctagctgatttgatcgaaaccccatgttcttatgattttacacgacctaatccaaaactccaggtccttgattgattcttctctctctccagctccagattcttctgatttcttttgttatcatttgtttttgtaagatttgtatccgtttttgggttttgcttagctgattcttgctggatcgagagttgaataactctgcttttcttcaatctggttttttttttttgtttcatagaggagaaaggttgtggatttctcaggtggggatttgagaattagggttttctgattgggggttttcttattgatgttaccttcaccaaattgttgtcggagatctagatttggttcagttatggaataatggctcgtctcttgccatctctattcgtaattagcatcttcttcttcatccaaagactcctcctttcttcgttaatccatcgccagctattgaatctgaagcaaatctgagaatctaccgaactcacgcacctgtatattgcttacacggtagatatctcttctttttgtttccgtttttgttgaatcaactcttttttctattggaaagtttgatattttgcttctccatttgttaattcacctgttcattttctttttggtgcacgatctcttggctttcagagtttgtagttagtcgtagttgtgcaatcatagtaagtggtctcatcatatgttgttgcagagagaatatatatactttgtgttcttcttcttaatgtttttgactttgtgtatgctttttctctggtggatataggtactaaactcgtacgaatagtttctttttcacattgggtttcttgtatctctgcaaagaaagctagatatatggattgttttatatgggaactgcatatgtttattggctaattgcttctctttccctgaagatacagagcacacggagacggagtacatattgttcagcgcaagtgaaagcaagagcctttttgtctattgatgggtgaggagttagctgacacaatgaacctggatttgaatcttgggcctggtcctgagtctgatctccaacctgcaccaaacgagactgtgaatttggctgattggactaatgacccgcctgagagatcttctgaagctgtgacaaggatcaggactcggcataggacacggttcagacagcttaatctcccgatcccggttctatctgaaacccataccatggctatagagctcaaccagttgatgggaaattctgtaaatagagctgctatgcagactggtgagggtagtgaaagaggcaatgaggatttgaaaatgtgtgagaatggcgatggagcccttggggacggtgtattggataagaaagcggatgtcgagaaaagcagtggcagcgacggtaactttttcgattgtaatatatgtttggatttgtcgaaggagccggttctcacctgttgtggtcatctttactgttggccttgtctgtaccaatggttacaaatttcggatgcaaaggaatgtcctgtttgtaaaggagaggtgacctccaaaaccgtgacaccgatctatggacgtggaaaccacaagagagaaattgaagagagtttagatactaaggtccccatgagaccacacgcgagacgcattgagagcttgaggaatacaattcaaaggtcgccttttacaataccaatggaagaaatgattagacgtatacagaataggtttgacagggattcaaccccagtccctgattttagtaaccgagaggcatcagaaagagtcaacgatcgagccaattcgatccttaaccggttgatgacatctaggggagttagatcagagcagaaccaggctagtgctgcagcagcagccattgtcgcagcatcagaggatattgatctaaatccaaacattgctcctgatcttgaaggagaaagcaacacgagattccatcctctcttgatcaggagacagttacagtcgcaccgagttgcaaggatctcgactttcacttctgcgttgagttcagctgagaggcttgtggatgcgtattttaggactcatccgttggggaggaaccaccaagagcaaaaccatcatgctcctgttgtggttgatgatagagactcattctcaagcattgcagctgttataaactctgagagtcaagtggatactgcagttgagatcgattctatggctctttcgacatcgtcctcgaggagaaggaatgagaatggttcgagggtttctgatgtagacagtgcagattctcgtccgcctaggagaaggagatttacttgagaaacataaataagaaaagctttcaacctggaagctgacgatgatgatgattaagaagaagataagaagaagattgtgtaactttatttttcttgtgttgctttgttgtaatttgtttttgtatttttctcgatagggatggttttttttaatcgaaaattttctttcatcttttttttcttctgacggtaaaatatcataaacctttgaatccaatatggaatgtgttcttgataactattcttataaaacaacaaacttgaaaattttaatcgatttccaaatgataattagatagcttgaaattttgttggatttgaaaatcagtaagaaaatgtagaataaactattaacctttttaaaacaaaacttttaggcaaaatgctaattttattattaagtaacatggtgtgttttttcaactttgtagactaaagcaagttagtatataaatcagttatgaagcaacgtaacaataagacactttggccgagtggttaaggcgtttgcctgctaagtaaatggggtttccccgcgagagttcgaatctctcaggtgtcgtattatttttattttcttttccttgtcccctaacttttttttttgacagatttgtttagaaacgatgattatatggtcgtagaaaaatccaatttttttttgagagtacatgtcacatgcgcacagcgacatccgacacgtctattattttctgttgaatcatctcacttcatatggttttcttcaacaattatttcacttctgattacaacaaaaaaacttatttttatactatcatatgatattttcttggcaatataaaaaaaaaaaacaccgcaaaaatacattcacacgaggggagacaaaaaataaataagaacccccacaaaaacagacatcttccaccattttcaggctttcatcatttattaaattataaagtttcttggattcttgttaacttaaatataagctgccaaatatatatcagcttacacttataatggtcctgttttaattgaatttaaccttaaatctcattggaaagtgattgacaaaattcaaaaaaattatgaggaaaaatgaaaatttgaaaagtgaaaataaaataaaaataaaaactcaaatgatgtgtgcgggaaacgagcgacgtcgcgttattcgatgcacgaactcgagccaataagatgtttttaaatctaaaaatggctattagattcgtcattacttttgtatttttccacaatttaaattgacttttgccggagatgtaacttttaaactattttactacttctttttgtttttactcataaagatcacaaagattcactcacaagcgtatgtatatctgaagcaattaaaaatgagaaaatatttgtccttttacagtttttgtttttcttctctgttacaaaaatgtaattacatctgaaaacaatactagaaaaaagaaagtaatcgagcgttgtaacgcaccataatggagaaaatagtaatacaattatgaagatagtacaaaatctcagatgaaaatatagtaaataattgtaattaaatgagataaaatcaatttctaaaaaaaaagtaaaaccaccttcgtgaattgtgattcggtgtttttaaaaagtggggaataaagacaaaacagagaccaccaccattaatggctttcttcaccgatacgaacaagacaggacacaacaaactcaatcccagcctcctcctcctccgtcttctcccttattcccttttcgtttaatcccccaattttttcaattaatccctccttttctcctcttaatctgaatccgaagcaacgcataatccataacaaagtctggaaaatttcttccgggtaagagaaaacttcttctctttcttttcaatttggggttttttattttgaaatcgggaacaaaagatccagaattacctaattccgaaatttattatcgggttggattatcgtgtgacgacgaatctagcttgctttttggggggggaaatataattctcggaaggtcaatttttttttttgcttcattttgttgtctttgaatcttttggtttatgaatggattgttttgaaattgtttcataggtcaaagagacaaagatattgttgagatttatgatattgggatttgtatttttgaacaccgtttctctatagatttctgctttaacctgatccttttaattgcaaaattgtgaaactttgcttgcacgatctttgtttagctttcacaggttagatgcgttggttcttgttctctagttagatctattttcatgtttatctctgtttagttagattgaaaagagaataggtttttgtttgttctcttggaatttttctcttttgatgtttgatagtcctgtgattgattactgtttaactgttgaagtcattggaatgtgcaaaggtctagctttgttcatagctttaggcctattgctttgtttacctatctgaaagtgcatttattgttttgcttcaaatgtttgattattttattttattctttgttgcttaagaagctataaaaagtaaaagacttgatcagctgaaccaagtatctgccccttaatctacttttttccttctcaatatatcaactatatgtattagccttctcaatataagcttgtattgctaatgattccttttttcctgcaggataataaagagatccattaggagtaaattatctgacaagagaatacaaagggcaatttcattttagttgaattagggatttgggctcgtcatggctcctggaggcagtgctttgaaagaagtcatggaatctaattcaacgggaatggattacgaggttaaaacggcaaaagtggaagttaataataacaaacctacaaagccagggagtgcagggattggaaaatatgggatccattcgaacaatggtgtttacgagcttcttgaatgtcccgtctgtacaaatttaatgtaccctccaattcatcaggtcagtagtatatgagcttgaacagatttgtaattgactaattgcaatgtttcatgttctaaatgttatttaattctacagtgtccgaatggccacacattatgttcaaactgcaaactgagagtgcagaacacatgccctacatgtcgctacgagcttggtaacataagatgcttagctcttgagaaagttgcagagtctttggaagttccatgccggtaccaaaatttggggtgtcatgacattttcccttactacagcaagcttaagcacgagcagcattgcaggtttaggccttacacttgcccttatgctggttctgagtgttcggttacaggtgatatccctacacttgtcgttcatctcaaagatgatcataaagtcgatatgcatgacggatgcaccttcaaccaccgttatgtaaagtcaaatccacatgaggtcgaaaatgctacatggatgcttacggtaaaactttctttcgatatgttttcttctttttatcaaaggtttctaatttaaagtctgattcaggttatttcttcagatgaaatttttatgcaggttgtgattttatatcatcatatgactaagcttttacattcaccttctttcgctgttatcctcaaccatgaaatattcctggctttagctcttttctacaaaatacagattggattctttagaaggaactataggaatctctggctctgctcttttatgctatttttggatttctattttgcctattaaattttgaccttgaacaatccggtgccaaactcccttactagctgctattccggttcccgctttgctcttctttgttagtccaattttacggtctccttaagtacctaccatagggtctcttagtcccactttaatcctcacacttaaacttgaatctcagttactaaaattttgtttccaggtgttcaactgttttgggagacagttctgtttacacttcgaggcgttccagctgggaatggctccagtgtacatggcattccttcgttttatgggagatgagaacgaggcgaagaagttcagttacagcttggaagtaggagctcatggacggaaattaacatggcaagggatccctagaagcatccgtgacagtcacaggaaagtccgggacagtcaagacggactcatcatcccaaggaacctcgcactctacttctctggaggtgataggcaagaactcaagttgagagtgactggacgaatctggaaagaggagtaaacgaaaaacgaaaaacgaagaaaagaaggaatcgattgaaaaatgttgtacataagaagaagcctcgtggaagagctaatgatcatatggaagatttgaagtttgttgtctggttttagtgtggtataatggattcttctccaatgggaatgaagatgagatgatgataatgacaaatcttctatgatgaatcagtttggaggagccattgttactattttgtggctgcaagaactatattatctctgtattttttgttttttttgttgggatttcttttgtggtttcagagaatgtaggaaaaagtaagacatggttttggctatgttcttgttgtaaaaccaagttcaaaacagattggtgcactttttatcttttcacaatggtgattttcattcagtttagacttgatatagcaagctcgatgtttaggcattacagcatgatgacaacacgacaacaccttacccacatagacacacttttactcatttgaggaaaggtaactaacaaatatgaaaaccaagcaaaattttctatatctacaacgtaaatatcttttccttttgtttttcgtttttgttgaatcaactcttttttctattgcaaagtttgatattttgattctccatttgttattcacctgttcattctctttttggtgcacgatctcttggctctcagagtttgtagttagtcgtagttgtgcaatcatagtaagtggtctcatcatatcttgttgcagagagaatttagactttgtgttcttcttcttaatgtttttgactttgtgtatgattttgtctggtgtatatatagttactaaaactcgtacgaatagtttctttttcacattgtgtttcttgtatgtcgccatacaaagctagatatctctttccctgcagaataatacagagcacacggagacggagtacatattgttcagcgcaagtgaaacctggatttgaacctgatacataaatttgttatcgtttggtcattttaaccgctccctctaatatttacctcctttttataagttacacatcttttacatatctctctctctctctctctctctctctctctctctctctttctttctagaatatattgacgcagccgcgaatctcatcgtcatcgtcatcgaccaagaggaaccctgatttgcggcttttcttcctttcaatctcaattcgattcgttttctttctgttgaaggatctgaccatccagattttcccgggaaatttcataatcagactcttctctttttatcttcattttatttccagaaatcccgattcatcgcgatcgattgttgattgctgtatttctccgattggatttggtgtttttgtagtccgatttcacggacttgaatccgataggattgttttgtttgttgttgataatgaaaacattggttgatgaatacaagagactgtaaatgatgccgggtttagcgcagaggaataatgaccaatactcttttggcttctggtcaaaggaaatcgatggtgtcagctataatcagctccaaaaggtaccttatcccacattggttctcttgcctctgattcattctttaattgctgtttagagatgtttttgctttcattgtatcaatccaagttctagttcagatcttattcacatatatgtagctaaatgacgatgaatcattaactcaaagcacattgttctgaacttgtgtgcagttctggagtgagctgtcaccgaaagctaggcaggaactccttaagattgacaaacagactttgtttgagcaagctcgtaagaacatgtattgttccagatgcaatggtctgcttctcgaaggtttcttgcagattgttatgcatgggaagtccttgcatccggagggatcattagggaattctccttgcaacaaatcagggggatccaaatatcaatatgactgtaacgcagttgttagtaacggatgtgcggatgagatgcaagatccgtctgttcatccgtggggaggtctcaccacaacacgtgatgggtcgcttacgcttcttgattgctatttgtatgcaaagtctctcaaaggacttcaaaatgtaagttcaatgcaaggtttacctatttgcaatcaactccagttcaactagttaatctattggttctagcaggtgtttgacagtgcccctgctcgagaaagggaacgtgagttgctatatcctgatgcttgtggtggtggaggccggggatggataagtcaaggaatcgctagctttggtagagggcatggaacaagagaaacgtgtgctctacatactgcaaggctttcttgtgatacactggtggatttctggtccgcactcagtgaggatactcgacaatctcttttgaggatgaaagaagaggattttatggagagactgaggtacaggtatgtcgctaattgatttaattccttgttgttcaatcacaaattgagtcggaaagtttttggacatgatctgggtcatgggtaacaggatatgttaccactcaagttatcacattttgaattgcaagatgaataggcatttcgttgtctggactattcaagatgttcttaccaagtcatgcaatacaagactcttctttgtctggtcatgtcgagacttttttcgctcggcttaataacaaatggatctttcaaattacagattcgacagcaagagattttgtagagactgcagacgaaacgttattcgtgagttcaaagagcttaaggaactgaaacgaatgcggagagaacctcggtgtaccacatggttttgtgttgccaatacaacattccaatatgaggtgatttatctatgttaaccttttcatctttgtgggttcctatagtctagcgttatgcttttcgaaaagtatattactatttctcttatgaggactaattgcgagatgggactacaaatataattgcaatattaaaggtatccattgattcggtgaaagcagactggcgggaaactttttctgagaatgctggaaagtaccatcactttgagtgggcaattggatccggagaaggaaaatgtgatatcctcaagtttgaaaatgttggcatgaatgggagagttcaagtcaatggcctaaaccttcgtggtttaaattcatgctacattacccttagagcttataaattagatggccgctggtctgaagtatccgccaaagcccatgcattaaaaggtcaaaactgtgttcacggcaggctagtagttggggatggctttgtttcaatcaagagaggtgaaagcatccgaaggttttttgagcatgctgaagaggctgaggaagaagaggtagattccggattcatacactttttaacttaaacttctcaaatgtttcagactacatgaatattattctttccactttataaacgataccgctgtgcttcctatgttataaaaggatgaagacatgatggacaaagatgggaatgagctcgatggggaatgctctcgtccacaaaagcatgcaaaaagtccagaacttgctcgagagtttctattagatgctgcaacagttatttttaaagaacaggtttgttagatataggttccctcaaatcacattttattattgttattttgtgctatattcggtacttatttctgtcagttattgattatatcttaggttgaaaaagcattcagggagggaaccgctcggcaaaatgcacatagtatctttgtatgtcttacattgaaactattagaacaacatttacatgttgcctgcaaggaaattattaccttggagaaacaggtaggtatcctgtcttaaggttctgaaaacaatttgatcaagattatgtccaacagtttccgttgtcttcactccggcaggtgaaacttcttgaggaagaagagaaagaaaagcgtgaagaagaggagcggaaggagaagaaaagatccaaagagagggagaaaaaacttcgcaaaaaggagagattgaaggaaaaagacaaaggcaaggagaagaaaaaccctgaatgtagcgataaagacatgctgctgaattcatcaagggaagaagaagatcttccaaacctttatgatgagacgaacaataccataaacagcgaggagtcagaaattgaaacggggtatgcagatttgtctccacctggttctcctgatgttcaagaaagacagtgtttggatggttgcccttctccaagagcggaaaaccactactgtgacagacctgacagagatattaaagatcttgaagatgagaatgtgtactttacaaatgatcatcaaaaacctgttcaccagaacgcaagatattggaaagaagtgcagtctgataatgctttgaggtggtcagataaacgcagatattcagataatgcttcttttgtcagtaggtcagaggcaagataccgtaatgatagattagaagtgccttcaaggggattcaatgggtcaaacagacagttaagagtgaatgcttcaaagactggtggcctgaatggtatcaagtctcatgagaagtttcaatgttgcgacaacagaatcagtgagaggtttgacttcagttcttgcagttgcaaaccaagttgtgaatatcgggcaaaagtagaacctaaaaccgctggatccagaagcacgcgagaaccaaaaaccatatccaattcggactctgctcttgatgcctccaagccagtgttccaaggcaacaggtatactcaaccagactatactcgtgagttaagacttaaaagcaaggttggagttggtccaaatccttctactactagagattcactacattcaaaacaagtttgggagcccatggagccaaagaagtacccacgaagcaactcgtactctgaagtaacagttagatgttcaacatttaaggctgaagagatagaagacgctatcgttgctgagaattcatctgaccttttgtctcaatgtaaggttacagagaagttggataatatcaagcttaaagatgaaaacagcatggagtccggggaaacaaagaatgggtggcatttgaaagatcctatgatgagtagtacatcgagttcagacaattgctcgtcatgcctgagcgagggagagagcaatacggtttcgtcaaacaacggaaacactgaatcctcctccacatctgattctgaagacgccagtcagcaatctgaaggaagagagagtatagttgttggtacacagaacgatatcctcataccagatactactgggaagagtaaaattccggaaactcctatagtagtaactgggaacaacatggataataacagtaacaataatatggtacatggtcttgttgatgtgcaaccacaaggaggcatgttccctcatttgctaacccagaatctacagtatcccgttttccagactgcttcaccaatgggctacttccatcaagcaccaccagtctcttggcccacgggtccagccaatggattgattccattccctcaccctaatccttatctatacacaggtccgctcggatatagtatgaacggagatcccccgctgtgcttgcagtacggtagcccattgaatcatgcggcaactcccttcttcaaccctgggccagttccagtgttccatccattttccaaaaccaacaccgaggaccaagctcagaatcttgagccgccactggaactaaactgtttggctccaccggaaacacagaccgtaaatgaagacagcttctccttattccatttcagtggacctgtaggtctttccactggaagtaagtcgaagcctgctcattccaaagacgggattttgcgcgacgttgttggaaatatctatacgaaagcgaaagagagcaaagaggttgaagagtataacttatttgcaactggcaatggcctgaggttttcgttattctaaagtaacggttttgggtttgttgttgatttaaactgtggagtgtgaggtgttttatgactttgtatcatccgcaacgttatttattcgtctggaaaacaaaacaaaaaatctttcaattttaaaccttttttttttagctttttttttccttacaatttacacttttctctcacgttttggatttatactctctgttcattttacttatttttatattcttgcttcaatgttttatttgatgtagagcaatgttaagatctgcccgatttgaagtgttttttcactgaatatttggtattattcaatatattcaacatgagtcttttatgataaatgataatttctgtaatgttgaaatgatttacatgttagaataactgttcattattgaacttaatatttttagtttctcacaatttcatttgtgaattaaatgcgaaattctatgtaaaaggaaaattttctaaaaagattttataagaaaactaaaatgttctatattgtgtaaacgcaaattcaaacataattttcgttttacaaaaaaaactgatagcacagctaattaaaatgtcattttagatatgtaaatattttatgagttgaagaaaaagaaaggtaaacataacatattgattaaagcaaaattcaaaaaacaaaaaaactcatactgcaatgtatctagctgcagaggtcacatagtacaatatattaacgaagcaacaaaaacaagacaaacagttacacatacatatataatcttcataaatcgttggggattgtagaaaggacggaatgttcaggcttgtgatgacactcaaaatctagatgaacaaaagctctttccacctcaggaagttcttcaagctttatttgcaatgattcaccaatcgcatgagcttctttcaatggcaaatcctctggcagttctatatccacctgccaatcgcatagaacaataattcaacccaaagctatatagttagttaaataaatcttatttatatactgatcagcaaatattttgcgatgaattatacaatagtcaagtgtaagtaggaactgatttccaacttctatgatatatttaagtttgtaactatatgatttttaatttttgttttcttttaactatatgattgaaacattaattagtatgtgtgcacatatagacgaacctcgacaaaataaagaacaccgaaggtatatgcacggacggtatccacatgtttgatattatcgccgccttgtcgcatcactaggtatgtcaacttttgtagtacttctggaggagctgattgtccgatcaatgaaactatatgaaaataaatatgatgaatatcttgtgagtagatatgtcgaacaatacgacaacatcgaaatacaaatttacctgcattttccataacagtcccagaccaattgacaatagtgtagatggctaagagaatagcaccagttggatcgagccaccagtaaaaagcattagcaagaacggccgcaaccaatccaagaacatttgttaccacatcaaagtgatgatcctataacgaacatgcataatcagtcagtctccatttttgcatgaaattataagaatatatatgcacatatttacctttgcatatgcacggactatatggtttctcgagcttttgcagtagatccataagacgagtttaatagcggttgcgcttagcatgattgaatacaaccaaatcaattggacatgattcattttctctgaaggttcatttgaaatcaattgctcagctgccacaagcagcacttggaaccctacgcatttgtgtatgaatggttagtttatagcattacattttcattaaagcaattataatatatagtttagagttatataagaaaatcatgaaaaaggaatatatgtataccaagggtagccataacagcggcgaaaatgatgattccaacaggttgcaccctaagctttcctataggatatttgtagatatttacgttcttcatagacaaatgtgtgaaccaaagtattcctcccgccataaggtcaagcaatgagtcgagtgtagatgctgcaatcgcaatggatccactctttaccgtagcatatatctacacattgtagacatttgatatatagacgacgtcaccaaaacaatgttataaatgtttcaatagatcaagtcacaccttgagagcaagtaaaaagatgttagcccaatttgagatttgcatggcaagctcttgtgcagctctctcagctcgatcttcttcttcttctttttcatcgatggtatactcatctgatcgagctaagaaactttctacttcttcaaaggattttagtgttgccaattgtctttcgtagtactccttttcatcttcaaaaaaagaagaaaaagcatatttggtttagtagttgtgacagttattatctaaattattatgtaaaacatagataccttctttgaggcctgcagctttggagacatcaaggtgcaaagggttctcgggatcgatttttgatcgaagtttttgaggcaaatccgcgaagaaattcgatttcatagaagaaaccataccggttaactttggtttgtgatcaatagcctcatgatcgtttgacgaaagcaacggtgtttccggacaataattgacttccatttctggaaaattattaaacaaatcatcgtacaaaaaaaacatgaataaattaactactagaatttgaaggggaaacccccttagaataattaaataaactattaaatgaaaaaaagtatataccgatgatattcaggagaatttttatgcttgcaggtgatgaacaaagaaaaagataaaggattgtacacagagattggtttttatagatagattataagatattttatgtgcgttcattgaatttttgtggttatttattaaattattgtatggaataagaaaatagagatgatgatgatgatgatgatagagacagccctggtacttgcccacatgcaaaagcatcaacaaagcttgtctgatccatgccttagtcaggagcttcttgttccgtgacgattttatattttgggtacatgacaatcttattttcttatttagaaaacgacacgtgtagtttacagtgttgtaattgcaaagcataaatgatattcaacattcggaaccctaattttgaataatgctcacatcagcgcgtttcgacaagaaataacaattaaacttctacaaataactgaaaccttttttttttataaaaggcttaatttttttttttaataatcattagagaattgaaaccaaatttaaagataaggggtaatccaaacttaagtaacgtaattcaaatacgaaaaaaaaaaaaaaaaaaaatttgacaaatgagcgttgaaataggagagcccaaagaaaaattaagtatgtgaatattcattaagtcaacatgaaaaattgtatgataacagtaacacattgagatgtataaaagtttattatttaaatttattttgcagacatcacatataaacagacatacccacatatatataaccttttaactacaaatcacgtatcaaaatatcttattcatgttcgacagtacatataagtacctgacgtggacttctttggcttgaaaatatttcttcaatccaaaaggagtcgaaaatttgaagtcagaactgtgggttataaacttggtgaatcctttgaaaatcaacaaagaaaccaaaaaaaaacaaaaaaacagaaacagaaaaccccaacatgggtaaaatatgaagaaaattaattttttggagttaattctatttctattaaattatagaaaatattttccccaattttttacaaacgctctatgacttattgggacatttctttattttatagaataaaattctacagaaaaaaaatctttatagattcactttttcattaaatttatagaaattgtttccccaatttaaaattataaatgctctatgatttgttggtagatctctttatttttagttatttatttttatacaaaaaggtgataatttctttcttctccaatttacagctaaacgctttaagacttattggtagatttctttatatttatagtatcctacgtttttataaatgaggaaacaattcatttaaaagtttacaaccacgagttggtgcaacaatctctcgaatgatatgtgattgttatgcagcccttatttagctattgttcaaattaaaattatatcccatcaggagacattaggaacattcccggaagcttaatgattatgatttctttatttctttgactttcttttagagaaaaactacaactataatcatgcagcttgaaacttaattcactattttaatctcaaggttatatggtatatattaatgtgtgtctctaaaaggaaatattggtcacaccatcatgatcatttatattattttcattattcctttacttggttttctctaaattgatatcatggctaccactttcaaatattaatataaatcttataacaactagatgtcaaatcctgaatccgcttcatctgtatctatgcgtggatttcttgaagtgatatttggttcaaagtttaaacagctataagcaatgggactcttggacaaaattagtcaggatcggagtcaagtaatacaacaataaactagcgcttccgtttacaggaggaatgcaaaacctaaaagatgaattcatatacttcagttgaagaattctacaacaacaatacaaaatttaatcttgtatgcgttatagaatatagtttctaaattattttacttgtaattcgaattgtcaccatcatttaggtaaatgcagttatataacgctgaattctttatctcaaagatctaaaacatgattaatttattatcaagttaagtcatagatcatgatgatgcgagagtgattcatcatccttgatcgataatatgtacggatgatactatatagaaataaacctgatgattgaaaaatccctattattatagacaaatactaaattatcaaaagttcattcttctgttttcttacggttttaaacgaacacaaagtataatctttgaaaataaatagttgaaaaacggtctactgtcatgttgtaagaacttcatgtgactatgtgagccgtgcatagtcaatattgaaataaaacaccaaactaatatcaatgggtttgagccgattacatcacaaatggctatggcaatcggtgaatgtttgtctgcacccaatagtccatactataatgggttcaaatttcattaaatttccgaatttcgatgtctagtccgccaaaaatctcttcaagataatgtttcaaatgttgtaatgtgtgccattgaattcttttataagatctttttatataaaaagttgtaaattcaaagcaattgtcgaacaaaaagccgcgggatttaatcgcaaaaacaatagaaatccatcgatcttacttgaaaattatgtaaaaatgctaaagtttgggcaagtgaatggtatatatatatatatatatatattttttttttttccgacgcagatgaatatctatgtctataagtattacatgattgagtatttcaaatttggaactaatgatctgattataatgaatgcgatataagttaactaaaatttggaactaatgaactaatgatgttattcgaaaattttgagctatactaaagtagcagaatcctattgtcatacaaacttaacttgtttttcggtgtggcaaaaaaaatatagtttaaacccattaaactatgagccattaatttgtagtttgtagagttgttaattaaaagtatgggtgttggtttcgtatagttaacacaattcaaggatttttgtgaaatttccgcaaaatatcagtagagaagagacaaaaggtagaaaacgttattttgtaataaatagcataagacaaaattagaagatacttggttcgattcggaacgatccaacttgatgctattgatgccttcatcattgttgcagaagccaaagccattcccttcgatcatgaaatatggccttattggccttacatgaatttatccttttttccttttagaaagttatttattgatattaagaacaccatttctgatttctacctagcattacaaaaaatgttaagcaaacgtgaaccggtattaacttgaaccggaaaaaaatcagattatttgtttggttcgtatcgtgtatgagcttcctgagataggcccaaataagaaacaaaacaatttaattaatcgtttttatgggcctacataggggttttgcgaacttcctgaattaggtaggcccaaataagaaaacagaacagtttaattgggcttttatgggtctacatcggatttttattagtaaaccggtttcagaatttggcaagggacggcgaattgaattttaattcggtaacggtttgaagttcaggaaacgagcctttttgattaaaccggccggctgtcaaattttgtgtcttggagttcttgtgcatgaatgatgctgtgaaattggaacttggaaggtctcagaagtccgaagcaggcttttttaaccctctcctctcttttttttgccttaaatttggtttaacttgattgaaataaaatctgctggttctccttgtttgttgacggtgtctaatttacgatggatatgtttcagattgataaataaaacgtccggaagcttcaaatttatgattatttgtcatgttctggtggtaagtaataagacctctgatagagaaaacttacttcttccattgaattttctactcatgttcacttttagtaacaaaattgaagagccatgttcctttttcacaatcttactgttaatacaaattaaggtctgccatatatactgtagaactactaaacctgtaagttagtcacaataatatcacattttcccaccagattcattaattttgtctctctgcttatacagaatgcaaaattcttccttttggtagtggtttcttggtattagctcctagagttacagatgtgtgtatatgtgttatttcgttatttgtagacatctgcctccttttagaaatcacctgaaattataaatatatggaagttggtaggttaggcaactaacaatcagctcatatcaatgcctctcacaacaatggacttttttgttggctagtaatgtcaaagaggcacacacacacctatttttgaactcagaaagattagctaagtaaatagatgctgttgccaagtaaacaaaaaaatgtacctacattccttctgtgcacgctgcattattgagaaccagatccttacattataataactccattgtctctaacactgtgtctttaccctgtcaagttcttaatgctgcaattgtttgatacactatagtatcttgcatgagccttggtagcttcctttacctacatattcagttttggctattacggttgctaatttattctacggttctgatacaacctttgacgaattatgatgtaacatcaccaaaagatgagcatatatataaaaagaaagtatacaaagcataaagatgttgaaacttaggaatcagaaggaaacagtcatatctcaattatccaaccacatggtctttgctttaacctttaactttactaccaaaacggtcagttagtgctctgagatgtgtactgtttgaactatcatcctaagttttgcaacttttttccctaaaggtgtgggtcactgttcctcagattctaccaagttctttgcatatcttaaaaaaacaactgagcacaaagtggtcctctaagatttaggcaatgttgtgtctcttttttatcaccttaatacactcatcacatgcttcctttttaattgcagtaactggtaggtcctcttttagctgctactgatgttaactcttttgacagtatttccaaaaacttcctattatctaataaatatactcttataattcccaactagtattgtttgtttgtagctgaggaactgttcctggaggtcagatacgtcttttaattcttttctgtatttttgttttgttactactcttggtgacaattgaaacatccttattgcaaaatttatgttgaaacgtgtccataaaatttatctgaaaaaccttatcacttcccttatgatctacaggctgaagttgcaccatctgttcccttccctgtttaactgatggagactgttccgctactaaagtctccaggtccgaaaatagcaacgtcgctatctgcatgagcctctcaaacttatctatagctttaggttggtgtcactgatattgctaatgttagttatatcttagccataccgtgtttaaatacaattattttgatagacaaaaagtacaagcaagagtttttgcgatgttgcatctacctgcattttctcaataaagtgtccaaagatgtcgttttggcatgtcattttccatttcctttcataggagacttgattgaatcagattagttgatttctaaaagaaaccatatatatgtaaccatcaccatgttgttgcatagtgcattatattggtggaggttgtgaattaatgcttgtgatattctttgattaaagtcttgtcaaatgtggaaactcgtatgttcttctggatcaaagtcctagctacgttgtcatctatatttatgttttgatttgatagtttaacataaaaataaaataaaataaactacatggttaattaggtacaaggattttcccatgttttgtcttgaaaaccatttcgggtcattgacattctctgatatcattagtagttttgtatttgtccttttgaatgcaacaggaccaacccgtcataatcaatctcgtggcatctgttaattggagtttacggtatgtgaatcacaacttttttcaagttcattgattgagatatatatagactatagaggctgttgtcttgttggtattctttggattacctaaaagaaaagttaagaaataaacacaaaagtagaaagcttgaggaattttgctttgctttagctccttctttatgttcttactcgaaattgcaagttacgagaatagtaattacattaagtacagatgagaaatctctatcgtaaactctacatctgtgtgtttatggaccacttcactcactttgtttctctctatacccttttgtcttgtccattgtcttcacttacccacacgcaccaaattatcatcattggcatcatctaaaattattacctagctacttattacccatcttgagttttatttgtttcaaggagatggcgatgagtacagtgtccattagattcgtttcaaaccctcgtaaaaagatttgtactcgagaggtttaatttttgtttttgtatttgttacttgttagttccgtacagtaaagattctatcattttatcgttgaaattctatctgagtcactgtgcggttatagttaaataccctagtaactagtaagcactgctatgagtctattactgacaatttccctgaaccaaaacgatagtgttcgaagctatattaaatgtggacacgtaaattcataaattcccttccttcattcaagcacgtatgggtaaaaaaagaaagatcgatgccgtgaatcttacacatcgtgccgtttcttaccttacaaaacattcaataagggaataggtatagataataagaagtctaatcgttaaagattacgtaatattcaataacttaggttgttttttcttgcactaagttacataacactcaataagagttttattttgttttcaaatctttaaagatgaagatcgagactcacatgatcttgcacgttagggctcaatccgtaaccgtacgatgacattctgttctgagcagcggagccacccacttgcgatgatagttgagtttgagaacgggtcaacaacggtaaagtcgaattagaagaagaagaagagccattactagtaaacgctgcgtttgagttataaacgccttgaacgcgaggcggtagacgccatagtcctaactgactcccatagctgggtcgtgaataataccccgacggcttaggaccagaagaaaatcctccataggacctagccgcggttaacggaccattggtccacgacgggtaatgacggtaactgtaagggttattgtcaggatgataaaagtaagaggaaacaccgcgtttggcaagctgacgttcgcgtttgtgagcgttttggtgtccacctagggcttgtgaagtaggaaaatttctaaagcaatagtgacactcgaatctcctgttgtggctgatgctattattgtccgtactgttgtctccggtttggtcttcttcctcttcttcttctttgtttttggtctggtaaggatcggtgtagtcttcttgaccggtagtaatagagaaatctctgccggtgaaatcttttccgaagacacgaatgggtttagggttcttatctttaggacggcgaatgaaaggaagctgagagaaggattcgacgttcatgaaatcttgagtttctgtttctccggtagcctcgtccatagagagagagtcagagagataaaaagactgggcgatatatagagttatgaggctttagagagatagataaacatttatataaaactgattggttcttattttttatggcaattcattaaattttctatttgttgtatgtcagaaaggttgattgatagcttctaattatcaaagagctaaagaaaggttgatagcttatccttggtctcttaagacttaagaatgatgaacggattgaatataatattatatgtaaaagtcgcaatattattcactaacggtgtggaattaattgtgttagattgtatcggatgaagattatggatctataatgcatgatctatgatagatgcttagacagacgcaaggttgttggaggttaaattattgacttcgattatatatatatacacgaatacataacataaaagcttcgtattcatattttgataaattactaattaagtatatagttttctccgagaaaatgtacttctccatattcatattttggtttttctaatttacatagtggatgggtggcattttcgtaaatatggtagtttattttgtgtaattttatctggtacacaatactttctgaaaaaatactttttttttttttgacaaactctgaaaaattactagttcacgaaaatgccactgtttttttgctaaatttggtcacaatgaaataggtccttgaacaaaatgcaataaattagtttttttttgtatatattcatttccccaacaaacttccttcaaaaccattgttccgcctggttcctgtgatatctacttttgtttcttattaaattcccacaagtgcttttccaaatagtgcacttaattaatatataggacttacgatttttttcaattccaatttcattgagattttcagtttttcgattttaaaagaaattctatagctttctcaacctaatctaggtagtacatataatatgtaacatattagttagtttggtacagttttcttttcgatactaataatttaagtttttgatcaaattggtttttattaaaagaattaatcatgtcttgtctcggttccgttaatctttaccttttctgattcatatggattagattctttaaggatctatttgcccacgggatcttgatcatgaaacaaatttttgtgatgtcgtcgctcttctaaaactcttggacaacctttgatctaaataaatgaaagacccgtttcaatttattttttaaaaacaattgtaaaaaataaacaatactgtagtaatgaaacagacacgtacaacatttatggagcagaaaatgggtcatggtaaaatttatgataagtaactaaaaaaaatctaaaactaggtgaaagttatcagggaattgggttcattacgaacgtacgtgggggtcggtgtgtactcactgatcacacatgtacccggatgttactatttatatagttcgaagagaattctcttttagggaccagcttttacttctttcatttctcttttcttggtttactgaactcttgactcattcccccggctcatagaaattcggttttcttttttgccataaaagtgtgtgcaaaaaaaaaaaaaaaaaaaaaagtgacacagttgaggggaatcgattccaagccttaatctaaaaagaatcttctataaatgatacgaacccttatgacgaaaagaaaataaagcaacttcgattttaaaaatacttaaatttaaatatcggtttagatatcccaaagcacacaacaataataaggtcatcttaatagcaaactaaacgagaaagcaaaattttcatcgccttcatgtgacaagaattataaaaacaataacatcacataaaaaaattcttttattacataaattataaaatatataaagtataaacaaatgcgccagtttagtctacatcgagagcataagcatgaatacaagagaagattgctagtacatccagcaaaccacatcaaaatgtatactttataaaatttcaagagaaccaaacaacttgtgcaacaacaccatttgattgcatagatccgatttgtgacccatgtagctgcgagcagagaaagtatctcggtgggctttagctgttgaatagaaaccgtaaataacagtgttcctttagattaatgtgaggtagactaagatgacacgtgttggtgaagagattgaataaggttttagtctagagctttaaaggtctaatcaatttatgtactttggcattataatcaaactgaaacctcttctaaagcaatatctacgacaatgttacatatatatatatatatatatatattatagttttatagtttgttgggggacatctaaaagtttgtttagtttttcagtttccacttttaataatttttggcattaaattagtttgtctagccattaatataaacttaacatcatttaattacataattgaaaaattttgaacttgaaactagaacttcttttgcacatgcttcgaagcctcggaccatcatttatctttggagattgtttgctatatccgtcggttttatacttcatccaagatctgaatcaaaattcagatggaagaaaaagtccaacatttttataagttacaaatactataggaatgacacattttagacaaaccgacgaaaaaaatacatataaatgtacaaaccaaacaaatcacacaaaggtggtccccgtgaatggagttgaaccccacaaggccttaaaagcccacaaagtctcagaaaccctaacagcaaacacttggttacaaacacctttgctttgccattaaagtcatagtcatatatgtgcttcacagattaaattggcttttgttgaagggaccatttacctctcactttctctgcttcatatcctccttttcttagatgcaactcgtccactaggaccactgctcttctttcatccatctatctatctatacctttccatacattactcatctatttaatttcttataaaattaaactgaaaagacatgtgtaaacaaagaaatgaaattctccatgcaaaaaaaacaaactatatttggtatcaaaatggtatagtcctatagatatggcatttatacaagattgtagctcatatccaaaaatttaaaacattacttggaaaaacagatctcgtagatcaaatatgtaaatgcacacccggtctgcttgaccagctcatgaacggaccggactaggttagcttatatatatatataggttagcttataattgcaatgcattaaatcattaataggcaacagccaacagctctgtattgtacgtacatgaacgatgaagtgaagaagattttaatgggcaaacatatcttgtccctcatataaccaacctcacaagcaaaactttatggtgctaaatgatttttagcagattaaaaacagcaaaaaaataaaataaaaaactatacaacaaatgaagtgaagttaagaacacgagcccaccattgtcttttcatagttaaacttaaacactctagattacacctctatatacagttatacacaatcaatgtcgatacacatgtcttatgaagagaccattttcgaaagctagacttagaccctaatataacgtacacttttatcacaatgttgtagaattttagaaaatgttgcttataaatattagtcttcacttgaacaaaatcattcttcaatcattttagtgggttgaagatatttttattgtctgaaaagctagatgagtttcatttttttaaagcattttgtatggaccacgattcatttaattattataaatggagagagaatcttttcagatattgcattaacgatgttacatgtctagatattatgatgtcatacatgtctcccgacctcttgtcaatttcattttttgtctttatcatttcgtctcttgttggttttaaattttgttagtaatagtagaagtgtagagctagagtactagacatagaatacggttaactccagtttttttgaaaacgtaaacgtaaaaaatttattttaaaactggttcgatatactggtccaagatatccgaccataacccaaattttgtcttttatgatttagaaatgttaataaacaataataaaggaaattatttttaaaaatttgaaaaattgctatgaattgtttttttgaataattcaatttgtacaattctgttatcagccacatcaccgaccgagtaaaagcaacaatccgtggcttgtttttgcttcagaagcgttgcgcaagacatgcagcgattccttagattttggtaaatgggcttttaaaaatcagatctagtggccatatgcccatatgcgtaatagctccaagtcttagtagatggccgggcggtggtcatcaaccaccaagtgctgaattggttgtcaatgggcttttagtagatcagattcgatgggcttaggcctatatgacaatccatacatcctaagattcccactatgctactcggtcagaggttcatcaataacggtcacaactaccacttacttatataataaggtatagtaggttttctaaacaaaattctaatgtgtgcaaaaccttaaatgtttaactatatgaagctggtgaagtatcattattagttactattgttttgaaacacaataaattctgtcttcacaacaattcaccacataaaaatacaactatttaccacaatttcttacaatcaaatacatcaaaatcaaaaatcaattcaactacaatagaaaaagaggcatttattcataccaaccttttatttctttttgtatccatccaaatttatcatctttcgacggaaaaatagaaaagcaccaaagaagtcaacaattaatgccaaatataaacattatacttgaccacagcatttccactggtagtattgaacgtaaaagtcttggcttgtgcatatcctcttccgaacctgaatgctccagtacctccgatgatcggcatctctctcaccttcgaaaatatcggattccggccatacatggacacggtgctgccggaaaattcaccctttgtgaaaacaaagttgaaagccataagcagaccaaagttgttctggtcggccgatgcgaaaattccttgggctctcccaacttcctctgaggttatttcaggtcccaccgtcaatatgtcgtcaacgactgcaaccataccgaaagcggttgcagaggagtttgttgtgggactcgtagcgactacgactgaggttggtttgactccggatacaatgtcatggaagtagaagcgtacgtgggattagcttctccggtttatgtcctgggtatggtgccttcactgttgtggtcactagtttctccggtttatgtcctggatatggtgccttcacatttactataaaattttttttggtaagatacacatttactataatgtggcaacgaagaagtgtctcttaagtagtaatgttttaaataatttttgaaggttcaagataattaagtcaagaataatttttgtttctgagcaaaatcaatacagagataatgttgtataagaaatagggaaagttgggacacgtatatgataaagactcattttgaaaacatgactctacttaaaacgaaacgttattcatctaattaaaattggttaagcatttgtgataatcgtgttaccaaaaaacgtttcttatctctaatgtatctaccattccatgattccactagtacatactagtcttctaatatattcattttcaaaagactattcaaatgtttccaattttaaggcataagagtgtaacctctttgtcctgcttcaccatattcactctgcgcatttgtgttggagttcttggtctagcgttgtggcgtgtatccataaagctgggcatgtatttgtcgattcttgatgatatgcaatgagatagacctcaatgggacagtaacatccaaaggtagaagcacttcttcaagctcagaccagtcaagatcttcagaatccccatcttcatattcaactctgtaccatccagattgtttatcgaactttgtcaccgtaccagaatagtagcgacccaagaaaaacttgcgaacttctctaccctcaagccattccccgcttcctacagtgccacttgatattggttcatctttggcaatcatacaatcagtttgaggttcatcaggcacaccattgataacaaccgcaggctcccccggtatctcgaagatccctggaggatgagactgtgcttcttgcttaatgctcccagtgtcctccattttttgagctatcaactgtttagagaaagctt

SEQ ID NO: 1091 - DNA, 105306 bp, Arabidopsis thaliana
gaattctacaacaacaatacaaaatttaatcttgtatgcgttatagaatatagtttctaaattattttacttgtaattcgaattgtcaccatcatttaggtaaatgcagttatataacgctgaattctttatctcaaagatctaaaacatgattaatttattatcaagttaagtcatagatcatgatgatgcgagagtgattcatcatccttgatcgataatatgtacggatgatactatatagaaataaacctgatgattgaaaaatccctattattatagacaaatactaaattatcaaaagttcattcttctgttttcttacggttttaaacgaacacaaagtataatctttgaaaataaatagttgaaaaacggtctactgtcatgttgtaagaacttcatgtgactatgtgagccgtgcatagtcaatattgaaataaaacaccaaactaatatcaatgggtttgagccgattacatcacaaatggctatggcaatcggtgaatgtttgtctgcacccaatagtccatactataatgggttcaaatttcattaaatttccgaatttcgatgtctagtccgccaaaaatctcttcaagataatgtttcaaatgttgtaatgtgtgccattgaattcttttataagatctttttatataaaaagttgtaaattcaaagcaattgtcgaacaaaaagccgcgggatttaatcgcaaaaacaatagaaatccatcgatcttacttgaaaattatgtaaaaatgctaaagtttgggcaagtgaatggtatatatatatatatatatatattttttttttttccgacgcagatgaatatctatgtctataagtattacatgattgagtatttcaaatttggaactaatgatctgattataatgaatgcgatataagttaactaaaatttggaactaatgaactaatgatgttattcgaaaattttgagctatactaaagtagcagaatcctattgtcatacaaacttaacttgtttttcggtgtggcaaaaaaaatatagtttaaacccattaaactatgagccattaatttgtagtttgtagagttgttaattaaaagtatgggtgttggtttcgtatagttaacacaattcaaggatttttgtgaaatttccgcaaaatatcagtagagaagagacaaaaggtagaaaacgttattttgtaataaatagcataagacaaaattagaagatacttggttcgattcggaacgatccaacttgatgctattgatgccttcatcattgttgcagaagccaaagccattcccttcgatcatgaaatatggccttattggccttacatgaatttatccttttttccttttagaaagttatttattgatattaagaacaccatttctgatttctacctagcattacaaaaaatgttaagcaaacgtgaaccggtattaacttgaaccggaaaaaaatcagattatttgtttggttcgtatcgtgtatgagcttcctgagataggcccaaataagaaacaaaacaatttaattaatcgtttttatgggcctacataggggttttgcgaacttcctgaattaggtaggcccaaataagaaaacagaacagtttaattgggcttttatgggtctacatcggatttttattagtaaaccggtttcagaatttggcaagggacggcgaattgaattttaattcggtaacggtttgaagttcaggaaacgagcctttttgattaaaccggccggctgtcaaattttgtgtcttggagttcttgtgcatgaatgatgctgtgaaattggaacttggaaggtctcagaagtccgaagcaggcttttttaaccctctcctctcttttttttgccttaaatttggtttaacttgattgaaataaaatctgctggttctccttgtttgttgacggtgtctaatttacgatggatatgtttcagattgataaataaaacgtccggaagcttcaaatttatgattatttgtcatgttctggtggtaagtaataagacctctgatagagaaaacttacttcttccattgaattttctactcatgttcacttttagtaacaaaattgaagagccatgttcctttttcacaatcttactgttaatacaaattaaggtctgccatatatactgtagaactactaaacctgtaagttagtcacaataatatcacattttcccaccagattcattaattttgtctctctgcttatacagaatgcaaaattcttccttttggtagtggtttcttggtattagctcctagagttacagatgtgtgtatatgtgttatttcgttatttgtagacatctgcctccttttagaaatcacctgaaattataaatatatggaagttggtaggttaggcaactaacaatcagctcatatcaatgcctctcacaacaatggacttttttgttggctagtaatgtcaaagaggcacacacacacctatttttgaactcagaaagattagctaagtaaatagatgctgttgccaagtaaacaaaaaaatgtacctacattccttctgtgcacgctgcattattgagaaccagatccttacattataataactccattgtctctaacactgtgtctttaccctgtcaagttcttaatgctgcaattgtttgatacactatagtatcttgcatgagccttggtagcttcctttacctacatattcagttttggctattacggttgctaatttattctacggttctgatacaacctttgacgaattatgatgtaacatcaccaaaagatgagcatatatataaaaagaaagtatacaaagcataaagatgttgaaacttaggaatcagaaggaaacagtcatatctcaattatccaaccacatggtctttgctttaacctttaactttactaccaaaacggtcagttagtgctctgagatgtgtactgtttgaactatcatcctaagttttgcaacttttttccctaaaggtgtgggtcactgttcctcagattctaccaagttctttgcatatcttaaaaaaacaactgagcacaaagtggtcctctaagatttaggcaatgttgtgtctcttttttatcaccttaatacactcatcacatgcttcctttttaattgcagtaactggtaggtcctcttttagctgctactgatgttaactcttttgacagtatttccaaaaacttcctattatctaataaatatactcttataattcccaactagtattgtttgtttgtagctgaggaactgttcctggaggtcagatacgtcttttaattcttttctgtatttttgttttgttactactcttggtgacaattgaaacatccttattgcaaaatttatgttgaaacgtgtccataaaatttatctgaaaaaccttatcacttcccttatgatctacaggctgaagttgcaccatctgttcccttccctgtttaactgatggagactgttccgctactaaagtctccaggtccgaaaatagcaacgtcgctatctgcatgagcctctcaaacttatctatagctttaggttggtgtcactgatattgctaatgttagttatatcttagccataccgtgtttaaatacaattattttgatagacaaaaagtacaagcaagagtttttgcgatgttgcatctacctgcattttctcaataaagtgtccaaagatgtcgttttggcatgtcattttccatttcctttcataggagacttgattgaatcagattagttgatttctaaaagaaaccatatatatgtaaccatcaccatgttgttgcatagtgcattatattggtggaggttgtgaattaatgcttgtgatattctttgattaaagtcttgtcaaatgtggaaactcgtatgttcttctggatcaaagtcctagctacgttgtcatctatatttatgttttgatttgatagtttaacataaaaataaaataaaataaactacatggttaattaggtacaaggattttcccatgttttgtcttgaaaaccatttcgggtcattgacattctctgatatcattagtagttttgtatttgtccttttgaatgcaacaggaccaacccgtcataatcaatctcgtggcatctgttaattggagtttacggtatgtgaatcacaacttttttcaagttcattgattgagatatatatagactatagaggctgttgtcttgttggtattctttggattacctaaaagaaaagttaagaaataaacacaaaagtagaaagcttgaggaattttgctttgctttagctccttctttatgttcttactcgaaattgcaagttacgagaatagtaattacattaagtacagatgagaaatctctatcgtaaactctacatctgtgtgtttatggaccacttcactcactttgtttctctctatacccttttgtcttgtccattgtcttcacttacccacacgcaccaaattatcatcattggcatcatctaaaattattacctagctacttattacccatcttgagttttatttgtttcaaggagatggcgatgagtacagtgtccattagattcgtttcaaaccctcgtaaaaagatttgtactcgagaggtttaatttttgtttttgtatttgttacttgttagttccgtacagtaaagattctatcattttatcgttgaaattctatctgagtcactgtgcggttatagttaaataccctagtaactagtaagcactgctatgagtctattactgacaatttccctgaaccaaaacgatagtgttcgaagctatattaaatgtggacacgtaaattcataaattcccttccttcattcaagcacgtatgggtaaaaaaagaaagatcgatgccgtgaatcttacacatcgtgccgtttcttaccttacaaaacattcaataagggaataggtatagataataagaagtctaatcgttaaagattacgtaatattcaataacttaggttgttttttcttgcactaagttacataacactcaataagagttttattttgttttcaaatctttaaagatgaagatcgagactcacatgatcttgcacgttagggctcaatccgtaaccgtacgatgacattctgttctgagcagcggagccacccacttgcgatgatagttgagtttgagaacgggtcaacaacggtaaagtcgaattagaagaagaagaagagccattactagtaaacgctgcgtttgagttataaacgccttgaacgcgaggcggtagacgccatagtcctaactgactcccatagctgggtcgtgtataataccccgacggcttaggaccagaagaaaatcctccataggacctagccgcggttaacggaccattggtccacgacgggtaatgacggtaactgtaagggttattgtcaggatgataaaagtaagaggaaacaccgcgtttggcaagctgacgttcgcgtttgtgagcgttttggtgtccacctagggcttgtgaagtaggaaaatttctaaagcaatagtgacactcgaatctcctgttgtggctgatgctattattgtccgtactgttgtctccggtttggtcttcttcctcttcttcttctttgtttttggtctggtaaggatcggtgtagtcttcttgaccggtagtaatagagaaatctctgccggtgaaatcttttccgaagacacgaatgggtttagggttcttatctttaggacggcgaatgaaaggaagctgagagaaggattcgacgttcatgaaatcttgagtttctgtttctccggtagcctcgtccatagagagagagtcagagagataaaaagactgggcgatatatagagttatgaggctttagagagatagataaacatttatataaaactgattggttcttattttttatggcaattcattaaattttctatttgttgtatgtcagaaaggttgattgatagcttctaattatcaaagagctaaagaaaggttgatagcttatccttggtctcttaagacttaagaatgatgaacggattgaatataatattatatgtaaaagtcgcaatattattcactaacggtgtggaattaattgtgttagattgtatcggatgaagattatggatctataatgcatgatctatgatagatgcttagacagacgcaaggttgttggaggttaaattattgacttcgattatatatatatacacgaatacataacataaaagcttcgtattcatattttgataaattactaattaagtatatagttttctccgagaaaatgtacttctccatattcatattttggtttttctaatttacatagtggatgggtggcattttcgtaaatatggtagtttattttgtgtaattttatctggtacacaatactttctgaaaaaatactttttttttttttgacaaactctgaaaaattactagttcacgaaaatgccactgtttttttgctaaatttggtcacaatgaaataggtccttgaacaaaatgcaataaattagtttttttttgtatatattcatttccccaacaaacttccttcaaaaccattgttccgcctggttcctgtgatatctacttttgtttcttattaaattcccacaagtgcttttccaaatagtgcacttaattaatatataggacttacgatttttttcaattccaatttcattgagattttcagtttttcgattttaaaagaaattctatagctttctcaacctaatctaggtagtacatataatatgtaacatattagttagtttggtacagttttcttttcgatactaataatttaagtttttgatcaaattggtttttattaaaagaattaatcatgtcttgtctcggttccgttaatctttaccttttctgattcatatggattagattctttaaggatctatttgcccacgggatcttgatcatgaaacaaatttttgtgatgtcgtcgctcttctaaaactcttggacaacctttgatctaaataaatgaaagacccgtttcaatttattttttaaaaacaattgtaaaaaataaacaatactgtagtaatgaaacagacacgtacaacatttatggagcagaaaatgggtcatggtaaaatttatgataagtaactaaaaaaaatctaaaactaggtgaaagttatcagggaattgggttcattacgaacgtacgtgggggtcggtgtgtactcactgatcacacatgtacccggatgttactatttatatagttcgaagagaattctcttttagggaccagcttttacttctttcatttctcttttcttggtttactgaactcttgactcattcccccggctcatagaaattcggttttcttttttgccataaaagtgtgtgcaaaaaaaaaaaaaaaaaaaaaagtgacacagttgaggggaatcgattccaagccttaatctaaaaagaatcttctataaatgatacgaacccttatgacgaaaagaaaataaagcaacttcgattttaaaaatacttaaatttaaatatcggtttagatatcccaaagcacacaacaataataaggtcatcttaatagcaaactaaacgagaaagcaaaattttcatcgccttcatgtgacaagaattataaaaacaataacatcacataaaaaaattcttttattacataaattataaaatatataaagtataaacaaatgcgccagtttagtctacatcgagagcataagcatgaatacaagagaagattgctagtacatccagcaaaccacatcaaaatgtatactttataaaatttcaagagaaccaaacaacttgtgcaacaacaccatttgattgcatagatccgatttgtgacccatgtagctgcgagcagagaaagtatctcggtgggctttagctgttgaatagaaaccgtaaataacagtgttcctttagattaatgtgaggtagactaagatgacacgtgttggtgaagagattgaataaggttttagtctagagctttaaaggtctaatcaatttatgtactttggcattataatcaaactgaaacctcttctaaagcaatatctacgacaatgttacatatatatatatatatatatatattatagttttatagtttgttgggggacatctaaaagtttgtttagtttttcagtttccacttttaataatttttggcattaaattagtttgtctagccattaatataaacttaacatcatttaattacataattgaaaaattttgaacttgaaactagaacttcttttgcacatgcttcgaagcctcggaccatcatttatctttggagattgtttgctatatccgtcggttttatacttcatccaagatctgaatcaaaattcagatggaagaaaaagtccaacatttttataagttacaaatactataggaatgacacattttagacaaaccgacgaaaaaaatacatataaatgtacaaaccaaacaaatcacacaaaggtggtccccgtgaatggagttgaaccccacaaggccttaaaagcccacaaagtctcagaaaccctaacagcaaacacttggttacaaacacctttgctttgccattaaagtcatagtcatatatgtgcttcacagattaaattggcttttgttgaagggaccatttacctctcactttctctgcttcatatcctccttttcttagatgcaactcgtccactaggaccactgctcttctttcatccatctatctatctatacctttccatacattactcatctatttaatttcttataaaattaaactgaaaagacatgtgtaaacaaagaaatgaaattctccatgcaaaaaaaacaaactatatttggtatcaaaatggtatagtcctatagatatggcatttatacaagattgtagctcatatccaaaaatttaaaacattacttggaaaaacagatctcgtagatcaaatatgtaaatgcacacccggtctgcttgaccagctcatgaacggaccggactaggttagcttatatatatatataggttagcttataattgcaatgcattaaatcattaataggcaacagccaacagctctgtattgtacgtacatgaacgatgaagtgaagaagattttaatgggcaaacatatcttgtccctcatataaccaacctcacaagcaaaactttatggtgctaaatgatttttagcagattaaaaacagcaaaaaaataaaataaaaaactatacaacaaatgaagtgaagttaagaacacgagcccaccattgtcttttcatagttaaacttaaacactctagattacacctctatatacagttatacacaatcaatgtcgatacacatgtcttatgaagagaccattttcgaaagctagacttagaccctaatataacgtacacttttatcacaatgttgtagaattttagaaaatgttgcttataaatattagtcttcacttgaacaaaatcattcttcaatcattttagtgggttgaagatatttttattgtctgaaaagctagatgagtttcatttttttaaagcattttgtatggaccacgattcatttaattattataaatggagagagaatcttttcagatattgcattaacgatgttacatgtctagatattatgatgtcatacatgtctcccgacctcttgtcaatttcattttttgtctttatcatttcgtctcttgttggttttaaattttgttagtaatagtagaagtgtagagctagagtactagacatagaatacggttaactccagtttttttgaaaacgtaaacgtaaaaaatttattttaaaactggttcgatatactggtccaagatatccgaccataacccaaattttgtcttttatgatttagaaatgttaataaacaataataaaggaaattatttttaaaaatttgaaaaattgctatgaattgtttttttgaataattcaatttgtacaattctgttatcagccacatcaccgaccgagtaaaagcaacaatccgtggcttgtttttgcttcagaagcgttgcgcaagacatgcagcgattccttagattttggtaaatgggcttttaaaaatcagatctagtggccatatgcccatatgcgtaatagctccaagtcttagtagatggccgggcggtggtcatcaaccaccaagtgctgaattggttgtcaatgggcttttagtagatcagattcgatgggcttaggcctatatgacaatccatacatcctaagattcccactatgctactcggtcagaggttcatcaataacggtcacaactaccacttacttatataataaggtatagtaggttttctaaacaaaattctaatgtgtgcaaaaccttaaatgtttaactatatgaagctggtgaagtatcattattagttactattgttttgaaacacaataaattctgtcttcacaacaattcaccacataaaaatacaactatttaccacaatttcttacaatcaaatacatcaaaatcaaaaatcaattcaactacaatagaaaaagaggcatttattcataccaaccttttatttctttttgtatccatccaaatttatcatctttcgacggaaaaatagaaaagcaccaaagaagtcaacaattaatgccaaatataaacattatacttgaccacagcatttccactggtagtattgaacgtaaaagtcttggcttgtgcatatcctcttccgaacctgaatgctccagtacctccgatgatcggcatctctctcaccttcgaaaatatcggattccggccatacatggacacggtgctgccggaaaattcaccctttgtgaaaacaaagttgaaagccataagcagaccaaagttgttctggtcggccgatgcgaaaattccttgggctctcccaacttcctctgaggttatttcaggtcccaccgtcaatatgtcgtcaacgactgcaaccataccgaaagcggttgcagaggagtttgttgtgggactcgtagcgactacgactgaggttggtttgactccggatacaatgtcatggaagtagaagcgtacgtgggattagcttctccggtttatgtcctgggtatggtgccttcactgttgtggtcactagtttctccggtttatgtcctggatatggtgccttcacatttactataaaattttttttggtaagatacacatttactataatgtggcaacgaagaagtgtctcttaagtagtaatgttttaaataatttttgaaggttcaagataattaagtcaagaataatttttgtttctgagcaaaatcaatacagagataatgttgtataagaaatagggaaagttgggacacgtatatgataaagactcattttgaaaacatgactctacttaaaacgaaacgttattcatctaattaaaattggttaagcatttgtgataatcgtgttaccaaaaaacgtttcttatctctaatgtatctaccattccatgattccactagtacatactagtcttctaatatattcattttcaaaagactattcaaatgtttccaattttaaggcataagagtgtaacctctttgtcctgcttcaccatattcactctgcgcatttgtgttggagttcttggtctagcgttgtggcgtgtatccataaagctgggcatgtatttgtcgattcttgatgatatgcaatgagatagacctcaatgggacagtaacatccaaaggtagaagcacttcttcaagctcagaccagtcaagatcttcagaatccccatcttcatattcaactctgtaccatccagattgtttatcgaactttgtcaccgtaccagaatagtagcgacccaagaaaaacttgcgaacttctctaccctcaagccattccccgcttcctacagtgccacttgatattggttcatctttggcaatcatacaatcagtttgaggttcatcaggcacaccattgataacaaccgcaggctcccccggtatctcgaagatccctggaggatgagactgtgcttcttgcttaatgctcccagtgtcctccattttttgagctatcaactgtttagagaaagcttaaccacataagtaaagatttcaacaaaaggtaatgaagcattagctcaatcacagaatctcaaaaaccaagtgcatctttcatagttgtatagatttcataaacaaattgtgagcagatacgatactcggatccaaaattgaacgatttatgcgacaagaatccccaaaatacgatcctaaatcttatacgagaatggtaaaattgtcagcatttgagtagcagaaggaaccctaattcccaaacgtccacatcaaaataatcaaagtacgaaagaggagaaaaaactcaccaatatcgctcggcggatgagatggaagagatttggcaaaccgtcgttattcgtagtccgtcgagtgtaaagccagagagtttgtttggaaacgcgaataactctctattcgggattgactaaatctttttgccaaccagcccttattttattttgtctgatttttggacttttaaaatttaaaaagacaaatacacatactgtagttttggtttcattgaacaaccctttcctccgctagtcttgtctgccttcttccgcatctctcttgtcttgaatccgttaaaaacatgattgatccctcgcaggcccggcttagagggtgtgccgttggtgctagtgcacagggtcctttattttttcattcattttctttaagcaatcaaggtccattatacaaacaatagtgtataatcaaactaaaatctaaacatatagaacatatattagaaaacaaattaatgagcacagggtcccacgttttgttgagccgaccctgatccctcaagtcgattccacggtaggttctatctctatctcttcttctcttttactaatccttacttgggtatatttccggtgctaaagaaaatacacgtgacaggattttagtagacttactaggccaaacaatttttagaggtggaagtacaccacttaatttgatgctgatcgtcggagacatctcaagacatatacagggttattgagggctattcgcgttttggtttcgaaaggaaactgcagtgttatcttatcacagcctcaaaaggtagcatcaggacagctacctgatggtgttgagacagtatggctttgggaaagcctatcagctcaagcaaagatggtgagtcgggatagtggactagtggcaatcgaggagctattaaccaattcggtgagtaggaaagatcaaatcatgcaatcgtgaaagaaaaccaattgaacctatatatgaaatctctaacgataaaagaccaatcattgaatcgattaaacaattatggttgatgatattacatccttataagttcattcacagaaagaaagatcaaaatgccagacaaaaaaagaattagatattacgcttatcttcaaaggtaaactaagagagatcaaaatagtatccgtctctcatatcatcaatgagagcatcatgcgtgtgagcctaaagatgatgaattatccatgtcatcgtcaataagctaccgaaaccgatgaaggtcaccatccaactgctggaaatcggtctgccaccacggctcatatctgcttgtcctgcacccattgaagtgtcatccgctaatcgaccattgttggctcccttactgcacatcataagattttaaagagtattgttgaaataaggtatatagatttgaatcatcagtgaacaaagctacacagagaatcacacaagtataaacaaagacatacattcatgtattgaacaatctaagaaccaaatccattattaccaaaataggattagctcttattgaggaaactgaaattgaataattcaaatcacaaagatagtttgaaattgattacctcgaaggatatttgcaagttccctgacctgaaaacacacattggggggaaaattacttcaacaagatgcacatatgtatctgaatctaagacttgaatttctatttcaaaagagatcatcatgataatcctgatttcactacactacactagcagatataagatatcgattcttagaagaaggctttttacttggattgagtgaagtaagagcagcgttattgttgaaattgcaagcttcgtcctcctcgccgttcttcagataataattgttgaaaacaaacgacgccattttctgaacatccgtcgggtcgttacaaggtccaccttgctgaatcggaccacaatcggctccgccttgaccacaagcccactcaatcgccgtctgtagcgacgaatcttccgcgttgttcttcgccacacaccataactccacctgtatcacttgaccgccgatctgcgcagtcgtaatcaccattaacatcgccgccgtcgcagcgagaatagagagacgcagatgagaacactgagggagagacattatcatttccgaagagagtaacgagagagggagaagatcaagcaaaggagtgttgagaagaaggttttgagttttttttttataaccgctgattttgcagtggagcaccagaaagttaccgttaaaggtatcggagaaactggaagatctaacagtgacaagagagtgaatctgaatagactcgagaatattttggaatgtttcgtgaaaaagagaaagattcgggtgtatcatgtaattcttggattttagcgctaaattgggcctctatgttggcccatgaaataatggtaaatgagtgtttgggccttggggcactggccaatgaaaaataagtgctcggattattgacgtggctcttcgtgattggttaatttcctttcagaaaggctttttgtctcgcgaccgtctaattttcttcagtttagcttttccgaggagaagatcagccatggcttcttctccgccgtcagatcccaccgatcgagatgcagaaactctttcgcagaaccctagtttaatcgagaagccgagcgtagtagagcaaggaagtctttccgtggagaatgtcgctgaaaaagccttaaatttagaatcaacacaagacgaagaaacgcagaacttgcaggatctggaggagtccgacggtagagatcagcaattagaagcttcgcttgaggaaagtaggaacgaagaggacgatatggacacgacgcaagccgtaagctcttcttattaccgccgtggaggtggaccaaagcggaagaaagggaatcagaagaaacgaaagcagctagagaagtcaaaagagaaacttgaggtacttttgaaaactttgaagccgatagctttcgctccatgtaaaaccctagattttgctcggcatgagaagctattgaagacgttaggtctgtgggattttgtgcatttggattttgatcaaaatatccgtgaggatctagtagcgaaccttgttgcgtattataattcagagcgtcgatgcagctatgtaaatggggctaggattaacgtcagccgtcccgatttggctcgagcgttgaagttgcctatgaagaaagactttgttgttacagaggaggagagagaacttctggaaaacgatgaatcggttaggtttattgatgagattgtttcaacttgtgttctactgcaaagagatgatatgtggattatgcctgtagagattgttgaatggacaagggatataaagcaaaagcatttggaaaagttagactggcccaaattgctctggttcatggttgagaaagaactgaaagcggagcctccgcttggtgattgtttttttgcttctcatctgcagctgttgatcaaatcacagaaagaagatttgctaaaggagaaatgtaaggctgatgatgaggaggatgatgatgatgatgatgacgatgtaaaggaggttgattttttggtaaaatcaccaaaagaagattgtttggaggttaaggaagaagatgttggtgctgcagattcaagaaaggatgatggtgctgtcgacttgaaagaagacaagtatgtggaagaacatatgctcgaactgaatctcgggcaagagacagtgtcagaaatggtctctggggaagagcgaggtcctgttgagggacagccaatggatgttgaggaaaataagaaagaagaggatgaaaggtgggcatggaatggagactctcatgctggttctcatttccttcgccgttgcaatcatagtagtgccagggagggagacgaagataatcatatagaaggatccatggaaatgggagaagatgaaccaattgaagatgtcgaggaagaggaaactgaggaagatacagaaaagcatgaaggggggtttcctttttttccaaatggtgattccctccagggagttggccaagggaatctcatgttgggagatgcatctccgttaggttacaactctgggttacaaattcatggcaattcaattggtggtgatttccttgcttctaggggtgagatgcatatggctatgggttcaggtagttcttctctgttcgggaatggcaataacaagagggagattgaacacgagaatggtattacttatcattctcataaccccattaataagaggttgaggaccgaagaaccctcttgggatgaaaaaccacccccagttgacatgtgtttggatcagatggcgtactgggcggaaaaagctagattgtcatttgctgaaaaagatcgagagcgtgaacaatctgttataaaccagcagtacctgatgaacgagctacaaagcaagacagcaatgattcaggaattggaaagaaccaagtttgaggagcaacagagaaaagatataatgatctataagcttgagagtgagcttcgtatgatgacaagtgtagttgagggttataggaaggctttgaaaataacacaaaaggcgtcaagagagcacagaaaacgttgccctttacgtgatgataaacaagtttacatggatgtcaaaggttctggaggtttagtcctgagcactactgaaattgaaaagctgagattgaagcaagaagaggaagacaggatgcaacgagttctagctaaaagacagattgacgattttgaacataactggcttaataaatttgaagaacacatggaggcagtagaattgctgaacgagagattgatcgagaatgaggatgaagtgaagatcttgagagaaacactttcggaaagcaagaatattgagacatctgaagttgctgctgctatggaagaaactgctacagaagaaacatgagatgctctcaaggtacgtactatactatcctttaagaaaaacatgagtccctgtttcgttgaattggtgactgaacgttttagtcgcttcctgcatccattatagaggaatcttgaatctactgtttccatgttcaaaataatattatggtgatgtccgagtatatcatatgagtagtgagagtgtgagacacacaataaagaaaaccgattttagtagatgagtagaattttgtaatgactcggaatgtttcaagtatatatgcataagattctagatatctcaaaatattctgtcattattatatccaccaacacttagtaatcttcttctttcgccactatggtttatattagttttgttttgtttttgtttaactgctacatataactgatttttctcaaatttgtctgtccctgtaggtttgcaaatccgtgaagcttttgaagctcatttgaaaaagcatcaatttagcatcttcattttgtatgatagacaatgatgatcgaatccaatatcttctttttatctctttctaggaaatgtaaccaacggttgtgatcaatgccaagtctcaactagcacaaaacattcaatcatcttttgagattcttcaacatactctgatgaacagcttcaaaaactgatttaatcttagacttttgacgattgtgacaacaagtagtagttgagtgtaccatttttggaagaaaaatataagaaataaataatgagaagaaaattgaaggaaaaggttatttaattggactttatagtattagactattagtatattccagagtataaaattgtatataaggcccaatgagaggagtgaattggtattggcactgacataagttaaaaacactggaactgacaacatctcgctttcatacatatcccaacaagtccaacacaagaccactaacctcttgtctttaaaaaactttctcctcttcaaattttctttttataatcctcttcaaaattttaaacttcctactttgtagctttcctctgtaactttactctatcctccatattaactttgactgtctcattcaactttgaaaccaaagtaaaagataaattgtatttgattaaacattatttacaaattgttaagaaaaataaaaaaagaaaagaagaggaaacaaagccaatcatgtagcaacgagaccgtagtggtccaggccaaagaacatagcacgtgaacttacagcttagccttcagatgtctccacgttctcccttttctttcccttttttcaccccacattttcagattttgacccactttgaccctaattactcataaaggtttgattcataagaaaataaaactcactaatcttgttttctttgtctgtaattatacaatgtatgacattcgtgatgtgtttgtattcgttgatatatgtatatattgatatatcatctagattctatatgacatcatctaaatgtccaggccctacgtaaggaagtggctacattagctagtaataccttacattttcacttgattttttcgaaggacaaaaaatgaaaaaaacctgaggttaaaatattattaaatcatcataattaattgattttttcttaacaatgaaataatcgtacgagtttttaaggaatgagaaatcgctttcagtcacttcaaatataaattttgaaactatgtgttaacatttcatggttcacaaatcctgttctttttgtcactagaagttaaacaagtatataaattgttatatttgtttattatatggatgatggcacacatcaaaatttgaaccatgtgaaaagagggaatctttaactattcgattaccctaaatttgatggaaaaaaaaatcattcggaaaaaatatcaattagtacacaatgcatagacactccaacaaaaaaattgaataaacaacaaatcagctaagttctttttacatatcattcccactttccccctcccactccataagaaaaaaaaaaaaaaacagatacatcaaaagcaaattcatcacaacttaaaaaaatgtgattagatcaaataaaaaaggccatcttctttgataaattaatttcttgacacaaagaggttttatagtcaagaatcttttcgccatgaaaagaaagatcttagtgaacgaacagctttagacattgaggagctgttccttctcaacggacggtttgatatcggccggagattgatcggagacattattctccatcttcttgaggctttgttgatgatatacttgtcgaagtctctctatttctctcttcaatgcttcttgatgagctgaaaatattaaaatttacaattatcagtgttgtcaataaacctaaatattcaatgagtactcacatgtttcatgttaacataaatatctatacttatctcatatatatgttcacacatggacagttgttctaacttattaatcatactaaactctattgatcttgtgattcattattactagctagatccatgttataaaataattagctatagatatatataaaccttactaaatctattcaagcaggacaatatatatttcatgtttgtaattttatgaatcatgaagcatgcattgccgcaagtacttccttgtatatagtttatattactaaagaataattattggtcgagcctatatattgtcagtgactattaaatacatggagctagtgaaacttcagacaataatagtaaaaaaaaacaaacaaatttctatagtttgatagtatccctgaaaaatatattcagaagaattttatacaatgttagaaaattgaaaaaaagttcaaaatagaaaattaccgtctttgaaaatcttatcttgtgctaaagctgcgattcgttgcttgatagcactattgtcgacgttgagaagcaatcgctgatgatccaaaaacgcaactcttggcgataacactgacacttcagtcttcattccacaattttaaatgatttgttgatcagtatttaaactttttatttagattgttttacattaataaacatagtatatctttgtgtgtaaattaattacctgcaatgaagtaacgctcctttcaagctctgatatgtattgcaatttcctcacccttgatctctgtgctgattgcctatttgctaaaattctgtagaaaatttcagcaaaaacaaaaattagattttatcgatgtgacactaatttaactattttataaaaacggtgtatcgaattatcagatactattataaactgtacgtgcatgcatgaccttccttggggttttgggaaatagtaaataaaaatgttaattacctttttacccttttagggtcgtgaatacgattaccggagcttccaccggagttttgattcgccgacggaccatcttgtggctccgtcttgcactggctttggacctcgtctgattcgttgtaattgttaccggcggcgttgttttgattggctacattattgtccatgtgatgatcatgatcggacggtggtgcttctttgttgttgtcgtcgtcgctaaggctattatgatcggacggcgtggaggtgttggaggatgaacgcgtgggacccacattgccgttgatgctgtgatgatgatgatgattgtggttattgttgtgtacgtcgtcgttgaacatggacatgaattgctcgtcgtcaaacctatcgaagtggtggtttccgacgccggaggaaggtggttcaaggaaagcaatggagtcgcttatagaacgacggtgagtcccacggcgagtcgctgagaagtcgagaaactcatccatccatgaagggttttgttgttgaggtccagcggttgctgcggctgccgccgttgcggctatggaagggagtttctgggaggagaagtcaggccaatttggcgtcgtcatggttgggattttcggaggaagttgtgccattaataaagatttaatggcacaccagatttttttgtaagaggtcaaatgaaaaacaaaggaaaggatcaaagatttgagagaaacaacaaaaaattcaagtgaggatcaagagagaaattgaaagttttagatgatcaaaatgctaaaacagattaagaaccattagagaaagagagagagaatgggatgagaaacaaaccagagtaactaaaatggctatgtataacaaagagtagttatacaaaacagaagtaagagatagaaagagagagggatgcatgagataagataatttttataatagaataaagcgaaataaaattatataaatggattcgatctcaaagggtttatatctctgagtggggtcacatggggggcgagagagatcggacagctatgaaacagctgtttcggaagaaaaattaaaaagatttgaggtctctcttaagagcaaatggagaatcaggcagcacgtgctcttagtgaacccctctcccttaattttgttttgctaaacttattttattagagagactttttcttttcaaaacagtgtatgatattatttatcctttggaaacattcttatgttttgctcttccacatgctcccgcctttctctcctcctttctccgccgtttgatcatttcccccgccttgttttctggccgtccggcgagctgacacttgggcagatgctaccggatgccctctcgtatttcctctttttaaattatatggaaatcatatgaatgttatgtatatataccactaatcgattcaagaaacacttgtaattaagtctagtttctaactttttaagatttaacctatataagctttatcgaaacattcaacttcttatggaggtgagcaaatgttttggttaaaatgttatcatttgagtcattgtctagcagacacaacttttttactcttgtttaactagtttaacgcatgcaggattactatacatgtaaatgcaaagatcatcatacgtaagtttaggagtcagtgtgtatggacattaatgagtagatagcataagagtggccactttatcaaatgacaaagaaagaatagtccaatacaattaatacacttctctttctgtccttcacatgtacaattaagcttatagagaagccatgtctatacatatatacataaattagctccctagctctatatatatactataaacaattaaagaacaagaaaatcaatcatcagttgtaacatatacataggaatttatgacaatgcaatgctaatataagggaaaaaaaggcaaaaagcattataaaatgcaagggaaagagaagaatgaattgagtgggaggctgagagtagtggaagagtggagagatagagagaaatgagctgttagaaagaaaaggagaagtgaagaaggaaccatgttcatgtgtcagaacatgtgctttgtttttatttttttgtataatattttgtgacttgtgagacctttccctctctatattttctttgtccccaaaccaaagcttcatgtaggccaatccatttgattcattgtttttataacagaagatcatttattggattaaattcactttgtatatccataaaaatatatagaaatctcacaaatacaaacttttcaaaaatagattaatgagatgacaaaataaaaaatatgtaagacaagtttggtttgattaagaatatttttgctattatgtatatatgttaaaatacaagtagttacgttaaaacaaaattgtatgcatatatatattagaacgtatgaaattatttcttagtttatgttccaactgtgaactgtctattgtttcactatttatttaaaatatacaattcaatttaatacaatatttactacaaacaatccaaacatcaatggtggtcctctaacaaagtactctaagaatattctctttaattttctacataagaccaatcttcgaaatttctacaacaagcccggcaaaaacaaataaaaaagctacaagtttaagggattcaacgagaacttatagaaactgaaataacagtttaatcaattagtattggacggctttggtacaacgaaaataaaactactaaaataaatatagttatcaattagttgcaaagtgtagtatataaccatatggttagttaaagagagatattttagtgtggtatcaaatatttcagttcaaattaaaaggtgaaaatggaaagccaaaaaaagctaataactgagccatatagagaaatagaattgttatttttgttagtcaagtgtgggttaacccgaattcaagttccacttgaagaggaaacttcgtatcaaaagacaaaaaaccatgtttggtccggaaaaagttttcttataaaaaagagagaattttccggtaaacaaaaatactgtagaaagtacacaatatataaaagaaatcatctagtaggaggagtaatgttttgatataccaaaaacaaaaaggaagggtaataatgtttgcaaactagtcattatataaaattgaaagtggttgcctatgaatacaaacatgttcatgcaagtgtacttccatgtgcttctcctctcattctcaatccacccaattctgcttcacatgtgcatatgtacatatatgcatattgtggtccgtacgtaacgtttgtttttaaatattattattgttatacgatttacaaatacttatttttctagcactcttaaataaataaaaacaattgcgtaaaatatgagataattgaaaaaataaaatatatatataagctaaagatataaaagtgtcaaaatttaaaaaggttaggtcaccattctctgtagattttagggcgagaaatcaagtcttagggttaagtttaagagttagggtttatgatttattttttgaaatcttaatttgagtttaatttccagggtttatgaagaaatatatacagatactttacagtttataatttggagtttggattaggactaattttaacaccttttaactctcacaaaatctaaactattttcttaattttgatattaattttatattattttcataaaatttcaactattaatcctaggaatatcttatgtttaaaaataaaagtttaacatgatctccgtgtggatcttttaatcaatattcaagtaagtaagttatttttacattcacatagaagtcagaccattataaactaaatccattaaaaaaactacatatggtaaaagactaaaagatggtcttatttccaagtattatggaaaaatgaaaaatgtatttagcttagtaaatatcttgagaccagcaaaatgattgagcattgggaatcggaattctgacaaaaccaatcaaatgtgacagattattagagtataactagtaattaatgtaggcttaaggcttcatgacaccaaactgtaagtaataaatttgggtattagtacatgagtaattcattacaaaaccaatttcagtatcttgtctttagattttttgttgaagccaaatacgttctcgcaaatcttccatctaaaatgatactaacaaatgatcagaagcataacaaaccaacaaaataaaataaatttccagcccataaaattggaaaaaaaaaaaaatatatacggaatcttccgtaacgattcgtacatgttttcactgtcatataatgtcacaaatcacaagactgcatttgttctgatctaatttatattcaattactaccaaaaccataattatttatatggatcacacgtttattttttatacgtctgacattaacaaatacacatggtaaaaactgttggaaaacaacaagtttagttaatagtacagttttgctatatagatcgtaccatttgttttcgtgataataataacatatatgaatctatataattcttaaccgataattaattaacacggaacttacgcgttcataggcacatatgacatagaagaaaagcatcgaattttaaaatagttcaacttgtgactaatcattatgcatgttactgtgttttggtgaattggaaaaagcttgatctgaaagaataataataaaaggcagtttgtataatgataaaaatataacagtatataataaggtgggagcataagtaacgtgaaggcagtttgatctgtcgggaattttttttgtatactttatgctcctaattatggtaattagataagttaaagtatagttttaacttaactcgtgaactcatcattttttttaacaagaatcccgtttctgaactcaaacgcaatcacaaaaacaaatacgtattgggattcataaatgccttaataaacgaaattttgtttttttttcttcttttcttttgaattatagtattgggctcacaacataattcaaaagtctttaatttacttattagatccaacaaacagaagtgatccgacccaatactttgggccgtagttgggcctaaataatattctccgtcggattatttgcgatcacttccttcctcattctcgccgtcgatcagcttctaacggcgcctcatcggtcgtcaagccttaccttctcatcccagctttggtagattctcttctttggtttagctgtttcagtctttgattttacttagcttgatcctccgaatatgagaataatgtttctattatgtttatcttcattcttcaatgtgaactcatgaatctggaatttgggcaaacaaagagtttcttccgaatgtgaacttgattgcttacaaattttgaaacttttttgtttatttgtttgctttgttcattgttgaaattgaacaaagtctttgatctgctcagtgcccacctaatatgatttatggtgtcagatggcatggcttgtggtttctgtttctctgattgttatatggttggcttctttctgcaaaatattcttccgagcaacatctatctccggagctgctattcttgatgatggcaagtagcccgatgatggtttccaccatctcaatagcttctttctttcaaaagctaatctttttttctttctacagaatttgatatctttttgtatttgatttcaggtaaaacccctcagaagaaaaatgtactgtttgttatcgcacatcctgatgatgaatcgatgtaagattttgagaatgtatctctctgtctgttgttggaatcaatgaaatgtcaagattattattgttcttcttcttcttcttatgattatgctgagagattagtcatggacattcttgacaggttcttttctccaacaataaactacttagcttccaatgcttgcaatcttcacatgttatgcttgtccactggtaatatatgtcttctcatactttctaggttggtgtattactttccttttcaaagttgttgaattggtcaagtactgagaaaattctagtttcattgaagagaagagattaatgtctactaaagttgcagattaggttcccttatagtaaaggtgaatttattttgtttcaggtaacgctgatggtatgggaagcattaggaacaatgagctgcatcgggcatgtgcggtgctcaaggtaatccattttgataaagaagggatctattataatgtttcttgtcattgcagtgaagaacatgtttttgctaatagatatattgaacacatgatgtaggttccgcttcaacagttaaagattctgaaccatcctaatttgcaggtttagttctattatatctccccagtacatgtgtatctctttatatataatctcattgggggtcatctcgcaggatggttttggccaattatggagccacgatttgctaacagagatcatcgaagaagaagtcactaaacacgatatccacacagtatgacttggctcttacagcgtcgttaaagacactcatcaggatgtcacttagaaatatttctgcatcttattctctatgtggtgttttcagataataacattcgataactatggtgtttcgggtcattgcaatcaccgagatgtgcatcgtggagtattgtacgtcagacttcttttaataccttagtcatcaaaccgcaaaatcattcctcatcactttgttgtacatgcagaaagttcttgcagactaattcaggaagaaatgtcaaagcttgggaactcgtaagtcttacttttttcccggaacttaaaagtatctgcaagctcctatcatcctaaaagaatacttgattttgtacatcaggtaagccttaatatctttcgcaagtactgtggacctgtcgacatttggctgtcaattttatccgccaaaatacatccgagcaaggtaatcatcataaacgagcagccttggaaaagcttcaaagcaatggcacaacatttaagccagtgggtttggtatgtctcattctctaaatatgatatagtatgttctttacctttgatcatgatgaatgtgaatgataagaactgaaacatgtatcgctgcttttttgttgtgattgtgtaggtttcgaaagctttttgtttcgttttcaagctatacatatgcgaatacacttagtagaatcaacccttgagtcaaaggagctcttgtcgaggcaaagctgaaacgattttgaagaaaagttgcagcttgtagtgttgtggatcactgagacaactcaatttcttttgtgtaaaaatgcattgctacaaactattcagatgtaaacagctacaaaatctgggaactcgaggcataaaacggacaccttatttttcattcctttagaataacgaaaccaatgtacatatatttttttgagggtaatgcaattctgccagaagtaaataaagtttatgtaggaataacaatgccaaaccttcaatattcatcactgtctgcaacaacgctactcttttcaaaattctcaccttaattcgacatttagcttcttctgcacctcatcacgcactttactctgcatttcgataagtcaccatttcaacacatttaacactaacaacatatacacaaccaattctatcttgctatcacgatttggaaaatttcattttgtctatgaaacggttttgaatatcttacatgttaatgatgaaaggagaagcaaaagtgattacctgcagatcattgacctcctcgtccgtaagagaccgctccatggaacggaacacgattctgtaacaatgactcgtcagccctttcttcttattggtgaattggtcaattaacttcacctgtgaatgcaataaaggctataaacaaaggaacactgaagaatatgatgatacaattaaaggatagctgaaaagtaaatttgattcctgtaaaagctaatattctctcccaaacaatcaagatataagatacctcttcaacaagatccccagcaattcctctaacaacttcacaaaaattattctctgtgaacaaatcacttatccagaaactgatgtccttgtaacaaggaggatactgcagaacaaaattttgtttgccatcgttaaacatacaatacagataagtcttcaactagagttcattagtctacgagacatggacattaagtgttttacctttgaatatggcttgaatttcactccaagttctccttttccaaactgcatgtaacatcaaatacattaatgtgagaaaataattcatatttttagacgattagtctcataacctaaaatttgaagttgtcacccaagtaatcacctgggacgtgaatcgttcatcggatgaccagaaaaatcgtatatcaggtatgtcaaacaaaaccatagcaagtctctcaagtccaagtccgaaggcccaagcaacattattttctaatccactttgtttcagaattacttgctcggtcaccccacagcccaaaacctccaaccagtcttcctgaaccgataaccagataaagcttgtgttagatgagaaactgaagtttgtgttagatgctataatttctatccaataacaccaatatgtatttgggaaaaggagaccacacaaaaatagaagtattatatgtctctttaaagcaaagatatgaaaacgaaagactcatagactaccttaaaatatatctcaagctcaaaagatggattggtaaatgggaaatatgtatcaacccatctcatctccaccgaacctggcagccaaaaaaagaagctcagatcaaattatttcatgtatatttccccaacttcttcttaaattaatgaaataatcatcctaaacaactcttaataaaccatctttgaagttatttacacttgctgaagaatatagattgtttattggatcttaatgtaccaaataagtggcgtgccaatccctcaagacatttcttcaaatcctcagcagcatacaaagtggaatccttgccagacccgttccagtcctcaggagagaaaacacaaaaaccttccatctgtaatagataaaaaacataatacacctgtcgagcaaaacagccaaagtaaaagaaaaacacagggacctcaagaatagaacacctgatggaaaaccggataatgagtagagtcaatagaatctcttcggtaaacatccccggttacaaggaaacgactatgacctttcctcaacagctcagcttggtgagcactcgtatgacatctcaaaacagtttgtgagtctacatagtacgtgtcattaagacttctgcttacatgatcagcagggactagcacatcatcaaagttctggtaccaaaaaccaataatgatcacattgaaaaccaagtgatacttctagaaagatgcaaacttgagtactgaaaacgtacttgctttgtggtaacaattggggaaaggtcttcgaacttctcaaacttgtttgagtaattggaatcaaagtaatcgtagatagcgttttttaagataccaatcggatgcttatctcttctgtgtagctgcattcctagtttagagaaaatcgaatctggtacattatttgttggatcatcctctctcaccacatctgaaaattcaataagtgtacactaaaaaatgtcaaatataacttcttttggagcaagtgcgatgttttatgaacttcacttttaagaatcgaatctaagaacgaaccatttctagcgattgcgacgccaccaatatcaacagcagagacgattgggtagcgacgcttcctcattttaggtggagagtaagcggcggaggaagaaaacgaagaaacgaatgaaaatcgtttgaagccattgctcgagagaagagctacggaggctcgactgaagatagtggactgaactgagaaaacggtcatagcgtctcgagttaggtggtatacttaagcaaattctgagagtttgacagaagttacggcaaacaccgtcgatgtagaacggaggccgatgaagaagattgcggcggcgattggcggctgaaaagagaaggagagaaaatctccgattacgaggagagatgacgtgtcatgagtagcagtagggttggaaattttgatggattgaatccatcgattttactattatacccctacgctaaactgaattgtaaaaattgcaaatggaacttatgtttatcctaaattaggtattgcaccttgatgtttattgttttctgattttgttgaaatctcaaatcttattgaccaataagagctttctacataaacttattgaccaattcaatatcaggaacaactctttcaatgtaagaagaatttggaattatggtttatgagatatctcttctcttctgcagttaaacttatctggttatatcgaaaactatctacaagtaaagctaaaaaaatgctttgtaaagaaacagacatctttgaggcttttgtttttttaagctctgctactttattttctcagcagcattctgataacacatgtagttgtaaagccaagctaatcctcttggcttagatacctcttcattaagaggcttagaaggctgttcattaatcggcttagaaagctcttcatgaagcaaacagcatctttgtttcatctcttcgatttcgttctccatcttctcatgtttacgtctgaattcctggtaagcaaatataaagcatagagaaagatctttcaagagtttgtaaacaagatatgtggaattcccaaagagatgcaactagagacatagtaaacatgtgtgaacagaagagctcaccgctagttcttgttgtcgtttctcttcttttttcgcttctcctctggcatttctctgcacttcatagacaagagcagctcctgcaaccttaaagaaggaaaagaagatgaaggcatgtttatctatttaagaaccaattgaattgatgaaagcaattgatcttgttgatgcaaataacttcaactgcagggatctagcagatgcagaacaaacttcattgaaacagaactagaacatcaatggctataaaaatttctcctttcgagtccttaagctatcaaaatctatgaaaagacatgagatttaaggtaccgtgaaggcaaagagttccccaagaagatctgcagcggcttgaacagctctctcttcgttcaaagggcgaataactgcatcagttatacgaccagaagcacgtctttgtaactttgtagtaaatctgtgattcgcctgtccaagaaccataaaagttatatcaatttcaaatctttcataaacccttgattattcttcgtaaatcagaaacttatacaatcagatacaacagacacaagattactcctttcgatcgatgatcatacacaaagattgtaatcaaaccgaaagatgggaaatttgagtgttaaaaggagtcttttttgtatacctgtgcaatgttgatgatgaattgacggaatttgggattaacaccagcttctttcttaagctggttagcgatgggtttgcagatagttcgaagagctagggttcctagcttcagaagcgggaggaccatggtctgctgaactagagacttcggctggctcatgagagaagaaaaagaacaaaggttttagtctgagtttttaggcttttaagcctttaagatcccatccaatcagaccttgccgtgcaaggaaattttgcatttttatttatattagaaattagaaattttcagattcgaatcctgggtcgggtcgggttaaattccgggtctttaaggtgatgaggatactctggtgtttttgctccttgagctaaaaatgggagggaaagagagagacaatggcgtccacaggaatggcgaaattgaaggggagtttctgcgtcactctctgcagaaatcgatcacacgccttgagaaaggaaattcatttctcacttttgcgtttgaacccagaagaagaagaagcgatcacgtccatgaaattcgagcttcgacggttttggtgttatacgaatatcgaaaatcaccgtcttctcgaaaggtctaatagctccgtcgatcggaattgctgaagttttacagccacaggtgtttgtcttttcgcctaattcgattcttttgtcattaggagaaatctggttcataggtattttgctttgtcaatgcgagaatggttttagatccagcgattttataaccctttctagtcttggattccataatttgattatatgttggtatctttgagaatggttagctctgtacccttactatctgctaaaagcttgtggtgtttgctgaaatgctaggaagatttacaaaaatggctgaaaacataatggtggattctcatgtttgggtggaagacccagaaagagcatggattgatggggttgtacttaatataaagggagaggaagcagagattaaaaccaatgatggcagagatgtaaaactttttttttgtcttctagttatatgatgcttttgtgtctaatgccatttcaagcttttactggtgctgttttgctttccatactcctgattcacctttccttttactggtcaggttattgctaacttatcaagactctatccaaaagacactgaagctccttcagagggagtagaggacatgacaagattatcttatctgcatgagcctgcagttcttgacaacttggcaaccagatacgagctcaatgaaatttatgtaagaatattttatttctggttgtaaaaccaattattttcatcttgttccttggttaaaaccattagttaatgcagagataggcgagtctgttataatattttgacatcatgacagacttatacaggaaatattcttattgccgtcaatccctttcaaggactcccccatctctatgatgctgaggttatggagaagtacaaggaagcctatttcaaagagctgaatcctcatgtttttgcaattggtggcatcgcatataggtgattatttattcattttggtgttgttatctataaaagtggcagaagtggattttatttattagtttgagaaactttgcaacagggaaatgattaatgagggcaggaacaaatgtatattggtcagtggtgaaagtgggtctggaaagacagaaacaactaaaatgctcatgcgttaccttgcatactttggtggacatactgcagttgaaggaaggacagttgaaaaccaagttttagaagtaagttgtgatgatctaattaatttaaaatttcagagtttcctacactcaaggggtcaggttgttccgcctaaatcaaagaaatttcaagactatgagcctatgatgatgactctgtccctttaatcttctctggaaacaaaacgtttttgtttgttaagctttcttgaaatttggggatatacccctgcctggacatccttagatcggagcttgttcattatatgatacacttgtgcctcttgttttggtttttggtctaattctttatgccaattgggttatgttacagtcaaatccagttcttgaggcatttggtaatgcgaagactgttaagaacaacaattccaggtaaacttagctcttttattatcgagtgcttccgtttctccttccttcgctttgctcgtctcctgtctcttttacctgctgttagatagatttatcactgctaataataaatattaatgcttttacttgttacagccgttttggaaaatttgtggagattcagtttgatgacgtgggccgaatatcaggggcagccatcagaacttaccttttggagaggtcacgtgtttgccaagtttcagatcctgaacgtaactatcactgcttttatctcctgtgtgctgctcctcctgaggtaggtcttcttagttgttctcatcttttattaaatgaatattgaagtgatagatgatataaaaatttgcaggatgttgagaggtttaagttgggggatcctaagtcatttcgctatcttaaccaatctagctgctacaaacttgatggtgtaaatgatgcagaggagtatcttgctactagaagggctatggatgtagttggaataagtgaaaaagaacaggtttgcaatttcttctttgcaatttgcctgtcacctgttgattgctaataggaacagacttatctgcttttttcttctgtctcttcaggatgcaattttcagagttgtggcttccattctccatcttggaaatattgaattttcgaagggagaagatgctgattcatcatcagtaaaagatgaacagtcaatgtttcatctccaaatgacatcagaactgctcatgtaatatatggctcttctacttttccaactaaatgctgattcttgtaatcacaatttgttattttaggtgtgatccccattccttagaagatgctttgtgtaagcgtatgatggtcaccccagaagaagttatcaagagaagtcttgatcctcttggtgctgccgttagcagggatggtttggcaaagacaatatactctagactctttgattggtaaattttctattttaatgttcaaatatcttttgtacatataacactgtgggtgacatctgctaagtcagtactcattactatgttccaggttggtgaacaaaataaatatctctattgggcaagattctcactctaggcgcttgattggagtccttgacatctatggttttgagagctttaaaaccaacaggtgatggccgtgagcatgcatggttcactttacaagcatatgcttggggtgatatcttaagtgtcaaaacacaccaagtgtcctatcgtctaatatacaaattttcagtagtcttttcccttgactttagtatgaggagttaattgaatagaaacctttactctgagctaatatgatagacatattattagctaaaattgtgatcttaggaaatgatgtcttttgtaagtttccatgactaaagagatatctataatatcacctaatcaacctctactccagttgttcactgacttcttaatgctatccctgcagttttgagcaattctgtattaattacacgaatgaaaagctgcaacagcatttcaatcaggtatgaggtcagtcataggttatggctgctgatttggctcaagagtctgttaattaatctgaacttattaatactgtacagcatgtattcaaaatggaacaaggtgaatatcagaaagaagaaatagattggagctatgtggagtttgttgataataaagatgtcgtggatctgattgaaaaggtttgttttatccagtatctgtttccttccctgtataaacacggattcatggcttaatatttgcgaccaatttggctaattcaaacactggacagtagaaattctctttagagagcatactgccatcatctaaaatacattattctacagctcaacctatgtgattacagaaaatgctagcacttgtagcttaagtccatgttggatatttttcctgaaaattgtaagaacattttgaaaggttcatgaaagcatgtaagagttctatatgttttcaatatgctctagtgtcctagcttactatgcattgttctgacttgaaaacacatccagtatcgttttttttttgtttttttttttgccatcacatgcagtgtcgttatttccattgcttcatgctacgtttttttccctgaaaatatggtttcaatcttttgcagaaaccgggtggtattattgctctgctggatgaagcatggtataataaatttttctccacttgcagctgtactttagtgttttcttacacagtaactattttctccaagtaccattattatgtgttataaacgtttcttctctctgcagcatgctaccaaaatcaactcctgaaacattttctgagaagctgtatcacacattcaaggatcataagcgcttcatgaaaccaaaattgactcgatcagattttacattagttcattatgcaggggatgtaagttgcatttcacactctgttgcttcagaattaaaagtatagagttatgatttttaaggtctctttcccatgccgttcttttcaggtccaataccagtccgatcaatttttagacaaaaacaaagactatgttgtcgccgagcatcaggatttgttaaatgcttccaaatgttcttttgtgtcaggcctctttcctcctcttcctaaagaaagtagcaaatccaagttttcttcaattggcgctcgtttcaaggtgacttgcctgcaaatccattaagacttttaactaatagataagactgcattattggaccacacataagatattgttgaaattttgatgccacattcatcatctgtacggactgacatgtttaagtaattggtgcagctacaattgcaacagctgatggagacattgaactctacggaaccccactacatcagatgtgttaagccaaacaatttgttgcaaccaacagtgtttgacaatgccaatgtcttgcatcagttacgctctggggtctgttttcttctgaataattcataccaacatctttgatgtcttgaggtgttatatgatatttgtcttatgcagggtgttcttgaggccatcagagtgaaatgcgctggatatccaacaaatagaactttcattgaatttttaaatcgatttctcattcttgcaccggaaattctgaaaggagagtatgtatcagttctccccgttaagcttggacctttcttccactcttgtatgataaattgctccttgagtctgtttatcacagttttcttaccttacactaatcaggtacgaagcagaagttgcatgcaaatggattttggagaaaaaagggcttacaggttaccaggtaaagttcctaggaagttcactaaatgtaaaaggaatcccaattttgcatgagttgaatacgtgtagaatcttcagtattctatgaaatttgagtttctcagatagcataactcccctaggtgcgtgttgatcatataaaatctaatttgcagattggaaaaagtaaggttttcctgagagctggtcagatggctgagttagatgcacacagaacaagggtgctcggcgaatcagcgaggatgattcaggggcaagttagaactcgtctgacaagagaacgatttgttctcatgcggagggcttcagttaatatacaagctaattggagaggtgagggccttaaatttttttttttttaatggcgttatggtttcattgatatgcagaggaaattaggaatgctgataaagtctctttttcatattttaggaaatattgcacgaaagatatctaaggaaatgagaagggaggaagctgccatcaaaatccagaaaaacttacgtagacagattgcaaagaaagattacgggaagaccaaatcttccgcactcaccttgcaaagtggagtccgcacaatggctgcacgtcatgaattccgttataaattaaccactagggcagcaactgtgattcaggttctattctcattactaccctttcgtacttaacaagttctcatggaatcattctatctcaagaactataaatgacgttcaactctaatcaacttgcaggcgtattggcgtggttacagtgctatatctgactacaagaaactgaaaagagtttctcttctttgtaaaagtaatctcagaggaagaattgccagaaaacagttgggacagtcaaagcaggtattgcaaaccaatccctgcacgtttgtttttagtatcaagtgttttcaattactcagcatgtagggatacgtagaaaaaagtatctggttttgattgatgtaaaatcatatgtataggctgacagaaaagaagagacagaaaaggaacgcaaggtggaactttccaatagagcagaagaggcagttgatatgtcctttgtactgcattcagagcaaagtgatgatgcagagagtggacatggacgaaaggcaaaactttctattgaatcagaagatggacttgataagtcctctgtattgcattcagaacaaagtgatgatgaagagttgggacatgaaagaaagacaaaactttccatcgaatcagaagatgggcattcagatcagagtgatgatgaagagatagaacatgaaagaaagacaaaacattgcatccaagcagaagatggaattgagaagtcctatgtaatgcattcagatcaaagtgatgatgaagagataggacataaaagaaagacaaaacattccatccaagcagaagatggaattgagaagtcctttgtagtgcattcagatcaaagtgatgatgaagagataggacatgaaagaaagaccaaacatgccatccaagtagaagatggaattcagaagtcctttgttacctgttcagagaagccttacaacacgttttctgttgttagtcaaataacgagtcctattcgtgatacagaaattgaatccctcactgcagaagttgagatgctgaaggtaatgtttctatcatccaccaacattgtgaatagattttagaaacagcgtgctaatatcctgaacaatatattgcggctatcatcttgatcaaatgcatggaggataaattttatatttatggtatttttcaggccttattgcaagttgagaaacaaagagctgacatttccgaaagaaaatgtgctgaagcccgagaacttggggagagaagacgtaaaagattagaagaaacagaaagaagagtttaccagttacaagactctttgaacaggtattattgaatcgtaattttaacaaccatagattatcttccttcctacaatttttactccttggttaaaaaatttaattaataaatctagtacatttaatgatgataagtcttgtttagtgtattccaggttgttatattctatgtcggaccaattctcgcaactgaagtccatcttgagatctccttctatgtcagcttcaacaatggcctcagcgccagttgtgcgtgatgatcttgctgacagctctgagaactctgaagcttcatcaagtgattccgatttcacttttcctgctccatctccttcctcagacaatttttcgacttttaacccgaatcagctgcaagtcattgttcaggatctatcaaccacagaagccaaaggtcagtggtaatagcactaaaatcccatgaaagattgcaattcatttgtgtttttctttttttggacaatttttttaattcatttcctttttgttacactagcctctaaatccaccttaatataaacattttgcacatggtatacattgttaatggaatcatccttcttctcatcttgtagaacaataatattgcaggaactgagagctacgacagtgataaggaagggggcttcgaagattacttttgatcatgaagtgcagacttgatctcttcacaagatttttggagttctgacaatctctttactccattgttgtgccacagggcaaatgttatagtgtttacacttagttccaactgcaatttgtattttcctcaggaatagatgctgcaataactatgtagggtcattaagatatgtcaagttccatgttgttaattgcatacacaagccatgtttgttacttcactaatacaattgttgctcaatttcagaattactaatttgctttgttttgtcctcatcatttcgaggtgtgagttttgaattcttcctgcaattttagttccatgaatgagatcattgttagtccatgaatgagaaaatacagtatccaatatcttagttttgtacgaactacttttcaacaagcaccagtggtctagtggtagaatagtaccctgccacggtacagacccgggttcgattcccggctggtgcaaaaagtatcaatatgctattttttcgtaggtccaaaatttgaacagtcgctatttatacataaaggaagtaaaacactctataaaatccaaatatattaaactttttataagttttatgaaatgtgtcctcatcccaagcactagagcacactataacactggaggcatacatcattacactggttggtgacaattagatcgtaggagccaacagagagagactgggaatatcatgagatcatggatgaatgttcaggaatactccgggtttgccaattttaccgagtaagatagtatatgactagaaataaaccaacaaacgatgccacgagcgtcagcattcttcggcttgactttgtctcaaacacctgcaaggattcgattcaacatatcaaagacacagacacagacacaccaaaaaaacaaacatgtcaaagacactttgcaacacataatgaagctaggcttagggttctgagagagtatttctagtcagatataccgttttaaagcggtccatggttcctgagagaaatccccttgatgaatccatatcattgccctacatagaaaccttgcaaaatgttcagtaacaatagcgtctgtgagcaaatgataaaatataagtatcacaaatattctggtaaataccattctgtcaagcatgcggttatgagtatcgacctcttcatttatatcgccagatagctgtttcatgaaaaaagaaacaaataagaatctggttcaaacctagttgtgcatatagagtccaactacaacaacaatgttgaaccaataaaactatgttacggtttccatactaatcctatgggcagtaagtagtagatacagaaactcattagtgtacaaaatgaattgcaagtgtatgttcctattacgtttagggcttacttcatattcctaatcctactgaaaagtgctgaacacaagtttgaacatgacagaggaaccagaggcaggcttactcgttttaagagaatgactctatcttgcaatccctccaaggcacgctcattctcatgttcattgatctcatgagagtaagaagaagcagctctaattcctccctcttcgatgccatcaaagagagaacttctaccaccacgaggctccctgaaatcaaaattagacctcagcaaagaaacagtaacatcttccactcaatctaaattagatgaatttgaaactgatccaaatctatcagaatacagagcaacagtcctattctactgctccttcagatcttcccgatgaaacctaatctacaaattaacgagctcatgaaaacacatctaatcatcagatttcgctagatcttaacctccaaattctaaccaaagatgtgtttgaaaaagtagcgatttgaaatcattcaaggagagctaaccttctaggattcatcgatcaatcgaattaacgttttgatcctccaacgatgtctcgatttcgcttcaagatgttttccagaattcacctggatctatggtttcacaacgaacgcaaattaaggaaggaaacggttgatatgtcgaaagaacagaaagctctgtgtttatcgttcttaagcgaatcaacactcaacaacacgtgtatacgcaagtaatggataatagaaactatggggtcaaatttaaaatcaataaattgttttggaccaaatatagatttcgttatttccggaataggtcccgcgttttttttctctttttcacgaatcagattctcttctcttttgtatacaaaaaccctagtcgacggcgctgttacaccgtcgtccagatttttcaaacgccgacgaagctgatttagtgaatatggaatctaatggatcagtttcatcgatggttaacttggagaagtttctctgtgagcgattggtggaccagtcacaaccaatctcggagcgatttagagctctcttctctcttcgcaacttgaaaggcccaggacctcgcaacgctctaatccttggtttgttttaacactgctgctcaaaatcttgtcttttttatataaagtctatttctacaaaaaaaaattgttactttgggaaagaaagatattggcgcttgatgaatgtagaaactctgattcttttatttgtgttttctttgaagcttctgtataaggctaaattgaaagtctttgcagtttgattttatagctgctatttgattgatgcacctaaaactacatacaagtttccacatttttacttttagttaatgattgaacagagcttcttcaagctttgtgtgctgatatggtgtgttactgcttgtgtttaacttctggtttatcttttttttccatgtcctgcagcatccagagactcatctaatttgttagcacatgaagctgcatttgcattgggtcagatgcaagatgctgaagccattcctgctcttgagtcggttcttaatgatatgtctttgcatccaatagtacgacatgagttgagtataagttgatccttattttctctgtatcagtataagctttttgattctttcatatcactgattcgctgttaatatattattacaggcagcagaagcccttggagctattggtttggcgggtaatgttaacattttaaagaaaagcttgagctcggatccagctcaggaggttcgggaaacatgtgaattagctctcaaaaggattgaagacatgagtaacgttgatgccgagaaccagtcatcaacgacagagaaatcacctttcatgtctgttgacccagcaggcccagctgcgtctttctcttctgttcaccaactcaggttcttccactcttgaccacctcaacattctctagattatttaatattttgtagcacgttattgattaagatcatcgaactacaggcaagttctcctggatgaaacaaaaggcatgtatgagagatatgctgcactgttcgctctaaggaatcatggtggagaggaagctgtttctgccatagttgattctttgagtgctagtagtgcccttctacgtcacgaggtttgtcaactttcctgtattatgttcatgaacttgaatgtgtctgtttttgttaaaatcttgtaccttgaatctttgctttattgctctcgaaccttaaatctgtataagtgctgccttgtaattgatgcaatttttcttaggttgcttatgtcttgggtcagttgcaaagtaaaactgctttagctactctaagcaaagtacttagagatgtgaatgagcacccaatggttagacatgaggctgcagaagcgcttggttctattgctggtatcttccctaaaatgcttagtttgagattacaacaatctactgtcttagtctttagtctttacttactcttcacattgctcggcccttttcagatgaacagagcattgctttgctagaagaattctcaaaggaccctgagccaattgttgcacaaagctgtgaagtagcattgagtatgttggaatttgaaaattccgggaaatcgtttgaggtaaaaacacattgatcccaaactcttacacttatatatatctaataaatctgtaatgaccccatatcgaaacatttttgcagttttttttcacgcaagacccgcttgttcactaagaatctcaatcattcttcgtcaaacatttaccgacaaaggaaagcaaacattttatacagagagagaagaaactgctactttaacatgtctttatgtacgattataaataactctattcatatgtttaaggttaagattacattgtcttatggtacggaagcttttcattgttgaagaaagagaatcctttgtgttttattttcttgtttcttaaccgtttctttagaatcaaacatagaagagtaagatatacatagaaaataacacatcccaggaatgaatgttatctttgctcatgtcaagttttaacaataagaggaccacactttagttctaagttgtagtactgtactaaagattgaacatgtttacctaactataattaagaagttttaagaatctttattaaaaacaaaaactgtaataaagaagtgtcttacttattggtatttttagacataatgtcccctgaataggatgcaacttaactactttgttctttgtcacttctaaatgctttaattatcttttaatcatttcattggttttgtttatgcgaagtttgattagtctcatctaatccaatttggaatttcccaccaagaagcttctctagttgattactcatcaaatttcccaactgattgattagtgacaatgacaccaatggaacacgatcgaattcttgtccttttcggttcttactttatttttgtctaaaaaatgctaaaacaataagaagaaaaaagagtttgaccaaaaagaagaagaagaagagcacaaaagagtagcgaagcccttgactttgacagtagcaaagctcacacgtgtgaccaaactcttttttgcaggctcagcggctttgacagtgggactcgcacaatttttttgaaaaaactacgaataagttttttttagtatatggttataattgaattaaggtccttgaattaaatgttttactagtgttctctcactcgggagaaaaactttaccctcaacataacccctaagattgctgggcctagagacgaaaagtctaattgcacaggtattctaatcttgatatccctaatgggctttatgttcttctactctagtctattcgtacacgcaaacatatttgatatttgtattgaatatcatttcgattattttgtcttgtaaatctacaaccgacccagtgatactttaaacctagttgatatataaaaagacgtagcaacataagaaattgggggttgtatcaagtagttcaaactagttgctaagtggattgtatgctcatactacttttcataacatgatattatatatatatccagatattagtggatgtgatcatgtagatgaaccctaaatccatatccagctattagctacttgctcgtacaaaataagaaacatgggtctcatatatccagtgatccttttagcgcttaaatagaagtagacgaatctactatagatatggtccatagtttgtggatctattagagcatttgcattggttaactattggtaagtgtgtctttaaaatttaataataatactttttatttagtttaattatttaatttatttaaaatatgaaaacaaatgaggagttgacacggggagaaccatataagagagagagtattcaaatgtctttgggtagaccctctgtaactaaaaatgactactgttctctttttataatattttctaaaactaaagaccctcatttttacgtgaaatgcagatggtcttaaaatgtatgtatatctttataactcaattaattagttaaatctaggattgcgttttacgtaaatgatgatatatcaatgaacaaagtaaatatttgaaattaactattagcaacaaccaggcaactaattaaattttgcagaacagttagagttagaaccaaaatagttttataaaacttctttttaaatccggaaaaataaaaaataaaaataagatgagaagtcataagtgttaaagttgtgtctacaaaatttgaagataatgatgaaacatcgacgaatgtatgtatttgaactacaacatcaacaaacaaaattatatgtagtctgataagcacttcttgataaagatgtcacagacaatcgattcgataatgagcattaattatctatatgtatataactgatatgccaataatttggagagtatatccaactacttaacatgtttacatacttaaccaatatcgagggaattttcgaccatgttaaaaaaaaacttttaaaaaaaaaagatcataatttactaagaaatgatccacaatccgctttctccaatatcgagggaaattcacgaccaggtcaggtgtactaaagactgtacgtactagcagaatctaaagaatcaggacaaacagagtttggcgagctagttagggatttctgtcgttttatcaagatcatgattaaaattgtgacgatatggagaagaataacatgatatattttgtgcaaatataacactcaaaaatcgaaatatactctaaaaaaaacatcttgaggatgtaaatatatatctttatatatttctagggcatctactacttttatttataaatacaaatccggttctttgagctacggaacattttcaatcgaaactaaaaccatcaaaaaatcttcaaacattatatataagctatatattatatagatcggatatagataagaatcaacccatattcttgatagaaccatatcacgagaaggagatgtagccaaaatttgctgattgaagctctttgagatgatcctgattgaaagtgttcaggtgttgttccaagtcagagtagatggagaattcccccatgcctgaggaggtttcgttgtggtaactactctctgtggcatccccgtgttgaaccgtcccagaacttccagtttggtaaaccaaatgggtctgatcatgatgatgataaatattttgatgatcatgatgataaggagccttagtagtgtctccatagtaactattagggttttctgatgttggtgaatcagcaaaaatcatgctttgtgctgcttgttgctttagaatctcaagttctgcttgtaaattcacaacctataaacccaacaaaaagaactaattaattacaaaatgtcatgccgattaaatatatttatgtagatatacatatagttttgtgaaagtatcatgattagggttctgaaaggtacctgttgttggagagcaaagatatgagaaacacagccatagatgggatcttgaagcctagcttgagcttcataagagattgtaatagcggcttcacagcgatcgctaatgggaagatgagagagcaacttagaagcattgctagctccaaagaccttgtgaatggctgcaaagtgtgaagctccttgttcatgacaaaagtatggagcaaacacacatccctttgcacatttcctcctaaggaacttacaagcaccacaaggagagccagagctagagctggaactagtcatgatgatgatggtgttgtgacggttcttgatattaaaggtcgaatttaatttttgtgattaattgctattggtattaggttttgatctaaccttgagtatagctttaaggagagagattttataaacaaggcaaaggtgaagatgaaggtgggttacatataatattacatttgtttaattgcatcttgtctgcttaatggtctacacttctcattatttatttttattcattccttttgcattagtacaattttgtttttcttgttaaagaaatcgacaaatctttttggaattttgtatgcataaaacgagagatttagtattttattttaattagggggaaaacagccttggattatttatttttaataccaaaaaaaagatattgcatagtagaacagaatggacgtgtacatctctactaaaccaatttgattaaaccgaaagcaaaattataaagaatagactaattacacaatgggccttagttttttttttttttttttttgcctctacacaatagaccttctaacctacccttccagagaccatctatttactcaaagtaaagttgagttgattgtcattggaaatttggaacgtaaatgtctatatgatgtgtttatcatatatttctgatattttcgtatcatttaaaatgaaaatttcatcattattctgtctcaaactacaacatcttgatggtaaaaaattttatcgcatagcagttgtggaaagaaatttaccatcaatatataaatgtaactatgaaaaaaaattacaatatcatcgaagactactgatcacccattacagttactgtttctacgttttaaatttaacattttctccatcctctatcagtggtacgtggtatagtggttggagcgcctaaattgtaaggagactgatcaatacctcaatccttcaagaggcttattgtataccaataattaagggatccattagtgaatatagtattttatgtgtgtatatatactctaattgtggacctgctcctatctacctacattctttcatataatattaaatatatattggttaatcgatctggatacgatcccttgaattttctaggagacctaggctagatcatatatacttatacacatgcatgcgttaaacactcgtgtatatataatatgaaacaacatatcttgcatcaaaataattcataaataacttgttgatctatcataattgcttgttgcaaaactggtctattattacttaactttacaaaccatgctctcgtaaaactagattctttgttcagtccatgcatacatttctttgaatttcagataagagagtaccaaaaaaaactcaatacatgttaaacaaaaaaaaatgtatatattaattgggactttaacttatatttctaacatgtaaaagaaaatgtgccaacgatatatagagacaatggacaaacgtctggtatatgatatatttgaacagtacgtagggtcagggttgtcgagcaatactgagaactataatcttaaccttaaaataatatattaattataataaatttatttgagatttaagtgaacacttaaataaaatctaatttgtatcacgcatataaaccatcatgtagacctttttcaggtggcaaacaaatcagttctcacacccaagagctccaataatgacactcttgatcccataaatctctcttgtcctactactactctcaagttacaaaattatactaatatacgaggaacaaattaaaatgaactaaccgtagtgatcaaacggttgaaaactctcttgctaatatcaagatcaaccattgaatcatctctattctgatttcatcttggtaaatttatacattaattagtaatagaaaacttaaactttctatatatagaatctgagataaaaaaaaaaaaaacaaggcttggattgagaagaaatcgtgtataaaaacaaaacaataatattagcagtatatttattcattttaagtttctaactttattagttgttgcacttgcgaataaaatagtttaaatataatatgttatatgtaactaaacgtgggtggggatgtggattaaaaaagttggttaggtcgattaactcttatagagtctttctgcactatgatattcaacaatcagatctattaaaactacgtagtatatgtttctctatactttaaattttcttagaattcgtatcgtcattttgtgaaaatgtattagttcacattattcatctcatattttcgatatgtctatcatactttccatatagttttgtatattttatgttcaaatattaccgccactcataacgaaaatagctactcaaaaaccctttttatatttattttactttttaggttatcttatttaggtcttattcttaacctttccataatgatgaggtcttacaagctgcgagttttttaatcataatattttttgtttttcgatttttttttctgcatgtttttaatcataattcaaactcctatatttgaactaataaaataaagataaatcacaattgtacctaaagatgtgtataactaaaaatacttacacgcttgattagcttgattaatagttactagattttaacccgcggtatatcgcggggacaatatttttttttaaaagttagtatatataaaagtttgtaaattgtatctatctattaaatatttttattttatagtttacaattgttattaagtaacgtcctgccaaacccattccgccaacccgtcctgtaaaaaaacctatttattttattaatgttgatcttatttatgatatgtttatgaattattgtctaaatattttgtaattttgtagtaattaactactatcaaatatctctgcggtttgatgcttataatcgaattgttaaagtcatgcaaaaaaacaatatcaaaaatgataattttgtcatttttaaatatgttaaatattttgaaagttttattttactaactaatcgtgtagttaatgtagagatatttaattcgaagatagttaaatgtaaaatatttaattcgaagatttagtttctaattatcaaaaaaaattattaaatgacagtggaaataagtctcaacttgaggatttatttcacaaagtgaatgcaaaaatgtatatgtagattcgcgtatataaatatatatttatacgcgtagaactagtttttttttttttcactaactagttttcagtacgagcaaatcaaaaatatgctttaatatgcttgattaatagttattagcgtatataagtatgtatacgcgtagtgactagtaaggcctcttggtgtagcgaaaggacttagttttgtttttttcttcgatcatttttgtacgtaacttcgtttaaaactaagaaaacaattagacagaacaaaaacctgattaagtcatcttccattttaattaagacagcaaatgagcttttgtcagcattatatgtgtaagcagacaacttttcatgttctcgcggaacacttcctttcaccttctctactctatctccatcaattgctatacgtttttaaaaaataataatttattcctattttgattaagttaataattaatttgtttcttagtcaagtattaattgaaggtctaaccaacttgaactcaatcgactactaattcttggtgattatttaccatcaaaatggattcatattcgagccattctctgagtaatatataattaaggaaaaacctaaaatatactcgtgaatccacaaaatgtttttacgaaagcaaattttaaactttttaggattggaagacactatactagttgaatagtcgataactatatatttaatcaatgaacagtgataattaggctatctagttggatggtgaacatatgactaagctagtcaagtgacattctgaaatgattaccaagattggggaaaacttaaattataaaatattagttctccaagaatgttaaaacatttatctcatatttaaagttcagtagatcttaaatgatatatataaaatatgtatatttttattcattatcaattaattttgaattggtagcctataatctaatatacactataatactttttttctgacaaaacgctacaaataactcttctctaaataatcaccaaactttttggcatattataggataacgtgataatgtgttgatcatgtaaatgtcggtgactataaaatcatgttggaaatatatagttcgaagaaaatcaggtgcacatacatagttgtataagatagtttaaatgcccaaatttgaggaaatttaatggtttgatttcgtaagagtaaaatattgtaatgtttgaaaaaataacaggttatgtatagttctccgcctgttttgtcaaattatttgtcatttttatgggacaagccaaatagaaattgaaaaagggaaaaaaaaaatagtcacaacaaacagttataaatcttctcttttttgtttatcaactaaagttatagttatatatgttctaccaacaaaaaaaaggctagagtagagaccgtaaagttgataaaatattaagaaaacgagagaaaggacaaacatatcgccgcacgggtgaacagttctttatatgtttggtctttaacgagtggatcctactttgaccatccgtccacgtcacgcgctttcttttaacaactcattctccatcccattttcactttataatccgatcattaatactcaactatttattcgttaatcaaatcagtgttggtctcaactaaatctcaatctatcatagattagttttgatccctaatataataagagatttgatgacaacaaaaacagagatttatgctatgtaaattctgaagtttaatcatcaaaatggtcataactatttataactttaagttagagtttaaagagtttaacattagttatatccttaaaattgaatattgttttgatgaaatccataagcagaaacagtaaagaacgtatacgactagtcattgttctatttgatgttaagaatatagtcttttatcaatttctaggttattaaacattgagatacagctaatgatacaaataaagtatgaagtatgcttaacctcattaattatgtacataatacaaagagccttcattcgtttgagcgtaatatacatatgatatatgacttgttggtaagattagttttagactaaatattttggttttgagtatagaaataaaatgttggaaaatgatgctgacctatctgaaccctgacgagggtcaacccgacaacatatgatctcacgtggggccatcacacgtgtctggaatttaaacgatttatatacaatggagacttcaaatttaaattacgacataccagctagattaacacacataaatccacacgtattcgttgtatagtaataaatgggatatgtcatattgtgcattttaaagttggcatgtaattctctactatctttgtgttcgtttgataacaatcatcatacgtggaggtacttgggcatatatattgcaaaaaacagagaaaaaaaaatctttatttaacaaaactttataaataattctttttccagctactatctaatcaggaaaactaaactcccaacaaacaagaaacgatgaacttcgtgaattcttttgaagcagatgatacatttaacaaaaacacaaactgacagttgcaataacaataattaaactttttaacaaaaaataaccataactaaaaagctaaatgttctatagcatcctccaattacagtagtttaattttagtctaggattaattaagttaaaaatgtgtataataaatatgtactttgacgaaaaggcaataattcaaagtctaaaccacaatataaggagatggtttactcaaatcaattaagttagtgagagtgtgacaaacaaagctgtcttttaaaatataaacaagtgataatcaattttgtatttttgtgtgcaaataatcggtgcaattgatataataccttccaaattacacctaagaggcgtaatatacaaaatgagaaaaatattgttttcttaatagacgagtaatgtatgtgtataagcatgaaccgtaaggatatatattatccaccaacacaaaaattgagtgatatatacatgatatattaatacacaagcatataataagtaaataaatttatgtatagcatgcttgcatagcgtttcaaataaatacaacatttgcatatacataagttccttcaaatataaaacttactataattagtctagaaacgaaagtgttaagcttcaaaaaattactttatgtctattctgattttaacgtacctttagggtttggatgtaccctcgaataaaaacttaggaatacagtaaaaaaatatctatatatactttgtacttttgtaggataattgtttatttttgaagggctaatagtttggccactaaaatttatttagttttttttttccatatttaagtgaatccacaactttaaatatcttaaataaaatttgtttgttaattataaacgtgaaaacagaagaaagtatttgtgtttaaaaaaaataatttggctgaatattacattttcctatttctatctgttttagctatcgtaatgactactgagcatatgatcctttttgcacatatgatgttataagaaaaaatatgtttgcaatttcacttatgtaattgtaaaaagggaagttttggttaaataatgcagttttctgttcatatgtgtgttatgatcatttttgacatatgtttttttaacgataacatgaacacacgatcgaaaatggacgtttttgaaacaaatttgatactctaaaatattcggtggcttcaaactttaattaagtatcatgagataatataggtgggtctatatacacgcagaagcaaaaagagaaagaaaaaaaaaatgaaaaatgaaaaaccaatcatccagaattcggaaaggaaacacatgctaataaacacgaggcaaaatgcggctagggaaagacgagtttgtaactactaagatgaaactaatgtacgtgtgtgaatacatgattcgtagaagtttacgtctgagttctaaacacttcatgaagtgtcaaagagaactaatattcaaaattgatagtgattagcctgagaaactaggagtctctcaacatttcaattttgagttttctatatcagtgttatcagactttggctaatttttaggctaatacaattttgtttgttcataaaaaaaatagttttctgcatgtcggaaaaaaacatttctacatcaaatgcaacatcaccacatgtatattacagattacatatttgcatattgtatgaaatatcaatgtttctgatggagctgcataagagataacacaatgaagatatactatacagaataattctatcaactaaaatattttttatttttataacgaattgtttctaatcgatgaaaaaaagaaaactaatgtatatgaacacaaattaagaggctgctttccaatgggtctatgtaattgcaatgcatgctgtctagttattatctcttggatagtaaaatgaaacccccccccccccactctacttgcgcttgcgacctatatataggcctataaccctactacaattagcgctatcaatcagtgaatttacaccacttttcatcaaatcattaatttcactttctaaaattaacattgagtgggtaaaaaaacaaataaacctagggtgaaacaaattgaactttttatttataaggctattatttatttttctttatataactattctgggttatgaaatcgatttaatgaagaaattttttaaaattatgagatgttaattgatttttctttgaaatggttataactaatataccaaaatataattaaatcggattattattcgtttgactcatgtgttttcaaatgattttcacttaagactgatcgacgagtacatcctacttggatcatcatgtttgggtcaacaaaccatgctttgatatcatgtgacaaacgtaatttttttgattctaaacgatttgataatacatagattagtctatacatccattatacattattttatatattctaatttaaaatatggatcatatacaaacgtatcccatttaacaatttctaaacacatttagtttatttttaaaaattgtttataaatcgtatatacacaagactggatgtaaaatcacataataacaccaataatactaatgcaaataaataaactacagatgtgagtcaagtactgtactatattggaatttttttgggtggggaaaaaagaagataacataaatatatatgtgactattaattaagcccgacaaataggagaattgtggctagaaaagaaaaactttgtaatataaatattacaaagacacacttaataatgtctgataaaagaaaacgactttatgttatgtgatgcacacaagttggagatttttcttaaaaaatagattgatatgggacataatgcataacagttagttaacacaaatcaacatgattcatatgtttatatttctttaaaaagaagaaccaatatccaaagcaacttataattattctttttatatatcctttcctttacagaaactataatgatgtttaattaattaattacgatttggatgagtgtggtggtgttagattaggtttgaaaaccctaaggtaatcttatgttgttctagcaatggaagttaaactgcttccactgaccctttatcaatcggatgttcctagaacatataatctttcagacaatgtaacacacacacatttgaacggattttcctagaaatttgtcctagatatctaaagtcaatgcattatcaaactagctcatgtcaggtgactaaaattttaactaactttcaaattggatttcattgctcaatcttgcaagagaatatgtgtttatacttgtctttgtataatgtcatcctaaaaatggtggtctcacacataagatctcgatcatctttgacaaaagatttatttccttgaaaatgtagtaaaaggaattattccaccttaaattcaccattgtttttaaaatagtcaaaactgtcactagcaatggttccaatttggatcaccactataccaagaactgaaaaacacattgcacgaagacacattatcggcccattcttaaagattcatggttagaaacttctggacttagttgggcctattttcggcccatacaaaagtcggccgaaccgaaagaaacaattgggtatttacgtcttttcacgaaggaacccgaaagaaccctaattatatcgttcgtaattgtgtgtatatatatagattcctccaagtcaaccttgacatctcaaatctcacatcctctcgccgtctctgtttcagtcatatttgataatttcccgatttaaaggttgcaaatttgttcgtttcgttattgtgttcttcttagattctctgttttctgaaaaaggatcgatttttatgtttgttttgaagagatatgatgatggaattagatttccctattggtttgatcgccgttatgatggcatcttacgtattagctctatctgatctctcttcttcttcaatttttccaattacatgaaaaagtcttgagctttttaatttattttagataatgattaacgggtcttagagatatagaaagagaagagaatgaagtgatgattgaactttgtttccctattggtttgatcgccgatatgatggcatacgtattagctctatctgatcattctcttccctttaactctgttttttgataattattctgttattctctgtttagtatcggattcttacttccaagaactatgtatgagataaagacaaccataaagagtctgaaataagtggatggttacataatctaacgatttatgctgcataagcatattatgcattgaaaatttggagcttatgctgctgaaacctcttttaagcactcaaacattgactcagtttgaaatatatctggaatctcgaagttctaatgtcgatgtagtggccttgaaacagagtactgcatatcttaccttcaaaaatagagtactactgtactggataaaggcgacaataagaattctggatacttgaaacggctgaacataggtggatggatagttacataatcaaacgctttaggctgcataaacataaataaatatcactacaccttcaaagtactattgttgttgtggtggccttgaaacaggataatcgacatattgcagcgtcaaaaattatcacaagcaatgaaactaagggggagacagaatcacgaaaactaaattagtgtaccaaataaataatcctcagcttcttataacaattgaaaactagcgttaaagacagatttttgctaacatctataaccaaaaaacttgcgttaaaggtctttacaatgggaacttcttatttcatggggaagtctcttattttgaaacctagacagcaaacgcacagtaccagaacaaacgtagtagagaacgtaagtcttcaaagaacatcatccaacgttagaggagaacctctggtgaccaacaactttgacttctctctctccataagagcttctatatctgagcacttctgcttaaaaactttcatttcttgcatacgagtttcaccaatctgttcttccttcttcttttccttaacttcctccagcttcttctccaaccaatcaaccttaaagccagaaaacttcaggtattgtaacgcattgtctcctcccacaagatcatcattggagagctcttccagtgacttgcacagtgtctcaataagacttaggaggacatacatgcatgctgttctcaaatgttgcttctttgcttggaatattgatgcaatttctgggtatctttcaaaaacacggcttacaaattccacctgcaaatacaaaaggatgaacaaacttaaaatcccacaagtatacatgtcagaaacaaatgataaagtcttataaattataatgtttaaatttctaaaaagtttgcatctttatttacctgggaaggaagaacatgaaacacattgacatcaatgatttcttcctttactgatgaagtttccttaagcaaacctttcgattccacaaaagcctctagctttacctttttcagaggttgtgttgcctcttcagattcctctaatttgccaagagcttcaacaacatcaacctccacaacaattttgacctcttcattcaccagaaacccaccattttcagccttaagttcggtaagaggaagcattgctaagaaaccccaggccggagtcttttgatcaaaccacatttgtgtttctgtaacaaaacaaaaagaacagaatctttgtgattataaaaactgaaactttggtttgtcaacatttaggcgcaatcctataaaaaaataatcataaagttgtaacctttcagtatggaaagttcttccgagagttgattaacaacatttaggcgcaatcttgtgtgtcgtttccagtcacaaggcaaagttttgaaatcagtaacaaccagaaacagagagaaacatctattatccctaactcctttgggataggccataagacgcctgcaagcaagcaacaaacattgaaaacaatgcgattgtgttcatatcaaccctacataacatcaaagaacaagttaactttcttaccatttgcaagaaccaactacgaatatatcagaaaagactctctcggatcccaaagatgagaaatttttaatcacccatctgaacttgttatcagcttctttctccattctaagactactttgcaattcgaacgagtcagatcattcagatggcgtggaaccctagaacccaagtggcacacaagtatagtaaccaaaacacaagtgtcgaaagcacagtgtcaccaagactaaaaccagatgcataagcttgtacagtggctaagttattacagcttacggaaaattcgggctatttgtcagcccatagtaaagaagcctcagggtcacaaattttagacgttgaattggtcaacccaagaagctctgggctaatataaacgaaacacagagtccattagattggtgaaatggcctaatttcttattatagcggaggaaggcccatatagaaaagaggcccaaacttcaaaggggaataagaaaatgtggatgagcagcgtagtcaacgaaggtgtagagaggaacaagtgtgtatcttccataatcaactaaaccgtcgtagtttaatttagtcgatctttgttttagatcttacacttttttggcagtttgaaaccaaaactcacttactagagctcctaaatagtgtgttctgacataacaaatccttgattaccttaagcagcataaataagtcaattaattcatgtgaattcttaagaaacattttccatttttaactaatatggatattaacacgtacgtattctttaaactcaaagcaataatctgtaggccacctttgaaaaaacttcaggaaatacatgtaattatcattacatatatgtcatgtgtgatgagaggattaagaggaagtcgttatcaccatcatatggataagtgacttgtctttcaaaacgtaatttacttttactctcatctctcgtatacggtatactaataatttttactcactgtttcaaacgttttttttaatcggtttttaaactcgaaacatatactatttctgctctcgtattaggtttttatatgagctcacattctcgttttctggcttgtgtgtcttacgttcgtttcattgctgcttttatgccaaaatcctttactttagtgacgaaagaatcttctctaatgaggtttgaagagaattaaaaagttatgataatggaaactggttttccctattgatttgatagctgaaattgaaggcatcatcaacctttgtacagtattagtcattcccataggtacaaaaagaaaggaagacacataggtctgtctagctatctaagttttaagaagactccaatttcgaaacatagactcaaacgaacaaacaaacaaacaaagaccagaacatgccaaaagtcattaaataacatcatccaatgttagaggagctctagctgttaacacctttgccttttctttctccagcatagcttccctatctaagcacttctgcttaaattccttcaattcctcctctagttcttgaattcgagcctcaccagtctgttcttcctccttctttttcttcacttcctctagctttttctccaaccaatccactttaaaccccgaaactttcacgtatgtcagtgcattgtctgcttccacaagatcttcatttgatagcttctgaggtggttggcacaatgtctccattaagctgagcaagaaattcatgcatgctttcctcagatgtgggttctttggacggaaatcttttgcaatgtctggatgtttttcaaaaatacgcttcacaaaatccacctgcaagtgaattaaaaaaaaaagcaagatttttgataactcttgtgaggttgaaatttctacaaaactcttaaaagttttcttacctgggaaggaagaacttgaaaaccattgacgtccatgagttcactaaccggtggagtctcgttgatcatcaaatcattagactccacatgatcataatctacctttacctttttcataggttgggtaacttgggtttcctcttcagattcctccggtacatctagtttgccaataacttcaagaacatttacctcagcaactatcttgagttcatcattcacaagaaatccaccatctttggcatgaagtttagtaaggggaatcattgctgacaaaccccaacctggaatcttttgattaaaccacttagttgcttctgtaaaatcacaaaagcagaattcatctaatcagtaaatttaactatgaacctgtagattatgaaaacaatattcaaaacttggcagaaaacttgaaaactaaaccaaaccccaaaaaaaacacagaaacacgcttcagaaacatataatattccaagtccaaaaacaagcctcacaagacataaaaactgaagattacttaactggtttatctgactaattaattatgttgtaataagggtaagatataattaccgtttcgttttgagattttatcagaatgttgattaacaatagttaaaagataacgtgcatgtctactccatccaggtggcaatgatctaggatcagccacttccagaaacagcgacaaatgatcaccagacttattgaatccctcaggatagacaagaagacgcctacatcaaaaaagaaatccgaaccgtcatcaaaataaaagagaaaatccaaattgtaacattaaaagacaaggtttatcatgtttaccacttgcagccaccaataacgaattgattagaagggacgacccttgattgggaagacgagaagttttgaatcacccatgtgaacttgttatcaacgagatttcccattgaagctcaaactagtagagagcgtgaaaccctagaacctgagtggcaccaccaaccacacatccaaatttgtaaactaaaccccgcctctccatatatgggtttcacttttgcacttcggcccaatttacaatttttggcccattataagatcaacgaccataagaaaagtctaaacactttgtgcatcgtgactaacagtgaaatcatctaactacttcattggctctaccagactggtcactggatgaagccaaggcagtgagatctgtcttgaaataaacaaaaacttgatgaacttaatagatgaagctcaaaactgaaaattgaaagcgtattatacacgtaatcagctctttgccggtgatgatctgtttcttatatacttgatgagccaaaaggcattgctttttcattactagacgcatgcttttacattatcctactgagtcatcattacaaaatgtcgaaatcctactgagtcatcattacaaaaagtggaaacttgattccgacaagggtcactctaccttcctaagttataaggggactctaattacgatatactaaaacgaacagacaaggacacaccatgcagaacccaagtcatcagacaaaatcatccaaagttagagaagctcgggcagccaacacttttgccttctctttttccagcagagcttccctgtctaagcacttctgcttaaattccttcaattcctcctctaattcttgaatccgggtcttaccagtctgctctaccactttcttttcttttacttccttcagcttcttgtccaaccaatccaccttaaagcctgcatcttgcacgtatactagtgcattgtctgcttcatccatatcttcgtctgagagctcctgtggtgactggcacagtgtctcgattaggctgatgaggacattcatgcatgctgtcctcagatgtcggttctttgcattgaatcctaatgcaatgtctgggtatttttttaaaatacggctcacaagtgtcacctgcgattgagaaggaagggtaaaagtaaaacccatatgtatacatatccagaaacacaagggtggggttgactctcaaactcacaaaaagttacattttctctgtatttagaagtgttacaccttttgtcccaaaatcaacgagagtcaaatgataacaatgtctcaagagtttgaaatttccacttacctgtgaaggaagaacttgaaacccattgatatccatggtttccttcacttgttgagtcttgttgactgaatcattagacttcacaccatcatcattcctcttaatctttttaagaggtctgcttccctcttcagaatccttttcagattcctctccacaatcattctcagaatcctttttagattcctcttcagattcatattcatatctctctctagatccctcttcggaatcctttttagattccgcttcagattcatattcaaaactctctctaggtctctcttcgtaatcctttttagataccggttcagattcatattcaaatccccctctagttctctcttcgtagtcctttttagattccgcttcagattcatattcaaatctctctataggtctcttttcgtaatcctcttcagattcatatttatatccctcttcagattcctttttatatacctcttcagattcatattcatatccctctttagatccctcttcagaaatctctattgcagctactttgccaaaaactctataaacgtctatcttgactacaattgtgacttctccacttaccaaaaacccttcttcaccagaaagtttagaatgacgaatcatggttttataaccccaggaaggagtcttctgatcaaaccacaaattttttctatctgaaatttcacgaaacaaacaacactagtcaagcatcacacaatgataaacagaaatacagacacagaatcataaaaatctacacttttttgtccagtgcagtagaaaaactcacatttctgttgggagggcttatacaaattgtgatttacaacttccatgcgcaattctgtgtttatactccatccagaaggcaaatgtttagaatcagcaacttccacatacaaagacatatactttttaatcctatttcccatgggataggctataagacgcctgtaagcaaaacaaatgaatatgtgtcacatgaaaccctagctaaaattcaccggaaaacatcagaaaaaaagacagagtggtttcttaccatttgcagccaccgatcacaaattcgtcagaataaattgccctcactcccaaagaggagaaatccttgattacccaactgaactcgttcttaccaagtggactccctattctccccattgaagactccgtcgcaaccctaaagagtggagagtgtggcacagcacacacaaatccaaccacgcttctctttctgcttttgtgttgctggtcttcatatatgggcttcagcccaatttcggcccaatttaatgccggtttcgttaccgggaacctaattttttccatccttgtgcttgtgcagtagataagaattacgatgtttcgatccgcggcgagtacaataaagtttgttgaaatattttttatcaaagaaactctttaatcggagaaagaacataccaaagaaaacttttgaaataaaagtaacaaagatcctggtttttattcaatcattcatgtgattagataacgccacatatgcttaagtacgtaagaagaaacctaagaacgttacgcttcatgactgatgatgacttctcattcaaacaacatcatcgaaaccaagtcgagcactgtcggaaacagcttcgttttcttcattcttcagttcggtttcaagagcccacaaaacacgcctctgttccacgatcattccatcgagttctctcatcctagccccacgtgcttccattttcttcttcttcacgcaaagctcctccagcctgttcttcagccaatccaacttgaaacctacctctaccagttccaaaagcgtgttctctgcatttcttatttcctcctctgtgagctcctgaggagctaagcaaattatgtcaatgaggtcgaggaggttgttcatgtaagcattcttcaccatttggttctttggacgaatattcgttgcggtttctgggtgtttttcaaagattctcctcacacaatccacctgagaacaagattgttgtaaaaactacaaaccaaacttaatatgatgagaattagattttaaaattttgcttacctctgagtagaaaactcgaaagccattgacctccacggttccatcaccattccacattgttacgatcaaagtttctcgtaatacagagaagctgtacttttagatttggcaaatcaatttttgtgtgtttgaggagtttgttcttgtaactgatatataaatgaagaagatgcatgaatctcaaataagcgtgagctaatcgtaacttaataaaaaaactgtcataattaattgtatgagtgtattaatagcgtcacacatcaagctactcgtttgggtaaagactatatactctgttcagacactcaaagacactttttgatcaagaaacatacaatgcaattaaagagaccaatagagccatctaccacaaaatactttcattgtatatattaggtcttcccaagtcaaaacagagaccagagcgcaaaaaaaacagaaccaaaccacgtccctaggaatataagtcatcaaacaacatcagtgaaaaaaagatcagcagatatggcctccaaaatctctgccttctctttattcagctgagcttttaggacacaaggatcatttcagcttggaatttcacagccacatagtctcacagctgatgttaaagtgttgaatttctaaaaagttaagcgagatttgcatctttctcaagtattcttacctgtgaaggaagaacttgaaacccattgacatccaccaaatctcctggaatttccttaagctaatcacgagacaccgaaccatcatcattctgcattatctttttaagaggtacatctagttttccaataacttgaagaacatcgacctcaacaataatcttgagttcatcgttcacaagtctggtaaccagtgtcgtgttactgagaaagatagaactctagtcaaaacaacgtattacggagcagcacaagtcccacgactaaatgagaacaaaagttatggaaagaatcacctttcgctagtgaggatttctgacaaaattgttttactagtgttatcaattctacgtgccttccccatccagaaggcaaggatttaaaatcagcaacttcaagataaataagtatttagcttcacatgctgaagcagagcagagggctctttcttattaacgaacagagactagaacacaaaaacaaacaaacagaaccaaaacatcaagtccctaagaacacgagtaatcaaataacatcactgaaagatagatcaggagccgacgcattcttaatctctaacttctccttttccagcagtttacttacgtttgtgtgcttattcatcaagtcgtgcagctctttctccatttcagtcactcgctcacatttcttcttgatttctttgacttcatcaagtttcttctccaaccaatccaacttaaaccctagatttttcatgtatgccagagcaccttctgcatcagacagatcatgtgtggagtgttcctgagcccctttgtagagcaacttgattaggctaaagatgacatttatgtatgatgctctcagttcttggttcttcgtacagcattctaatgcagtctccgggtgtttttcaaagatgcgattcacaatacccaactgcgagtaaaaatagatgaataaagtatatagtgagtttaacttttaaagtagagatgttattttcattttctgtatttagaagtgtttaactttaaccataagtaatctctagaagaagaatgccaagtctgcagattttctttgtttcttacctgtgaaggaagaacttgaaaccccttgacattcaccaaacctgccttgtcatcatcattgagctctttgttttcgacaagtgtcgttgccatcccatcccaacattgcatttccatgttatagtccttcgatacatgaaatctgcgatcagtttcaagaacagttatctgggcaacaatttcgacttctccatccaccagaaacccactttttttgtccgtaagttcactaaggtgaaacaaggatccacccttgcttcgttccttcttattaaaacagtgttttagtcctgtaaaaagtcatcacaaagcatatataaaactgtctttaaaacaagcattaattatctaatagaatcttgcagcgcaagtaagtaatcactaatcacctatctgtcttgagagtttcttcgagaaaaaatttacgacagtaaaggaaaccttcacgacctttctccattcagaaggcaagaattcacaatcaacaagttccagatccagacaaaggaattgatgaccatctcgtttcttggaataggccagaatatgcctgcaagcaaaaaccatacaatgaaacaatggatgacctcgcaaacctatattgaaataaaacgttagataactcttgttgtcttcttaccatttgttgccaccaatcaagaattgatctgaataaatgggcttggggctcacagaacaaaaattcttaatcacccaagtgaacttgttatcgactggattccccattaatgaagactccttgcaatcaaactacctgaatatgaaagatgagaaattaaagaaatatattctgccatagtttttataacaaaatctagtgatcctaaaaatagtgtttgattgattcgtataccggggtcatttgattgtttcaattcactaacaaaatctagtcaataacaaacgactaaatataggctaaaaatagtattacttgattatttttagtgcattcgcttgacttataaaaagattctaaatttctacgttgatacagtctacttatgtagtaggattcgtggtttcgattgtaacatgaaaaatcaatcgattagagatttttaattacagtttaccgttttccgttcttcccaccattctgcgtccatctggattactctcgtaaatggatgataaaaacatcctgtttttttttgcgtattttaaggtatacagaatacttatcttgaatgattgttaaacgattattatggctaatttttttttcagaaaactgttttgatttttttttttaattcattttgttagatgaaaactgttagtgttgtgttgactgggtttttttacaataatttattaacttatcaaaaatcaacaaatttattaatgatgaagcctcgtgaatttaaatacttttcaatattattatgaattaataaatgatacgaccaatggaataatattggaatccaattcgtttagctccaactcttcatttgcctaagatatttaactttttttttcattaagcaactcaattaatgctttaaagacaccttgagagccctagtaacatgaagtctctttaattatgttcttaactttaaaagggaaagcaagagagcaggccaaacaaacaaccctatctcactagcagaacctaaatctaattgcccaagaactcaaaaaaagtcatcaaatacaccgtcatcagacgacccgagtggagctatggcagccaaaacatctgccttttccttcaccaactgagcttcgaggtctgaacacttccacttcactttatccaactgagcttcgaggtctgaacacttcagcttcaaatccttcaactcttccccaatttcatgcatccgagtctcaccagctgcctctttctccttcttttgtgtcacttgatcaagtttcttcttcaaccaatccaacttaaatccatgatcagtcaaggattccaatgcaacatatgcatcggccaaatcattcttggagatttctttaggtgaccggcgcacagtctcaatcaggcagagtaacacattcatgtatcctgtcttcagatattggttctttatacggaattttgttgcaatgtctgggtgtatttcaaacaaactcttcacatatttcgcctgtgatcagtgaaataaaatggacgtaagaagtaaaaccagatcagagagcaatcttgggagactaagaaacagaccaaaaaacaatgtcttataatccaaaaactaaagttaagtgagtgattcttatggttttgtgtttaaaactatctttcttacttgggaaggtagaacatgaaacccgttgacatccatgctttctgattctgacacatttaataggccaataacttcaagaacctctatttcaacaactattttgagttcgcccttcaccagaaatccactatcttcggccttgagttcaataagaggaaccaggtttgtgaagccccaatctgatactttctcacaaaaccagtgtattgtttctgaacaaaatagaatacaaaacagatctcatctcattacatagaactagaatctcgcagcacccaaactcccacaaaatatatctactaataagcaataatatatattgtggctagcatgaaaatactcacctttacgttgagagcatttttctggaatgtgatttactatagtaaaggaaaactgtgcgtgtcttctccatccacaaggcaatgattcagactcagcaacgtcaagatatagagacaaatgatcagatttagtatcatttcccttgggaaaggccaaaagacgcctgtaagcaaaatcaatagaaaacaatcagcaaaacgaaagagaattttttttcaaaaatagcaaaaaaaacaatatcgccgtatttatcacgtaaacctaaatttggacgaataatattaaaagacaaattgtcttaattcttagtttcttaccatctgcagccgtcaatcacgaactgatcagagtatattttctcagattgcaaagaggagaaattcttaatgacccaactgaatttcttcttatcagcttgatcattccccattgatcctctcatgttgactcctagctactcctacacacctgaataaataaatcgaaatatcagacaacaatctcgacaaacaaaactaaattaacgattaagattttactaaggaatagaattgtcagcatattattttttccctacaatgtttatagatcaatgggtaattaaggatttaattaccacgaggaatacgagtcgttaaaggctcctagggatttactgttggtcaacatatatatacatttacaccgaaaccatccttaaaaaaggagtcaaggaaaggttctattaatccggaattgccgataaattaatccaattgttaataggtttgttaaagcaattaattttttgatttatcctttaatgaataaccgttttaacaatattgtatcttgtttttaagcaagttcgatttatcagttatttgtttaatttcggttgaatcttatgtgatttttttttgtcgttcattgatgtacgaatgagtcatgtatgaacgaaatgattccaaaatgaaatatttcaggatatttttataaaacaaaaactaatatttcgatttctaatagccatgtggaaaagggaagttgagaatcaactaaagaatctgcggtcgattttcatttaaaacaatatcactgaaatcaagtggagcacgagcagccatagccacttcttcctcattcttcagttcgttctcataatacaacaaaacaaacttttgtttctgcacattttcttggagttgtctgatccgagcgctactttcatgctcttgcttcttctttacgtaaacttaataaatagttgggcccttaaccagtatctaaaagtatgtaaatccttttcataacaaaatttgcattataggggttataatgtaaacccaagtaaatttgtttttcctgaaagtcccaacacaatattttcaaaaagagcacttaactttccctaaattatgtgaatacaatgaccgtgaccattaaagaatgatattatgcgtatcattgtttctccattcccaattagaacaaagtaatgtgagttccgaatctctgtataaatttctatttacagattttcaatattttttcactaattctgaaaataatagtgacctatttgttagatcgcatattctaagttaatgagaacaaattaaagtaaaagaaatgtccagcaaaggatatagcctatatcatatagaaatgcagggcaactgaattaggtgatttgtgtggacaaaattttctttcctccttggttaaattctcttttgctttcgtatcaagtaacctagctattttcaacatacagtatatatattttcaatttatttctctattgaacaaaagagtggagaagtcgaatagttgatcacaaaactcaataatgaaaagatgcacacttgcaaaacgtcgtaaataaccaagaagcaagatcaacacttgtttggccacaactcttcgtgttctaacacctagagcttatcaaaaacccgagatgaggatgaagcaaacttatcaaaatagaaaacctgatatcagaagtccatagagaaatagaagagatccaacaaagccttgcatcattgacgagatttatattgaaatgaacaacatcatgatgagggtgtacattaccgctcgtaagatccacttaaggtcatcatcgttaacgttattaaaaaacaagaaaggagctttggcggccaaaacacctgtcttctccttcttcaaaagagcttcaaggcttgagcacttctgcctcaaatctttgagctcttcctcaatgttttgcatccgaatcttatcagcttcttccttcttcttttcaaacaactcatcaagttttttctccaaccaatccagcttaaatcctacacttttcatgtaggccagagtagttttcgcatcagacagatcatcctcggagatttccataggcgattggtgcagagtctcggccaagcagagtaggacattcatgtacgctgtcttcaaagattggttctttatactgaactttgatgcaatgtctgggtgactctcaaacaaacggttcacagatttcacctgcgaagtacgatttaaattaaagatcgaatatcaaactttaaagacttgcaaaccatatcttatgcagtgggtaaaagtaatcacgttttcatctttcttaaatttcttaattacctgtgaaggaagaactttaaaccctttgatatccatgctctcagacatctctggtgcatctaatgaaccaacaacttcaataacatctaccgcaacagcaaccatgacttcgtcgttcaccaggaatccaccatatttgtcagaaacatctttaaggtttagcattggtggaaaaccccatccaggagcgttctcatcaaaccacgcttgtgtttctagaaaaaccacaaaaaagatttcacctcataagtttaataaaccagtgcattgaacgtgaggttcacaacttgacaggacaaaacataaaccacccaaactggagtccagacaagcatagcacaacatacaatttgaatattaaactatcaaactttatttacatgcagctagaggaactagtaaccttgcacttgggagagtccttctgaaagttgattaactatagttagggaaaactttgcatgccttttccatccagaaggcaaagactcacaacaatcaggaacgcccagatacacagacaaagacaagtaaccatcggcatcgttaacttctggataggcaataagacgcctgcaagccaaaaaagaaaagaccaaaaactcagcaataatatcaacttcacatagatagaagaaaacaggaggattctcttcttcttaccacttgcagccaccaacaacgaaaattttagaacgaacttcaagaccttgcagagtggagagattcttaatcacccaagtgaacgtgttatttatttgctttcccattgatctagatgaagagtcttggcaatcaagctaccagaacattaacctcaaagtattaagtcaaacaatctcgagctacgaaaccgaaacagagattacgattacactgtcaaaatcaagcctttaaaagttagaacatcacactaacaatggataagtgtttacccccttagagtacaaaagtgcagatttagcctaaacgcatccaaatttgactgcgaatggcttttcctcctcctagggttttatcttagcagcttttaggtcattctattaatccacgtattaatagctttggtttagctatcaatttttttatttttcttggttggataattgtttgattttattttaataattttctggtctaataattaatcgattaacaatcaaattatctctattttttgttttttggtttcctacaattttggttcaatccctgcccgttgtagacctcgtttgcagtaccgtcacactcctctagtcctcttcatacgtataattaccatgaacagaacccagtatatattttgatactttaaccccaaagatttggtaatggtaattgttaggtaattttacatatttagaaatagtcaaattcaatgataaagtgattttttttgtgttacttgatccatatgtgaacgttacccatctgtttagttagaaaagagaaggaaaaaatgatccttactcaaaagaaacacacctaaacgaaacaaccaaaaaatctgactaatagtcttagaaccacaatacttctttacaagaaacacactggattaaagaaacctaacgagtcaagagccacaaaatgcggaaacatccaacctaagccacttatcttgcagagtttcaagaggactaaaacaccaaacagaactataagaaggaatctgaatactgaagccattaaacaatatcatcgaaggagaaaggagctctggccacagacacatctgctttctccttctccagctgagcttccaggtttgagcacttcagctttaattccttcaactcttcttcaatttcatgcacccgagtctcaccagcttcctcgttctccttcttttctgacacttcttccagtttctcctccaaccaatttagattcaaccccgcatccgtcaagtatgcaagagcagcatctgcgtctgacagatcatccttggaaagttcctgagtcgactggcacatagtcttgattaggctgagaaggacgttcatgtaagctgacctcagatgctgattctttggaccgaactctgatgctatgtcggggtgtctttcaaatatacagctcacagtttccacctgaaagtgatagaaagatgaattaagtagaaaaaaacaaattgaggaggcagttatcagagacttgaataaatcagaacagacaaaaacatctccaatattccagtttcgctcatattctgcaaatcatagatacatcatacatgtatcaagaaacttttacaatttcatttcttgtttttactgaatatacaagtgtgctctctgctacttgagaaacaattcacaaaacagaatagaacatatgtcggttagatattttaagaaacaactacaccattcttgatttcatacctgtgaaggaagaactcgaaagccattaacatccatgctttcctttactgatgaagcttccttgagcgaatcattagactctgcaccatcgttttcgtctaccttgcttagagctttagttgtctcttcagattcctctggtacgtcattttcctctagctcgcttagagctttggtggttgtctcttcagattccactggtacgtctaatttgccaataacttcaagaacagaaacatcgacaacaatcttgagctctccattaaccaggaatccaccatctttgtcatgaagttttttaagggaaagcattgatgtaaaaccccagtcactagtactcgcatcaaaccaattttttgtttctgtaacaacaacgaaataaattccatttcatcattgacttcacttcacataaaataaagccatccatgaaccatgctctaaacttgctacgaaacattgacactagtcttaaaccaaccaactcaaacaacataaggaaaaaaaaaactgttgcaatcaatttccaacgcatatcaagtaacgagcattgtgtagaaaaacaatcacctctagcttgagagagttcatcagagagttgattcactacactgaagtggaaatatgcgtgtcttctccatccatcaggtaaaaattcactaccagcaacggccagatacagtgacaacttctcaacaccatttcctttaggaaaggccagaagacgccttcaagaaaatttagtcaatcctcaatttcacggaaaacaaaaaaaaaactaaattgatgaaatcattcgaaaaaattcacttcttaccatttgcagccatcgacgaagaattcatcagaataatttttcctggactgctgagaggagaaattcttaatcacccaagtgaacttgttatcaacttctttccccattgttatctgcaatcaagctaccagtagtacgatgacactcttaaacatcaattttaacagataacaataatcaacgtaacgaacaggagattacgaaatcattaagagtaatatgatcagttgttaaagatttcacctttttagacgaagacagaatgagagaaaaagctctaaaggaaacttctttgatacgacgaacaccgaccgacctgacttcactgatggtatcattcaagtcatagagttgggccaaagagcccggcccagttgaaaaatgtttaagcgttcacgttctgttataccacacgttgtccaataagcagagcactaaacggcacgcggtgtgtatttgagagaagttagaaacggcatcaacaatgaaaactcgactaacctttgcttgttatttggtcaaattcaacttgtagcatttgccatcgacttaaaacttttaaataaaatattttaaaattaatatatgcaagttctacaagttgattttgaccactacatgttggtctacagagaaatgaaactatgaattttaatatcctttcttggaatgaaaggttccttttcgtactcaaatttatattataaaattttgattcaacagtttcatcataatcacttactctctgctttaattttaatttcgtattcaaaaccgcaggtggatgaagacaaattagcagagaccaaaacgtagttgaggatgaaacaattacttagcagaaaatgaacagaaacagaggagtcttacttattcaccaagaaactcttatatcacttaattttctcaagttaaaaataggatatgtatatgttttttaactctacctaaaaggaagatactgaaatgaggaaagctgaaataaaaagactagaagtaggaaacactattcctcattaaacaatggagaagactcaaatcaagaaatcacaacttcatcttaaaatctcagtcaaacaacatcaatgaagccgaagctgcagctttctctttctccaggtcggcttcaagttctgtcactgccagctttcgcttcttgacctgtttctcgagttctccgatccgtgtgtcgtaagctatctgtttttccaaagcctgatcaaacttctgacgcaaccagtccaagttcaagcctgctttaatcagatccgtaatcgtattgtctgcttcgttcatgtcttccactgtgagttccttagtagatttggacagtgtcttcgtaaggtcaagaagagcatgcatgtaagcattcctgatatgttgattcttcaaactgaaattcgatatgagatctggatgtttctcaaagattgcattgacctgatcaacctgtgatgataatgaagaacaaaaatgtcaaatcgagttctatctcaaatattgaaacaaaagagcttattaattacctgcgaatcaagaacctgaaagccgttgacttcgatagttacattatctttgttctgcaaatcttcagaggaatcatcactaagctcttcaacttgtgatgcatttaacgtgtcaataaattcatgaacttcaacttcagcaataatcgtgatctccccattcaacaagaacccaacatttacgttattaaggatgactgcgggaatcatgtctttaaacccccaattcttagtgttctcatcaaaccagcgccatccttctgtaacaatatttaaacatataacaagaatatgttactccgatccatcaatagttatttgacatagccagtcatgatcacaattcacaaaccatagtgcataggattatacttttatctacagaatgtatcggagatatatgattgactatagtcatgcgaaattccacgtatcttctccagccacatggaattagttccatattaacttcgagaaacagagaaaagtaaccgttttcattgggaagagcaacaagacgcctgcaagaaagaaagaataaccaaatacggtatatgggatcattcatgatttgatatatacgatcacgttttgacgataaagatttgaaagataacaaaagaaactatgcttttaccaataagagtcaccaattaggattggaacagagcaacgcctatgagtttgcaagtcttttatcacccaaccaaacgtcttcttcttaaaaccaccttgatttgccattgaagactctactagatacaataaaagaagaaaacccttttaagagcctcgaattcaaaaccctaatcacacgcactgagatgaagaagctttctctatacggaagacgaaatcgaggtttacaaattgcatctactgtggatagatgttgcttatatttttatccggttttttaaggtcagcggttaaatcgttgaaccggattgctagactagcttgctgcgtaggtatctacatatgctttgaacttaaaccggttcaaccctcttgaggttcagcaaaccggctcaatcctcttgaggttcagcaaaccggctcaatcaataataatggtttttgcaaagccatgtatatttgagaaaggttttttttcctacttgagaaaggataatgtcaccgcaaaatgtgtttaaaatttcaagtgatgttatttttacccgatttttaatttggagttgaaatatatctacgattacgtacgtatgggagttattatattcacatactctttatataacaaaagattaattaaattaagttatcagtttgtttattttctactgtcgtcaaaaatatacaaatccaagagagagagtgattaggagccaatatatcagcttcgttcacctagcgtaaccccaagggtgtaaccatgaaaaacacaatgtaaaagcaaagcgcaatgataatccagtcggagacattacttagttgagaaagttcggacctaatacttttaatcttacaagtgcattagcctgcgtcacaagctatttgtttctccaacgccctattcaacttcagacgcaaccaatccaacatgaagcctgcatttgtcagatcagaaagcgtactgtcggcgaagtttaagtcttcctcagtgagttccttaggcaacttgctcaatgtcttgattaagtcaagaagaaaacccatgtaaacattcttgagattttgattctttaaaaccaaattcgttgcgagatctggatgtttctcaaagatttccttcacttgattaacctgtgaagatagtgtaaacaaaggtcatatcagtttgtgtcaaatatggaaacaagagttaaaatcattgttaagcttttttacttgcgaatcaagaacatgaaagcccttgactacaacagttacatcatccttgtcctcttcagatgaagagtaatagccaagaagtgtccattcactatcatcacgaaccgctgcaacttgtgatgtgctaacagcttcaaaagtttctacttcagcaacaatcatgagctctccgttcaccacgaacccactatttatatcattaagttttgttagagatatcatctcttcccaaccccattccggagctttcttatcaaaccactttcgtccttctgcaacatttcgactccattaattggttaatcaacatagaatagtcaaatcactactacatcaactaaaatcctgcctgtggattaatggaacatcaaattgctactatcaaaatgacatagtgatgaaaagtattcacttattcaattttaaaacgtgtttcctttgtttctaccatgcatgaaactaatcaaaagctagaaatatttacctctctttacggatgaatgctctgaaatttgatttactaccgtaaaacgaaattgtgtatattgtctccatccacaaggcaatgattcgaaatcaacttccagatacagagacaagtgatcaccattattttttttgaataacaagtgatcaccattacttccctccggataggcaaaaagacgcctgccagaaacaaaaaaaaagatgaacaacccaaatgaaaagaatcaccaaaactttatagttatatacacatatgtctaatataacattatttaaaatgaaagagaacatttggaatggaaagaaaaagatattgtgtttttaccaattgacgtcatggatcagaaccggatcagaaacataacaatcttgtaattgcaaagaggaaaaattctttataacccaaacaaacttcttatcacatgggttcatgattgatgtcatgaaagattcctcgttcgcaaggaaacaaaactcctttaaaactcaaattttgtaaaccaaaccctaatcactttcaaggtataaaatagaagaaaaaattataaactaagattccactccaagaaattttgaaaatcgagcagaattctttaaaaagttaccacgatatgaattggaatagagactaaagggttttatagaaaaggaacggagactacgaaaacaaactttttaagcgtaacctaacgtaaaatcatatataaaggaaaatatatctagctttttttttggtaacagatattgttagataaactttagacattttccaacaaaataaattcatctatagattttcttagcgtataagtaagaaataaatctttaaacccttaaatataggagatttattcgagcataaaattcgaataaagattcttaaatataggagatttattctcatctaaggaaggagttaataaaattttagatcaaagtggctaagttaaataaaatgaccttgatttttgtatagattaacaatcttttaacaataacattatgcttacatagcgccgtaacgtatgtcaaattaaagcatgtattgactttccaatcaccctgtttcttcttattacgtttatttggctcaaatactctgtttctgatttgttatgtgaaagatggtagatattttatacttgatttcgacgtagccactttctctctaaagaagacaatctttatcaaggaatgtttttcaaacaaaaacagaggaacttcttctaaaaccatcaattagtgataaggagagttaattgacaaaaaaaaaaaaaaagtgataaggagagttaaaacagaacaagaaaccgaggaacttcacataaaaccatcaattagtgatatcaaacaacatcgctgaaatcaaacggagtttcagctgccaaagccgcagctttctgtttcttcagatcagattctagatccgacaaattgagctttcgcttcttgacttgttcctcaagttctctgatccgtgccccaatgtcccgttttttctccttcttcaagaaagcttcgtccagtttctgacgcaaccattgcaacttcaagccagcttttgtcagatccaaaaccgtgcggtctgctttgtttagatcgtccattgtgagctccttaggcggtcggcacagtgtcataattaggtcaagaagaacacccatgtaagcatttttgagctgttggttctttaaattgaagtccgatgcaatgtctggatgtttttcaaagattgcattcacttggcttacctgtggaacaagaaaggtcaaacacttttcttaaactaaaattgaaataagagttttaaaatcaatatcatgctttattacctgtgaatcaagaatctgaaacccattgacttcaacaatttcatgagcatcttctgacgactcctccgaccattcttcagatgaagacgagtatctctgttcatcatcgctagattcactaccctctgtgttcctcgccattgattacgaagagaatatctcaatttcaaaactggagatagatgtctgaggattaattaccctaagtgttgttgtagctaggaatgttgaccagagaggatatttatatttgtggagttaagagaatgatattaaggaatgcatgcattttactcgccataagttaaaaatggtaaaaaaaattaaacaaccaatcaatattaatgttgtacatccaatcgagccacatttctgccgtgtgtcacacttacagacattagtacttttacagcaagaaacttaattcaagtaacctagcggagagtaatcaaccatccccaaaaaaactctatacaaaatgagtatacataagatataagtctatacacaaaatcaaacatagccgaattcatatgcatttataatttaatggaattcaatgtttaagaaagtgaaatttgatttattaaacaaaaatacatgtgcgtaaatcttaaaacgttgtccataaatgtacaagtcttcaaatttatgtgcccgtttacagctataaatgttcatttcttggacttcctgctgttacttatatatatggtcaccaatcaacctcttttactatatatataaatggggctctcaggttgacaaacaaacaaaatttggagatctcatcgaacagtgtcaagaaaagggtaaatctcatatctaaagttacaactcccactcaaaactctccctccttctttaccatcacaacatttaggaagctcccctataatcttatccaaacacgtcttacaaaccgtaaaccataaatcccgtctacactgcaccattccgtaaagcttcatcttcccgagtttcatctcccctgtctcgtacaacaataacttatctgatctgcgagtagcctttgcggtcagctcagtgagtagagcctttgtcttcacattgaacaacgctggatcgcttactttctttgtgctgtacatatagaacttgttcttgtcatcgatcttctcgaagaaagcggttggagaaatcttgagaagacatttatcaaaccatactattcccgccttgttcataggacatcttctacgcagctttcatattcatatacataacgataccacaatcaaaaacaaatattacactcgtacacactaatctatgtacgatatatagttttttttttacaagtgctaaatgactaccaatatttatcaattataagctcagtcgagatattgtctcatttttggaaaagtaaaagattgtgttatctttaaaaaaaagtattgacgtgtgtgtgacgttacctcggaggtggcagtggagaggcaggaaccacacttggagccgtaggagtcaccccggcactggagcaagatgtagacggtattgggatcgtcaccatgataggcatagacaaaacctcttacaaaagtgtctttatacatgtcattggtgagaaagttgaggtttccttcgtacgggctcttggacttgtatttcccttcagcctcggagcatttgtggtatagatatgagttggtctcgttcatggacgaaacactgcgtataaagaagacttgtatggctaccatggccaagttaaggaccaaagcgatgcgttttggtatgaaggatgaagacattgtttttgattctcgatcttcctttcttacgcagaagaatgctttattgtaaattgggtgaaatggttatgtcaaaacgacttttttggtgtatttaccttacaaaaattcggttgatttagaagagctgcttttttgtttggttctgtaacggacacgagagaaatgttaggagttgtgtgacttggtataagcggtgagtgaagggccgatgaaaaagtcaaaatttaaaggtttgactgagttaaaacttttataaattactagtactgtgacatcggtatataaagattttggacctgtgtttttccagtattaacatacgataaattgcatctcattactgtttaatcaaatgaacaagaatggtttgttcttgccattacatagacagagtttgactttggtaactaaatacctgttaagcatttggatatctctttatgaaatgcaaaaataagattgccaaacattgaggtttcatcgttaagctgtttcagtcccactacttagcacctagatcaggattttgcaaatcagtaaaaaatatctttgaacgatagaggagctcttgcagccaacaccttctctttttccttctgcatctgagattcaagatccaagaccatgtgcttcagcttctgcaactgttcttccattgtttctagccggaccacactactctcccccaacttcttcttttcagagacatcattcagcttcgtcttcagccaatccaatttaaagccaacatcaatcagatcgacaagtgtctcatcagcattactcagatcatcatcagagagcttatctggagactggcacaatgtctcaatgagactaagaagtgcatccatgtatgcttttctgatctgttggttcttaggacggaaacctattgctgtgtccgggtgtcttttgaagatttggctcactgattgtacctgcaagcaagaacaacataaactacatgagaaccaagattttaaggttaaaatctgaaaacaagttaagttagtttgtgttcttacttgtgaagcaagaacctgaaaaccattgacatcaatggtttccagaaaatcactaatccaccacgactcataaaaagattccttattgttacactctgtaccaaaattttctactgtcttcgaggtgtacaccatggacttccattggtggagagatgaagcatcatcatcatccggatactcttcaactgtaccatcctcaaacagatcttctttcgcggtatcatcagtatccgcttcggaaactatgacattgttacatttcataccacgatttcctactgaacgaaaagctttattccatgcattcaattggttcaaaggacatatttcctgaccttcatcatcagaaacaggagatgaatcatcatcatcatcatcatcatcatcatcatcatcatcatcatcatccaaatcttcttcaaatgcatcatcatcatcatcatctaaactctcttcagattcatcatcatcatctaaaacctcttcagatgcatcagtatcatctaaaccctcttcagatgcatcatcatcatcatcattatcatccaaatcttcttcagatgaatcatcataatcatccaaatcttcttcagaagcatcagtagctggatctccttctttccagcacagaggttcagttatcttcacagtatcctttggtacatcaataactggaagaatctgtacctcagcgacaataatgagtctatctctcacgagaaatccattgcctctagcatctgtaccttaccaattgcagtcagaggctacgaaggtgcgagagtagcaattgttatgttgcaatgaacagaagtttttcaaaacccaactgaatcttgtctccttttgcttgctcattattcttgatgaaacggttgaaagtggcggagcacaatagagaatcactgaatcggaaaagcaatagaaactggatctacctcttgaaagtttgttagcgagtctagggtttacggttggtggatagagttgtagaagaatatattttttagctttttaagataaagatcatatagaaagtaaataaattaatagatcaaaataaataaatagataaagaccatattcaatataaataaattgactttattaactaattaagatgcttagattattcataaaaaaaatacgaattcaaaatataacaagtcaaacccttttaacttatttgatacttgattcacaagtatccaagataaaaccttaaaagtctgtaacggaaaggaaattgcaaacttcatttattcaaccttgacaagtgtcactctaacgggcaacctcaaaccattctttttttcaattgagccatggacagttgatttgctttctcttttttaaggtcggattccaaatcggacaaagtaagctttcgcttattgacctgttcctcgagttctctgatccggacaccactaattctctgtttctctttcttcaagtaagcttcatccaacttctgacgcaaccaacccactttcaaacctgctttcgtaagatcaaaaagcgtactctctgctttatctaggtcttccatggaaagtgcctttgtcgactgggacaatgtctcacttatgtcgacgaggacatccatgtaagcattcttaagttgttgattctttaaatcaaagtttgaagtcagatctggatgtttttttaacatttgactgaccaaattttcctgtgatcaagtaaaatgtaaaccaaaaatggtcaagtatagtcgaattatcttaaaattaaagagatgataaataaatttttgttcgagcacatagaattggattatttagtacttacttgtgaaggaagaacatgaaacccattgacttcaacagtttcttcatcttccgacgaatcttgagaaggagaaaaatcaccatcgtcactgtcgttagcctcgcaactattttccttcaacattattcgatgagaatctctcagcttacaaaccgcagtgttggtacaaataagaagaagccagaggatcacaaaatgggtgttgaaacgtcgccacaacagaatatatatatatatatatatataaagaaaatgcaggcattcttaattagtaacatatttatgaaccttgactcatcgtgacttgatattcttttggcataactacgaataaactaatattggtaaccagcgaatagatggaattaaattgtatccatcaacttgatccgcttgtttggtagcgactcttcgtgtgtcaaactatattcatttatcagggaaaaaacaaaaactgtcttcgtacacaaagacattactttttcatcaaggcagtgggggaaaaattgacagaaacaaggtattgcccctataactttgtttttgggcaataaaaaacccctaaaactgaatcattcctatgataaaatctcctacaaattgttcattcattggcgcaatcgatatgcaagtcatcctggggaatttgttttgactatatattgattacatattctatgatcaatcctttacagaaatcaatagattttacgttttattaatgcattgtggatatttccaagacattggtaccttttatcttcctaagttttaagaggattcattagcaagaacaaaccacaacaccaagtagacccaactccaagtgtcttaagaacactaggacattaaacaatatcaccaaaaaatcatttgcacatcgctcttttgtgcaaattaacttcgaatcatagcaaatttgttaagtagtaaataatactaaacctaaagtatgtaagatctgaaccaaaccaaaactaatacaaatcaaattagttcgaccagtgttaaattatctcaaatcaaactaaactgatactgaaccaaactcgattcttaaccagaatttgacctaaccagactttaaaagggtttaagccggctgatattttgagtttagccggtttagaacggtcaatgtgagtctaaagaaattaaaacagatttccggtttacggtgacaccggtttatcaaacaacatcatcgaactttagaggagctccaacggacagaacctctgacttcttcttctcacacttgtgcatcaattcatgaagttgttgctctattccttggagtatgatcaaaccagactgttctttctccttcttttctttcacatggtccagcttcttctctaaccaatccaccttaaatcccgcatctttcaagtatgtcaacgcaatgtctacttccacaagatcttcatttgagagctcctggagagattggcacatcgtctcaattacgttgacaaggaaattcatgaatgttttcctcagatgttggttctttacttggaatcctactgcaatgtctggatgttttttaaaaatacgtctcacagattctacctgcaagtgtaagtacaaatatacaaagcatatcagcgagaacattctttggagatctggatacatatgatcttgaggtcattcttaagtttctttacctgtgaaggaagaacttgaaacccattaacatcaatgctttccttcacttgttgagccacctcttgagtcttgttgattaaatcattaggctgaataatttccttcacttgttgagccacctcttgagtcttgttgattaaatcactagacttaataatttcctctgattcatctagtgtgccaataacttcaagaaattctacttcagcaacaatcatgacttgtccatttaccaaaaatccaccatctttggcattaagttcggtaagtagaagcatgttttcaaaaccccatccgggagcattctgatcaaaccagcgctgcgtttctgtaacaattcatactcattacttaatcaaccacaaataaagctctgatgaactatatgcgccgtaagagtaagatttaaacaacccaactacacacaaacataatcaaaatgaccttaaaaaaaacgaatcaactagtaatgagcaaacttaagtaagaatgaccttgttgtacagagagttcttgcgaaagctgatttactatacatgcacgaaatttgacgtatcttctccatccagaaggcaatgatttaaaatcagcaacttctaaatacaaagaaaggtaatctgctttatatcccttaggaaaggcaacaagacgcctgcaagaaaacccaaagaaaaagaattgtcaaactcgatatcacctaagccgactagcaaacatgaacacgaggtactttttttttaccatttgcagtcaccaatcacgactggaacagaatgacatctctcagagttcaaagaggagaaattctttatctcccaacaaaacttcttatcaactgccttcgccattggattttgttgtaatcaaactaacctacacctggagaaagagaaaacctcttttaactgaatgtcacacacatgtatatatattcagaaaaccaattgaccccaacgaaaacacactcgcgagaaacaaaataagaccaataaaaaaacctaagcatatgaagtaggaattccttgcgattgaactacatgcaagaatatgaagtgaattgcacacacaaatttgtaaaccaaacaaatcaatcaatcatcatgtgataaattaaatctcgatgaacaaaaaccaacatacatctcaaataatcaccataaactcgaacaaagaggagagaataaaaaactgaaggaaatctagtagtggatttaccttttgaaagttgaaagtttgttagcgagtcgctagctagggtttatagctttactcttttgtaccgcgatggcgcgatatatatgggagatcagttaagataaggactgcgcgtttacgcgttccaaaaaataaatacataaaatagattcgttaaatcaaaacttggattaaataattaagatgcgtagataattctgataaagtagtacgcacgcattttcaaaataaaacttgcaaaaaccttaagagtaaagcgttaagacttatttgatacttgattcacaagtaacgacgagagaaacctaaaatctccaacacaaggaaggtgctgaaataaggaatggagaagtaaaaagactaatgatttatgattcatgcattcaaacaacatccctgaaactaattcgaactttagaagccaaagcggcagctttctctttcttaagttcggattccaaatcagacaaagccagctttcgcttcttgatctgttcctcgagttctttgatcctgggaccactaactctctgttactccttcttcaagtaagcctgaagcaacttctgacgcaaccaaaccactttcaagcctgctctagtaagaccaaaaagcgtattcgatatgcaagtcattatgttgaatttgttttgagtaatatagattctatactctctatatatgatcaactctttacagaaatcaagagagttacattttacaacattgtggatatatacaacacagggtctcttttatcttcctaagttttaagaggactcattagcaagaacatcccacaacaccaagtaaaaccaaactccaagtgtcttaaaaacacaagaagcatcaaacaatatcatcgaatgagataggagcttttgcagtcgacacttttgccttctccttctcaaccagagcttccatttctaaacacttctgcttcatgtccttcaactcttcctccatttcttgcagcccagtctcactagcctcctcattctccttcttttctgacacttcataaagtttcttctccaaccaatccagtttaaatccagcatctctcatggatcccagtgcatcgtaagcatccaacagatcatcctttgacatttgctgaggtaactggctcagagtctcaatcagactgagtagtagactcatgtaacctgtcctgagatttgggttctttggacgtaaatcagatgcaagctctgggtgttttgcaaacatacgactcacagattttgcctgtgagtgaaaaaggtgaaaatgaagtagaatgcatatccaaatagaagttcccggagacaccacaaaagcaccatatcatagaacaaacacatcgtgttttctctcgtggataaaatttctacacaaaatgatgttattttcttacttgtgaaggaaggagttgaaagccattaacatccacagtttccgtgattgttgaagtttcctctgtcacatctaatttgccaatagtttcaagaactttgatctcgacaacaatcttaagttccccgtttaacagaaatccgctatctttggcatgaatttcatttaggggacacatggatgaaagaccccagttggtagtcttctcatcaaaccactgttctagttctgtaaaatcaatcacacacaaaaaaaaataataataaaaaaaattagagaggaactcttgcaaagctagcagtggtaataagttcttaccattaagttttgactgagagagtttatctgataattgatttactagagttagacgaaatttagtgtgtcttctccatccagaaggcagagaagtaggaacagcaacaccaagaaacaaggacaaagaattagcattattatatcccttgggataggcccgtagatgcctgaacaaaaataaaagaaaacaaaagatatcaaggaaacctaaaatagactaaaaacataagaaaaattcttaccatttgcagccaccaacgacaaaatgatcagaataaatgaggtcagatagcaaagaggcgaaatttttaattgtccaagtgatcttcttatcgaattgcttccccattgatacttggtgaagcttcctctgcaatcaaactaacagaacatttaaaaaattaaaaagcaaatcaaagaaaaaactagcacaacatgaagagaagaaaacccttggaatccaagctgagatctcaactaacaatatcaagcagcatatctatatatatggtttcgaagcctcaaaagtttgatgatttgttaatcatttagattacgtacatgagggatacgaatcgcttgcggatcctcttagggttacttggagcatgggcaacctagattctgtctttggggaaaagggataacttttgaacgaatcttctttctctttctttccatctcgatgagattcttcttcttcctcgttcttatctcgaccatattcttcagactctctcatgtcagctacttctttctcctctcaatttatttcccttattttctctcatgtattttgattttggtactttttttagacaaagctgtgatcatattttttttgtcatcataacagtaactcagatattaaaaatttgtaaaaagaattttgatgaaacaatgatagcagaaactgttccaaaaaggtgaaataacgtagcagttgttaatttatctaaacaaaaccacaatgcaaacgaacagaccaaggagaataaaatctctatctcaaaaatattaaaaaacatcattgaatgatagaggagattttgcagcaaagacctctgctttctccttctccagctgagcttccaggtctaagcatttctgtttcaaactttccagctcttcattgatttcctgcatccgagtttcaccagcctcctctttattcttcttttctgatatctcaacaagtttcttctccaaccaatcaaccttaaatccagcatcagttatggatctgagtgcaacatatccctcagctagatcaaccttgttgagctcctgaggcgactggcgcagagtctcaatgagactgagtagcaagctcatgtaacctgccctaagatttgggttctttaaacggaattcagatgcaatctctgggtgtttttcaaacatatgcctcacaaagtccacctgagagttacaaaatagaatccataaatattgaacacatcatgttgtctcttgttgttgaatatattctacacaaaacgttagtagcattcttaattttaacctgtgagggaagaagttgaaagccattaaaatccatgctttccattattgttgaagtttcctctgacacatcgagtttcccaataacttcaagaacctctatctcggcaacaatcttgagttctccattaaccagaaacccgctatctttggcattgatttcatttagaggaaacatggataggcgaccccagcgaggagactgcacatcaaaccacttttgttcttctgtaaaatcagaaacagaatttatataatcactccatttacgtgcaaacaaaggactaaatgaattatatatgtttctgtggattgaacaacaatgctaacaactaatacaacagtaacaccatgatcccacacaaacacccttgagcaacatttaactcaagtcccaaaacgagtctcacaaatcaccactcaccagatatacgatgtagcaaaacaaaatgtttgtgtttgtgatcattaaaatatatttggagaaaacagtagtgagaagaaataagtaccattttgtttggaacgtttcaccgaattttgatttactacatttaggagatatcgggcatgtcttctccattcgggtgacaatgattcataatcagctacttccaaatacagaaataagtaatcaacattatttcccttgggatagacaagaaaacgcctgcaaaaataaagtctaattaataagagagtcagcaaaactgtgtagaggatcaatcaccgaaggaaaacgccttaccatttacatccaccgacgatgaatggatcagaataaattttctttgaatgtaaagatgaaaaattctcgatagcccaagtgatcttcttagcaagttgcttccccattgatcttggcaaagattattctgcaaccaaaataccataacgtgaagagaaaaaaaaaacctaaaaaacttttttttttcttgaattataaaacaaaaccctagaaattaatttgataatctatcaacaatctcaagcagagtaaccacaattgaaattaagatttccatatggaatcgaagtcttgacaagtctaaatgccactctaacacgatttcttaccgtatagggtgaaatcaatgagccttgaatccttttttctccgtaaaaggtttagatgaggagactccgttgtggtacttaatggaaaattgttttttttttttaattgcgactgtgatttaattaagtcctagagccactctattggcaagtcatctagtggctagtacccacttgatgatattatttttttcgttactctatctgttttaagtttttatactaagattgctgtaaaaaaaaaaagtgttcatactaagataggttacaatttttttcatcaagattcatattgtataatccatgtgatgagagattctttgcgcaatttttcacaatatgtaacaaaactagatatgtgaactcttaagtgcttaagatcgcacgagagaggatttttagcaacaaaatcctctgctttattagctatcagttttaatcttgagacctgatgaaaacataccataacatatttccaattcaccacactgttaggatacagagcgattactttgtcatcaagaaatttatctttataatttaaacccattggttcactagaacaaaaggaaggattccattaatattgcttccactttaaaagaagactaataaattcagagctaagacacagcaaaaacaccaagtatattatcaatctaaaggttctgtgaacacaagaacatcaaacaacatcttcgaacgatagaggaacattggcctcggacacatctgcgttctctttctcaagaaaagctttcagctctaagcatttctgatttaatttctgcaactcttcctccgctcgttgcagtcgagccttacccgtctctactttcttcttctttgccttaacttccgcaagcttcttctccaaccaatccaatcttaagccaccattttccacgtatgacactgcaacggatgcttcgtccagatcatcgtcagtgagctcctcaggtaactggcacaacgtcttaattagtcctaggaggacagtcatgtatgttgacttcaagtgccgattctttggacggaattttgatgcaaagtctggatgtctttcaaatatacacttcacagattctacctgccagtcaaatttgaagatgcataaactatatgtcatagaagtttttagagacatgaatacatactatattactatgacatattctaatcttgtgtttcttacctgtgaaggaagaacttgaaacccattgacatcaatgctttcctttactggtgaagtctcgttgagagaatcaaaagacactgcatcattatcatctagctttatctttttcagaggttggtttgtctcttcagattcttctgatacatctaacttgccaataacttcaagatcatttatctccacaacaatcttgacttctccgttcacaagatacccagcatttttggcatgaaggttgggaagagggatcatagatgtaaaacccgagccaagatttctttgattaaaccaattttgtttctctgttcacgaaatatatagaaactctaatccaaacaagcaataaaattgcacaatgcataacaagaatcttgcagcagcacaaagccacatgagtgtccatgacaagttgtagaatcataaaatatcctttataatataaagtttagaaataaagaattatctcctcgttgggagagtttgtccgtaagttgatttattatagttaaggagaattgtgcatatcttctccatccacaaggcaatgctctagcatcatcaaccaccagatacagagacaaactattattaaatttatttccctttggataggccagaagatgcctgcaaacaaaaagcagttgcaaaaaaaagtggatgtcctcgtaaacctaaattggactaatacagttagaaaaaaagttttagtttcttaagtaccatttgcagccaccaatcacaaatggatcagaataaattttgtcatattgcaaagtggagaaattcttaatcacccaagtgaacttgttatcaacttcttcactctccattaaagactcctcacaaccaaactacctttaaaacaatgccacacacccaaattcatgttatataccaaaggaaacacatctcgagtaacaaaataaaaaccaaaacctaaaattccactatggactctaactgacatgatatcctcaacgctagtaatcttagcttccacataaagacgtcaaggtcgaaccaaacgctttaaaaaaaactaaactctaccttaatgagaagagacaatgaaaagggttgttctaagacaacagtcaacggagactaagggaaaaaagggtttcagactctgaacgcttacatgaatgcaaatcaaattttattaggaaagtgaatcacttttatatggcttaggaaacatgacttgaaaactagagtaactaatgttgtatataatttaatgcatactataaataatcaatagtttccccaaccatggtgatttaccagggatactctgtctctcttgttactcagtttccaaaatttccatattcaaaaatttagattgtataatttaaacacactttagtttggatatgatcaagggtagttacttgatacagtttagctcctatattcaagggattgcatatatttcattttcaagggattaactacttcttctatgttctgctttgatttattgatttcttctagaaaacacatcttaaacttttctaaatttaatgttggttaaagtaatttaaaaaaaaaacacttcaagcgcacaatgctttagcacaaaatgcctaagaaagaactcaagacatcaacctatagaggatctccacaaaatgtctctgccttatcagagggcagtttttcaaagccttgtctaaaacatcttaagaacatcattgaacgagagaggaacattagcggtcaagtcatttgctttctccttgtctagaatatctttcaggtctaagcgtttctgattgagtttctgcaaatcttcctctatttgttgcagccgagccttaccattatccacattcttcttcttttcctttacttccttgagcttcttctccaaccaatccactttaaagccaccttgtgacacgaataaaactgcaatggatgcttcatccagatcagtatcagagagctccgcaggcagttggcacagcgtttcaattattccgaggagtacattcatgtataatgtcttcagacatggtttcattgaagggacttctgatgcaatgtttgggtatatttcaaatatacgcttcacagattctacctgtgaaagaagaagaaaaaaatatcataaaagctttagaagccctgaatacatacagaaacattttgtacatcagagtatttaaatacagaaaaccacaaagaagtatactcgcattaatcttaagtttcttacctgtgaaggaagaacttgaaacccattgacatcaatgatttgttgagtctgtttgagtaaatcaatagagttggcaccatcattatttgatgtgccaataacttcaagagaaacaacctcaataacaattgttatttctcggcaaatcagaaaccctgcatctcttgcaagaaggttgaaagggggtggtactgttggataactacaagcgggaagattctcatcaaagtataggtctgaatctgtagcatcaccacaagtattaaaacatcaatatcacattaaaactaatctaaatcagtcactcattttgcaaaaagtataaatagaagaataacctgtcacaatggagcgtttatgagaaattccatttactatagttaagcgaagttttacatgtcttctccatgaagaagtcagtgattgacaagaatcagcaacccccatgtattgatagaagaactcatagttagttccctttggtaaggctagaagacgcctacaaaaaaaatcaaatcaccagaacataattagatgaaaagtacgtttggaacaaaagttggttcagtttttaccatctactgccagcaatcagaaagggatcagaatgactctgcttaggataaaaaacgttgagatcctttatcacccagacaaatttcttgtcaacttccttctccattatattactcgcaatgaaactacaacagcatgaagagaattaaaccaaattcatgtacctaccaatcaaagtatcaaacacacacactctccaacaaattctttcttagtttaacaaagattttactatgaactcaaagacatatgaagtttcagccagcagtttaaactacttaaaactagttgaccgtagttgaggaaaagaaatattctaagacatgcaagattaagggaataaagcgattacccttgagaggcgagttgaaagagaaacagcgactcagaagtcagaactcgtacccactttgtccaagttagtccaagtttgtcagagctacgaacccaatccaaaaaccaaattacttggatcgaatagttcaaaaacgagattcaaccatttttataacattaatcctctaaaccaaaaaaagggagatatccaattccaataaggaaagaaactaaaatcccttctttggaattgacttttccaataaggaaagaaacttggacttgagattctgtttccttttttcttggtgaatagaccttccaaggctttttaggtccttttgtgttaaagagaggaacaggatgccaaacgttttcaaaaggggttgccaatttcttttttgatttttttttttttagtaaaggatacagatttttacagtaaacttaggaaatatttgtttaatttaatgaagataactgacgcttttatatatataatcttgcaacaatttgttcaagtcatacccttacaaaacaagtaactaaatattagagcagaagtgaataaaagaacctaaaagattttcttagaaatactatgttacatctcaatgtcttctagatctggtaaagggaacctaagaatagctgcaattccagtatgctgtgctagttgttcccctgaagcatgcattgacgaaaatataaaaacctctcctcctgaatctttcaccgactccacaaaatccacatacttcttccttgttttcacgtcagagttcctaaatagcccatctataatgagaagtgtttggattgccattcgttcatgagcaacttccacatgttttggtccataacatgctctatttggatcattcgaaaacatggtgaagaaatcgttgagagctttgacctcttttgctgctttagtatctttgatcatattcatcacgttagggtcatgcaaaacctcgcttaggctatgtttatatcctgagtttgtgtgcaccagaatgaaacgtgatttgttctcaagaataggtctcaactgtcttctctctgcttccaacaataggtggcgatgaaactgatcttttgtaaacccgggacttgcaatcactgcgcatcgaaccacactgaagtcaacgtgtttcagaaaggcttgcacaacattctcaaagaatttcttcaaaactgactcgtaaccagccgttccagctccatgcttccaaggaatcgatgtttttattcgtgcaccgcaactttttacacttttgccggcaaggaagatttgtgccagtccttcttgcattagaactacagctaaatcagcactagctgcaagatctgaggcctgcttgagtgtatcaagagccagtgagtcccaattttcctttctcaataaaaaaggtcgtttaagctcaatctccaaagtatggaatgcaccaatccttacatgctcgttctccatgatattcttcccgcgtatgcgcataacatcgccgtctttgtcatagtccacctcctcaacttgtacttctagcttaagtttaacacgttcagtccgggtgaaagatcttttctttccaaggtatttgctttctattcgacttagcgatggagtcgagtctcttccttcaccaccaacttttctgaaagtgatagccattacactatcctccgggccaatcaggttataagtataccagagatcatccgagtcctctgccatcatcttaacgcttccgggtccattacgaacaaaatccttgcgaatgattttcatctttcaggatttttgaaggtattttccactaacagaatctgaagaataaactgtcgatcggaaattgtggtagggaatgaagaacaatcaatcgctctgacaagaagagaagaaaaaataaaaacttaaagtaaacttttgcttaaattaagctgttattgatctgaagaaatagacttgatctcctgagatatacatatttatagctagctataaagcttacataagtcgtctaggaaaactaggaaacgtattttccttttctacattgttaagtattggggatagagattaatctcattaggattattcctatatatcttctgattatgtcctatattttagggactagagtatatcttatacgatgtctctcttgtataaatattatactttgtgaatcaataaaatcaagttagtgcaatatctaattctacatagtttctttatttcattagagcatccttatccataggttgttaacaatatcataagaactattaaaatattatattaaacaaaataagaataaaaaaattaaaaaaaagtatacttaagagatgaaaaatggctcttagctaaaagtttttagatacattctctctagcctttttaatatttaaacattattttgtatatatcaaaattgtttataattctatgtaagagtcgattgataaagatggtctaatttccttttcttaatttttgacgtaaattaatcaaaatcacgtgctgctcacatgttgttcttactattttgctcacttcttgttgttcttaggatatctttcgaaatcattggaagatatgacacaatttgaatggatattaatcatcatcatttcctaaatctttttcggtagtttgtatgagattagaagcggctacttattatcttgataaggttaatataaaaatagacataaaaagagaaaaatggaggagaaacataatggtttagcacaatcgaaaatagagtactactctgtttctcacttgatccttcactttcactccatctccttttctcaaatccttcctcatgtttttgcagcaccactattcaagccttaaatctcatgacggtagagaaaaatggaagttatgatccaagcttagtgatttcccacttactcaacaaaagagccatgtttttggatatgagagcgagaatgtgagattagtcaagaaacttaaaatatttgtccacttgttttatggtgattagtcttgtcactctcaaaacacattactttaacagcaagaaactcaatattttctagaagaaacctagaacttcctcttgaaaacattgttgaaaatttccaagatatgtctcttttatcttccttaagttttaagaagactatcattacgaacctataaacgaacagaccagcacactaagcagaaccaacctccaagtgtcctaaaaacacaagaacatcaaacaacatcatcgaatgagagatgagcttttgcagccgacaccttggctttctcttcctccactagcgcttccatttttgaacacttgagcttcaagtccttcaacttttcctccatttctcgtagccgagtctcaccagcttcatcatcctccttcttttgtgccacctcataaagtttgttctccaaccaatccaacttaaaccctgcatttttcatacatccaattgcaatatatacgtcacacaaatcatccttggagagttcttgaggtgactgagataaagtctcaatcagactgagtagcaaactcatgtaaccagtcctaagacttgagttctttgggtggatttcagatgcaatctctgggtgtctttcaaaaatatggctaacagattttgcctgccaaatgaaaatacaagtataaattcgcatccctattcaaagacagtttaggagacatgcacctcaaaaaagaaccatataatagaacactatctatctacacacaaagtctgtaacattcttaaattgtatttttacctgtgaaggaagaagttgaaagccattaacatgtatggtttcctttactgttgaaataccttctgatacatctacgtctccaataacttcaaggatatctatctcggcaacaattttgagttccccgtttactagaaatccactatctttggcatggatttcatttaggggaaacatggatggacaaccccatttgattgagtcgtcaaaccactcttgtacttctacaaaatcacaaaacataatcaacatttaaatgcatctaatatatcacactacttgaactatgctctaggcaaataaataatcaccatttggttggaagctttttttcgagttttgatttactaaagttagggtatatcgagcatgtcttctccatccaaaaggcaatgatccattatcggcgacttccagatacagagacaagtaaccaataaagttatatccctttggataagcagttagacacctgcaagaaacacaaataatataaaagaatcagcaaaacgaagaagaatataatatcccctaaacctaaatcttcttaccatttgcagccatcgacgacaaaaggatgcagggataccctcaaaaggagaatcatctccgtaatcaaattctggctccgactcctcttcatacgcagaataatcactcatgtagttatctggatatgaataatcactatcatattcgtactcgcagtcctctgatacgcgttatcatgctgcagcaaatcctctttatatgcatgacgatcgtaattcataaatcttctttagtgcttcttcgtcaaaaaagaaaatcttcttaatttccattaccatcctcacaacgctgttccccatcgaaattataggaacctctcccgttcaaactgcagaatgtaaaaaagaaaccagaaatcagtacttttaaaaggaacattgtttaaaatcaaacggagaaaaaagagattatacataccaagctagctagctagggagttttatctaattcgtgagtttcttcagaatgcaagagatggatatatataggatgattaatgattgataccaaaaataaagaaggtgtgcgaatgtaaacagcctttgctcatcgtaacttgacactctgccataatatgcagaaaaagcatgcgtctcgagagaagtgcttgaatgcgaacagcctttacatcaacgtgtttattctgcatgaatatgaaccaaaatatgacaatatcaatgaatattaaagaagtctacgtcgagccacgagccatgactcttcaagtgccacacctctgtttatagcccaaagagattactttttttcttttatcttcaagattagtgtcacaattgtataacattccttcacaaaaatatgaaaactttccacataagaggattcatttcaaaacatgccaatgaaccgagtgctgaagaacttccaaagaacaaatctttgcttcagacgcaagaaaataaatatgtcgtcaagaaactaagtgctaaatcaaatgtggtagctgaaacttgcttgataaatcatagcgtacaaaggtggaaacttcaaacataagttcaattaccttacaagagcaaatcttattttgaaaccaagggagaaactaagatatcagaacaccaaatgcctaagaactcaatgcatcaaacaacatcttcaaatgatagaggagttcttatagctgacaactctgccttttcagtatccattagagcatctagctctgtacacttttgcttcaatttcagtaaagtttcctctgtttcttggagcttggccaaacaagaccgctctttctccttcttatctcttacttggtccaactttttctccaaccagtccaccttgaaccccgcatctttcaagtatgtcagcgcgatgtctgcttccacaagatcttcattggagaactcttgcagtgactggcacagcgtctcaacaaggctgagaaggaaatccatgcatgctttcctcagatattggttctttgcacggaattctgatgcaatgtcagggtgtctttcaaatataagtctcacagattctacctgcaaaagagagaaaacataattttacaatgcatataagataacatttatttagatatttggaaatagacgaagacatgatctcgtctcttgtaaagtaacaagaagtttgcagcattcttaaatttcttacctgtgaaggaagaacttgaaatccgttgacctccatgctttcctttctgggtgaagcttcctcaagcaaatcactagacaccgcaccatcatcattaagcttaatctttttcagaggttgggttggatcttcagattcctctgactcatttaaggggtcaatgaatccaagagcatctacctcagcaacaatcatgagttctccattaactagaaacccttccttttcgtcatgaagtttggtaaggggaagcatatataggaaaccccaaccccacatttcctgatcaaaccagcgatgtgtttctgtaacaattcattcttcgttaaccaatatcgaaaacagtactccttatcagtgttgacaacttggcaaaatatagagtgatgaatatcagtgttaagaatcacctttcaataccgagcgttcttctcacacctgttttactatatatagccgaagttttacgtatcttctccatccagaaggtagtgatttaaaatcagcgacttccagaaacagagacaagtaatcgcagttgtttccttttggatagatagaaagacgcctgaaaaaaaaagaagaaacgagtcaataaaacctatattttttgagttcgacaaaaacttttaaaaggtaagtttcttataccatttgcagtcaccaatctggaatggaacagaataaaacttcttacattgcaaagaggagaagttctttatcacccaagcgaacttcttaccaacttgcttggtcattgatgtagtaaaagattcttcctgatcaaactgcaggacctgaagaaaaaataataagttcatcacacatccacaaaaatccaatagatcagtggcaaggaaagagagagagaacacacaaacttcgtaaaccaacaatgtagtactagtgtaaatagaatcatataagttgaattaccctgtgtgttcattaatattgatataatagaatcaaattataggtatggaaagagagaaacattcagtgtcgcatgcagaaacgaaacggaggcaaagaaaaaaagaaagctatgtttacctttcagagtcttgaggcagtttagtgtttttgaggaattctatctgccacagatagatatacgaaatatgcatgagtctcgattgatgtgcgcgaatgaaaacagcatttgtccctcgtgacttgatactctgccataatttcgaattattatgttgtatgagtattaaaagattcttggtaaagcgcaggtgcatgaagaaaccagaggatcaatgattatttgaggagaaaactaacagagatttaggaaaaaacagagaaaacgaaaaaaagcgagggatatatatatatatatatctatgaatctcgaaatatgaacagccttgactcatcgtgacatgatactcacctacggccacaattacgtattaaaataatagaattaccaaaaaaaacatttaaggagtacagaggtttaatttgtttgttgaaatttaacaaaatcaacatcaaaaccaagcaaaaaaaacttaagattcaagcctcacaaaattacttttacattaagtaacccagcttaaaccatttgtaaggtactactccattacaaagtactacaaaaacttttaatacttagtcatcatagtcaaagaattc

SEQ ID NO: 1092 - DNA, 94239 bp, Arabidopsis thaliana
gaattctatctgccacagatagatatacgaaatatgcatgagtctcgattgatgtgcgcgaatgaaaacagcatttgtccctcgtgacttgatactctgccataatttcgaattattatgttgtatgagtattaaaagattcttggtaaagcgcaggtgcatgaagaaaccagaggatcaatgattatttgaggagaaaactaacagagatttaggaaaaaacagagaaaacgaaaaaaagcgagggatatatatatatatatatctatgaatctcgaaatatgaacagccttgactcatcgtgacatgatactcacctacggccacaattacgtattaaaataatagaattaccaaaaaaaacatttaaggagtacagaggtttaatttgtttgttgaaatttaacaaaatcaacatcaaaaccaagcaaaaaaaacttaagattcaagcctcacaaaattacttttacattaagtaacccagcttaaaccatttgtaaggtactactccattacaaagtactacaaaaacttttaatacttagtcatcatagtcaaagaattcttcactaaaggcttctgaataagtatcatcatcatgatcccaatcctctccatatgcatagcattcattagggtcttctgaatcatcatcgtcatagtcccactcttcatcacttacatcgtctggatgagtatcatcatcatgaccaaagtcctcttcagattcgtagctttcacttgtgtcttcctcacaagtatcatcattctctgaagcaaaattatttgcagagtaatcactcaagttctctgcaaaagctaaatcaagatcccaatcttgttcatatgcatagcagtcatttatgtcctctccataaggataatcaaaatcaaagtccccttcatatgaatagccatcactgtggtaatcaagatcacaaccctcatcacaaatatcaaagaaatcactccagtcgtccatcggtagaaaaggaatctcttcagctcaaactgcaggagaagaagctagagtgaggatcagtaatgacaatataaatagttaacatgatcagaaatagaacagttaaaagagatgaaagtatcaattgatagggaatcgtccttcggagaagcatgaataaagaaaaacagccactgtattcctatatgaagcatgcatccaacgatattcgactccaaaacgaaacaaagatgaaacataaattgaaaggcaagtgcatgcatgaagaagagaaaaatagagaatcagtgcctcgttgattattaaccttaattgttgcatagaaggagtggagatttatacttacagagtggaaattctgtttctgtaaggataattcttcctgctacaggtatatatatatatatataccatgaagacaacacaggcatctctaaaaaaggagcaggaatgcgaacagcctatgagttgatgatactcggccataattacgaaataataaatgctgagagagtgaagccgcgactcttcaatgaccatcctctgttcatactcgctacatttgtatcgtcaagattcatatccgtactccatttgactacctcaaccgcacattactttgatatgccaagaaaagtttatataaggaagaaggagaatgctctgtatttggcacgtgagaagccacttgtgtgaagagaagtggatactctggaccatttggagggtttgtgttatgatctagagtataaataagtgaacttggtatacttgtaattgaaggtgattcccgagggatccatcttgagagattcatctagattcaatttattgttcttgttaaggaagaaatagcttgttctttaacatagtttttcataatacctaacaacttttaacacatgagaaaaaaaaccaagtcagtaaagaggaaagatttctgacagccaaaacctctggatttcagagacaagttttgatttagggtatgattggttgggctgtagaaaatttttatagccactaaaaaggttacagccttaaaattgaaacaatcatgcggtagctttcctattttttctcacagcccaaataatatttttttaattattttggctgtaagtacaagtttttctaaagcacaagtttatggtctttagaaagtctgtacatttttcttattttcttttcatttttttttttttttttttaaaaaaaacattactatagttgtcatatatatatatatatattaaatttagttttatagatataaatagtaggtaaatatctattttatgatatatatatgtataaaacacacattatttttaatatatatatatactttaattgaattgatatttgtgaataatattatataaacatcaatacaatttaccaataatacttttttgtttaaaaatacatacaaccaaaatcttatttctacatccaatttttctttaagtaataatattatattaataaaacttacagtctaatttctacagcaataaaacttacagctacagccatcacacctacaacaaaaattctacagcaattaatatacagttacagacgaaacaatcacccacttagagtcctgaaatcagactgtaacatactccagttccagtttaccaaaaaagcttgtcctattcaccagactccgttaagacatacgaaattactttttcaccaagtaacatagcttaaaccattttgtttaacggaactaagcgactccattacaaagtactacacaaactttggagcaaagacaaaaccataacaccaactcaccaagtagactcatatatcatgaaacaaagaatgagcaaacaaacgaaaataccaaagaggcataataataaaaaagcatcaaacagctgcatgaaagaagagcttccagtccaggtcttatcactttccaattctgagaaaagtttctctcctttgctgccaagtgtttctcatgcgccttaccaagagccccgattagaaagaagacgataatcagaaatgttacccacatacgtttgttctttggactggttttcacagaattttcaacctgcaagtgaaaaatcagtctttttagacttgaaaactgactacaaagtaactctagtctagttttgtccttgaaaatcaagatctctaaacttacgtaaaaagttcagaaactgaagtctgaagagaaagtgaaggatatttcttcttattctctctgtaaacggtatatactaattgtttttaggtttactcattttaatcgtctttctactgtaaagtaacacaaaagtttaacgaattcttagagcatcattattgggggattcttagtgtagttcttaggttaattggatgtaaaaattaatgattaaattgatttatttgctaagaatagctcttatataagagcaaaactaagggttaaaagttagacaagtgtctattgttgatttgctgaatgataaatattaaaggagcaaaaaatcaattcaaatttcaatctcatccaatgaattagaaatgtcaaataactaaaccatttgttcttattttttatatcatctatattaaactatcagccatttttttttaaaaaagttatatgcccataagacattaacaagattttggttagtctttatgaatgataagcctttcaatttgttatctcatctatgttaaactatcaaaatttgtgtgttttgtaatgtcatgtatgtatataagttgtaataattattaagttttttaaaattaaattgcttttatttttttttatttttattttcttcttaagaacttgaagctaagatcccaccattgcatattactaaaatttcaatctcttaactaaactcttaacatcaaaattttcaaaatcaattatatatatatattcttaaaaactaacctaagactacactaagcaaccatcaataatgatggtcttagttatcttacctgtttaacattgttgctctcctttggtggtgaagttttcttgagcaactcattagactcagcaccaagattctcagttttcttggtcacaagtttagatgcctcttcagatttctctgattcatctaatgtgccaataacttcaaaaacatccaactctgcaacaatcatgacttctccgttgacaagaaatccaccatctttttcatgaagttttgaaagagaaagcattgctggaaaaccccatgtggttgacttgccatcaaaacagtgctctgtttctgcaacattacaaatacaacatagtcaaaacccttcaagaaatttcaagccttgtcctaaaagcatccccaaaagaccacaacacacacttgaccaatatctaatttagtcaaaacaagctcaagattatatagaattggtaatgaatggaagtagaaggatttacagattatatagaatttgtacagtcaaaatgtttaatgtaagcaaatgctactaacacaggatcaggactattaaaaaaaatgtatccaactagtgagcagagagggtaaaatttcacctttccatacggagagcttttgggaaaattgatttactatactcaagcggaggtttacaagctttctccatccataaggcaatgattcagcttcatacacttccagatagagagacaagtatattagagtgtatgaagaaaggagagagaggccgatgaggccgagccatctccaagaaagagaagaagaagcagaaaggagtcaaggccgaagtcatgaaaacaaggccgaagatctcctcatcaaacgctgaaaaagccaagtaaagagccgtgaagaacaagtctcggcctaagagagtgtccaaacggttttatgtggataaggccgagactatacctcaagatgaaggcttgagcttgtgttaagacccaaaggaaataaaagagagcccaaggaagaggcccattcgtttgagacaagaatagggaaacaatgtgtgtgtgcaaccatgaggggctgtcactatccacgccttggggatgcttatggacgttggagtatgcaaacaagggatgatcacatgttctattcaggatttgaatgttaggacatgtcactttcagtcttaggattcaccctctctctcttcacgtcgctttctctctttggtctttgtgtagagttcgaactctcctctttgcctatttaaaggctgtgtttctctttgtaatacaacaagaataatagacaagctcttatatcattttgtgtagctctctcttctttacttgtgtttaactaaagagttacaatgtagagagatagtgttacacgatttagggctgccttaaggcagcctattgcttgtcatacacactcttaaatacactctaaactcttctttagttagtacttattctctagcttactgatcctaaatcctctttatcttaagtacacaaactctaagtgttgttgtactagacaaggattagcctcaaactagatgttttctccttcatataaccgatttactctctagtatattcggatatattgttggttatttgtgtggatttcatcacaagttgatgttctcttcctctattgaacgagttcactttgtgtgggtaaagggagattcaatcaccaagtgattgtctactctctcttgtgagctttgtctcataaaacctaacaaagtattcactgttatttcctttgggaaagacaataagacgcctgcaagcaaaacccaaagaacagaatcacaaaccatagacgattcacttgaaaaccaaagtagatgaaaaggtccattttcttttaccatttagactcgctgatcaagactggaacagaacaacacttctcagactgcaaagaagagaaatcctttatcacccaaccaaacttcttatcaaaaggctttgccattgatgttttaaagattactcaaaatcaagatactagaacctgagagaataaaacaccttaaaatgatcactcgtccacattcataaacctatgccaataacacacaatctaccaacaataacaaaccaagaaaagctaagattctacttaggacccaaaaggccaaaactcagtacagaatgcaaagataaagcagcaatacttactagtgccagtgacactgaaggagttctgtcttgtttgcaagtttcctccggcaataaatatataaaataaatgaagagcatgcaagcatctctaaatgacgtgcggcaaatacgagcagccttggctcatcgtgatttgatatactttaacaatcatcattaaattaaaagagtagctagaaccacctggcttgaccacgactcttcaagtgcctctctctgttttcaaacacaaaaatattactttatcttagaacccaacaaaaagtagaaatttatcctcaagattcataagcatgtgacttcaagtgccactctccgttcaacacttcacaaaatatgacacaattctctacatatttggattctcatttcttaagcttggaactctccaagatttctgttaaagcgaattagtttgtggtcaagaaactcactgatacaatcattagccaacaactttgataaatcatcaccgcaacttactttaccacagaaagtgaaaaactaagatattaaaacaccaaatgccttgtaactcaagtcatcaaacaacatcattgaatgacataggagttctggtggccgacaactctacattctccttctccactagaagatccaagtttgaacacttttgcttcagtttaagtaaatattcctctagttcgtgaagccgggctaaaccagactgttctctctccttcttgtctttcacttggtccagcttcttctccaaccaatccaccttaaatcccgcatcaaaaacaaaaactaaccgaaccaagagctacgatatagtcagtatccactgtccactcaattctaaaccactaattgaaccaaactcaattctaaaccaaaaagccttttaagttttgaatattcaaaaacagagtttccctccactgcgtattaagtcttaactaacagtttgtccattagttaatgaattccgagagcctaataaccttccaagatcaatgttacaaggcacttaaattgagtgatacaacaacgtatttggtagccgaagtttcagtagaccaaagcagtcacaaaatgacataagttcagttaacttccaagaagacctctaactttgaaacaaagggagaaactaaagatatcataacaccaatagcataagaactgaaatgatcaaacaacatcatcgaatgacagcggagatctggtaaccgacaactcgtccttcttcttcaccactagatcatcaagatctgaacagctttgcttcagtttcagtaaatggtcctccatttcttgtagctgaaccatatcagacagttctttctccttcttttcttttacttggtccagcttcttctccaaccaatccaccttaaatcctgcatctttcacatatgtcaatgcaatgtctgcttccacaagatcttcatttgagagctcttcaagtgactggcacagtgtctcaattaaactaagcagaaaaatcatgcatgatgtcctcagatgttggttctttgctcggaactctactgcaatgtcagggtgtctttcaaatattgatctcacatattccacctgcgagcgaaaaacaaagcaagtataaagattcgaagagaaatcttgtaaagtaataacaagaagtttgcgccattcttaagtttcttacctgtgaaggaagaacttgaaagccattgacatctacctttccctgggtagaggaatcctcaaatacatctgatgcaccaataacttcaacaataatcatgagatcttcgtttaccagaaatccaccatcttccacaaggagttcataagggaatgtataacccaaggtaggattctgctcatcaaagcagtgctctgattctgtaacatcaatttcacctcatgagtggatatgaaatctattttggcagcttggcaagaaacttgaaaactaagccgttcaaatcaaacatcctagaaagcaacagtaataccagtccaaactaagtcacataacactattattactaacaagagtgtgcgagtctgtgagggtgtgtgatattgtaactggcaatgacttggataaaaactcttgcatacaatcattcaccaaaagtgaatcaacaagtgaacacagtaaatagaatcacctttcgatatggatagcttttcagataattgatttactattgttagacgagctttgacaacttcagaagggaataattgagaatcaggaaggcacaaggtcatattcagcaagaagacgcctgccgaaaaaaaacaccagagaaatcaaaatgtatcaccagactttaaaataataaaaaacatttgtaagatgagtttcatttggttgcacaaaaagagaaaaaaaaaaaaaaagagtttcatatttaccatttgaagccacggatcacaaatggatcagaataacatttctcggaatttgaaaaggagaaatttttgatcacccacacgaacttctgcccaacttgcttctccgttggtgtaatgaaagattcctagcaaacaaataggctcttgtaatacagaacacatagcagcatgtctcttgtaaagtaccacaaagtttcttaactttcttaccggtttagattcattgacatggttgctttctttttctggtgaagttttcttgagcaaatcaccagactcattgccatcattccgtatttttttggtcagaagttcagatgcttttcccgaaatatctgattcagtcaatgtcccaacagcttcaaaaacatcaacctctgcaataatcttgaagtctcctttcaccacatgttcagactgataaagttcagtctgaagtttgcatatgggaatcctttctggaattggaataccccaagtggtacgcttttcgtcaaaacagtgatctgtttcagcaacattacatccaaataatgtaagtaatctgaaatagaaatctgcatgagcataaaacaaataaaaattcaagactgaactaaaaccccaaaacttacacaacacgcatttgatcaacatagaaactactacatgtatgccgagtaaaagattaaaaattaactatcatttatttagtgactagagtaagaagaaggatgaactagattactagaattttttgcgtttacaaagtgccactgacatatacaaaggacagttcaatacaatgaatcaagaagggagcaaagtttgacataattcacctgcttttatggaaagattgagagaattatgttggttccgtaaagttagccgaagttctacgtatcttccccatccacaaggtaatgattcaaaatcaaccacttgtagacacagagaaaagtacttatctcgaatgggataagcgataggacgcctagaacaaaacaaaatgacagattaatgaataccaacgacgatagtataacctaaatctaatttggtgaaattataagataaaaaggctctagttttaccatttgcagtccccgatcaagactggaacagaatataacctctcagattgcggagagaagttctttattatccaacaaaactttttatgagcttgcttctccattgacgctataaatattgctcaaaatcaagatacactgtgcctgaagataataaaaaaaaaaactttaagatagtaagccaaagaaacaaacaaagatcccactacatatgtactcaaagactagaaacagttagttgataaactctctgatttcaaaaacattggtaacaatgaagaagtaaaactagaggatcagatgcttagttgagaatcataccaacaatggttttgtcttgttctgaagtttcttctggcaaacgataaagatatatatgaaaaaatgaaaattctaaacttctcgattaaggtgagcagatgcagaaaggagagtctcgattgatgtgcgcgaatgaattcagtcttggtccctcgtgacttgatactcttaactacgaattaatataggagcctaggtaaagcgcaggtgcatagagaagagaaactagaggattaggtgtgagcataatacctgaaccggaagaatcgaaccgaatccgatccaaaatatccgaatccgttctgcttcggttccggttaattagccgatcggttctgttttcaaaaaaactatgggtattggtattactcgaacagaacccgatacacgtgaatactttttactacccgaacatacagtagaacctctataaattaatactctatataataataacctctataaattaataaattattccgatcccgagttgggaccaatgtaaaaagtgatataaatcgataaattaataagataataatttttttgaaagtcctatgtaaatatatggtctcatcaatatcataaattaataattctataaatgtatcgaatatatctctatattatatgtaaaaaatttcttaaaaatatatttataataattttttgcttaaattcatatttgttatttgtttgactatagttttcatattttactgtatcaaacattttggtgttgttttctagatattattattatgttttacttgtaactggttctagaaagatattttctaaaatgaaagaaatcttatcgatttttttaaaaaagttattaaattaggaaaatctctctataaattaagaaatattaatttatcgataaattaatacctctgtaaattaataaaattttgcagtcctaacattattaatttatagaggttttactgtatatatatgcattaataatttgaatttgtgacttgtttaatgatttgagttatggaataaggtcaaaacaaggtttacgttttattttagattattattttaagaaaaaactttggttatttatgggttctttaaccaatatccaaattatccgaatagaacatgacccaaaattgtacatataacctaacgaatctaaaaattttaagcccggaaaaccgaacccgaccagaatatccacatgcccaggactgcaaaggatcaatgatttgttgagagtcaaaccgacagagatgcattaaaacagagtaaaaaaacggctataatttatgaagaatatgaaaagccttggctcatcgtgacttgatcataagcccaaactataaattaaatgatgaaaatgcaaatgtatgttaaaggagtctatgtcaaagcaatagattcaagtgcaagtcactgtttcagacctagagaggttgctttatcatcaagattcatacccatgagagaactctccaaagagatctaacaaatttggtagctgaaacttagataatcagccgcaaaagactcccttcttcacaataagtgacaacttcggaaatacatgagagttcattatcttttaagaaaaactccgatcttaaagaatgcctaagaatttaagtgatcacacaacatcatcgaaggagagcggtggctgccttctctgtctcaaatttgtgcttcaaatcatgatgcagaacggagaaattaatttcactttcatcaatcgaaaacagagtaggggttcttcatcattttcagtcacatacccttagtcagtcactcagtctccatctcctcgactcatgcctatgaatccttccctgcatttttgcagcagaacaaaagcaaaccttgaagcccaggaaggcatagaaagtggagttattatccaaaaccaaaaatttcccagttactctcaaatagagtggagagtatgattacgtgtttggaacattgcaacattcttgcagccttcaaaacttaaatcctcaacatacactttagttgttcaaatgttttgaaatagttactctttaaggttaatttcactactcagtcccattcgacataaaactcaaagaatacaaacttgggccttgcttccaggcataagaaaacaaagattcacctacaaagccacaaaatcctgaaaatctgcaaacaccatcgttgaatgagagaggagctctcgcaaccaaagcctccactttttccttctgcagctgagattcaagatccacgaacaaaagcttcagcttctgcaaccgttcctccattgtttgtagccggggcccactaccctgctccatcttcttcttccgagagacctcatccagctttgtctacagccaatccaactcaaagccagcatcaatcagatcaacaagtgttacatcagccttgctcagatcatcctctgatagcttctctggcgactggcacagcgtctaggtgaggctaaggagtgcatttatataagctcttctgatctgtttgttctttggtcggaagcctatggctatgtttgggtctcttttgaagatatggtttaccgattctacctgctagcaagaacaaagtgaactatgatgaaacccattctaacctgggacataaaaacctcaaacccattgacatccgtagtttcctttgctggtggaatctctgtaagcacattatttgaagtctctgcaacagatgccacattgttaaacgccttaccaccagtttctactgactgagaggcatccttcaaggacttgttttattctacaagacttgtgtctctagcactgtcagtccaaacaagagatgaagcctcatcatcgacatcttctttatttgcataatcattttcattgttagaaacctcagtcttagatgccacactgttacaacttatagtacccgtataaaaagcatcctctatggcattcagaattattcaaacagttttagtatagaaattaagtcggttttagtatttgatcatcagttgttttggtttttttccctaaagttgaagtaaataaaccaaattgttaaacctgaaccaaagtaaaattcagtcaagctaaaaccaatggaagaaaaaaaagatatcagaagaccaaaatgcctaacaactcaaagtcagcaaacaaaatcatcgaaagacagagcacttctggtggccgacaagtctgccttctccttctccgcaagagcacccaggtctgaccacttttgcttcaatatcactagattttcctctatctcatggagcctggccaaaccagacatctcttcctccttcttttcctttagttggtccagcttcttctccaaccaatcaaccttaaaccctgcatctctcaagtatgtcaacgctacgtctgcttccacaagatcttcattcgagagctcctccagtgactggcacatcgtttcgattaagctgagcaggaaattcatacatgcgttcctcagttgttggttctttccacgaaactccactgatatgtctgggtgtctttcgagtatacgtctcacagattccgcctgcgattccaaatatatgagaaagagagagagagcattctttgtggggtttggaaacagagagaacatactctactataccatatattacaataacaattgaagatgaaaccgccttcttaccttggaagaaacaaccacaaacccattgatatccactgtttccttatctgattgaatctccataagcacataatcacaagtctccgtaacacatgccacggtgttaggatccctaccacgagaggcatcctccaacacgagatgaagcctcgtctttttcacttgttctatactacttccgtttctagcactatcattcaaaacaagagatgaagcctcatcatcaacatcttttttaggtgcatcatcattttcatcattggaaacctcagtctcagccaccaaactattacaacttctaatactcgtataaaaagcattctctatggcattcactaggttcaaacgacttatgtcacaaacttcatcatcattatcatcagtatactcctgggatgcatctccatcatccgaactctcttcagatgcgtcgtcacaatcatcatcatcatcatctaacttctcttgagatgaaataatcttcacaggttccaatggcacaacaatagaaggtaaaacatctacttcagcgacgatagtgagtctgtcattcaccaaaaatccttcagctatattaacaagtttttcaaggagcaagaaatcttgaaaaccccaaatgttactctttgcatcgaaaaagcatggccctcctgtgtcattcccaagaaacggaaatagttaggtttcatctaaccaataagatactacatagagaaaaagacagaacataaaactgagatcatatgattcatagagcttaatataaagataaagaaggaatcagcacgcatagcataatcactatcccaagccatgatcgtatatatgaaaacaatgtacctaatactctgtcggtattagggcaaacattgtcaagagtaatgctaaatttcacttctcttctccatcctggtggcaaagatccaggctcaagatcaagatacacggaaaagtaacgatcattcttagctcctttgagaaaagaaagaagacgcctgaacaaaagcaaagtctcacatctaagaatcaaattccacaaaaaaaaagaaaaggatttctgtaatcgtttctcgctttaccaattgcagccggcgaccgtgaagacgggagagtagcactgatctttcaaagatgagaacttttccaaaacccaagtaaatttatcttgcatcttcaaatctaatgacatgatcacaagttatcgccagtaaaaccctaattcgtaaacaagtaacgtgctttgaaatccagtgtggtagggtttgtgctggttatataaacttataagaaaggaaaaataataagctttccatatttcacagacccgagataaaccaaaccatacctgatccaaaataaaaattgattcaaactaaaccgaactaggttatttccaaaataagtttgttacggtaattgaaccaaacttgttgttatccgaaactttgatagaccgaccatctagtcaatatatacttaccacaagaggacctgttcttttgaaaccattgtggaaaataagatatcagaacaccaaatatgacttagaacactcagcaaacaagatcattgaaagacatagagattctagaggctgacaactctgccttctcaaaacttgatttaagctaattcaaaccgaatttaaatcggttcgttttgggtttatctttttctgagcagaacgaaaccgtaaaattgaaccaaactcgattctaaaccaaaagccttttctggatattcaaaataaacagttgtctatgttgaaagaaagacacgtgtctatgacacaggtgacgtgtcaatccagtatccatcttaaacatctgttaacactcttcatcttccacctactcaatcacacactagcattacgtaacgtatggtacgatctaaattattatacatatcaaaaagtggctggagccgaacaaaaaaaacatacgatagagaaaacgtacggagtaaaaaatggagacttacgttgatgcgattggagaggacacggcagccacaacaacgacggcggagacggctgcaaataagaacaagaagaagttgaaagtgatggttgcgattgatgagagcaagaacagcttcgatgcgttggaatgggctgtggatcatctcagagttgttattagtgccgaaccggaaaccggtcaagaaggcggtttacttacgttgcttcatgttcacccaacgtaccttcaatatatctatccttctggtggaactggtgaagaaaaaaacgcttctctctttcttttattctctatgcgtatatatatattatatgggatgtgactgtatacaatattgagtgagtttggaaattcttagcttcggcggtgtatgcgacagattcagtgcccgaaccaatgaggaaagcacgagaagagagtacgacaaacttattcacacgggcattggagatatgccgaggcaaaatggtgcgctatatgtgtgaaataatttcctaaaaattaccatcaagacatgtctagtttcaactttcaacatactacaagtttggaaaaaatttcaaaaatacaataagtttagggtctatgaagtttactttcagtttaggtttatcaaggtttcataagagtttaggtttatcagtgatcttctctgtctcttgagtttatggttttatgttgtaggtgaagacagagactatgatattggaaggagatcctaaggagatgatatgccaagccgtcgagcaaacacatgttgatcttcttgttgttggtagccgtggactcggcatgatcaaaaggtacaagtttcatttttggtctaaggtctaacaacaaattgagatttctggttgtgactattcattcattcctggtgtttgagatatacagggcatttttagggagtgtaagtgactactgtgcccaacatgcaaaatgtccaattctcattgtgcgaccgcctagagaaacctcaactagtaacacgaaggaacacaagagcaagtgaggaaggaaaccatgttataatagcttctgtttcattccgtttgtactccgtagagaagaaaaaaaagtgtgccgccaataaacaagtttacttttgcaaagtaaagttctacgtagagagattttgcaaaaaaagaaaatttcaactgatctttcgtttgtattagattctaaaccggaaaatcggtttgatcgtctggttaaagaacctccttaaagaaaacagacgctatacagtttctaaatgcaagtaaaagacagaatgagaaacaaacgttacaatacaagccaaaacagtactttgcgagttgttggtgttaagcctgcaagtttgatcacagtggtttcgttgttagtagtgcctaaactctaaaaatgagttaatagaactctagttcggaaaagtttatacctgttggctcattaggatctccactgctacggtgagatcatcgtcggcagcagcaagcgccacttccacttgtgtctgaagaaaatccagagactttaagccatctatttactattgttttagttaacgttggtatgaagcaagaaacgtaccctgtcaaagcccatggctacgagtttctggatttgttcttcggaagcagcaacacgaccctgtgttttaacagctcaataagagaaaagcttctagaagctgtacaagggtctgggtctgagccgaatatcttagagaagaaaagtaacctgggattggggcaggactgctgcattagctattggcgcttgtctacacacggtgagacatgagggtgaggttgaagaatggcgtaataagctgataaatcataagctgaagaaatcaaataccttgaatctgccacggtgttgacagttgcatcagaaaggcggtctggagagctgctatcttccagcagtctagcatggaggtttgggtctgtttctccagctggagcagtaggatctcgggcagtgctaagagttctacctctccccggaaatctactgtcctcagaagactgcatgtgaagtaatatggttagatgtgaatgcatccaccatggtaaagaaaagaaactaacaagattagcatgaacgtacctgattagatgcttccctctgtggcaaccatgaagacaaggatctccaagcatttcctgtagagaaaccactggtcaaagaaaaaatgtcgttaggatattctctgggcaaacagtccagtttttcatatgttcttaggaaaccacacctggatgttgtgttttgtgcagaataagtgggaatatagctggaaggattcccgccagtacacataatgaacttgggtcgcctaatgaagctagactggaagaggacatagaaactggatgagttacgattaactcagagagcaacatcaagaagccagatctgcatgagttttaaatcctcgatggcctctcaattaacaaagaaaaggaaacatcaagaagccagatcttcttaagtacttagtacttaccatccaggaggctgactcaatggtggtaaaaaatgaagagccaggcatcaagaaattgaagaggccataagaatctgaaatccaaagcgactaacaaattagctccccatgaaaatgcaggtttagaaagaagatgacaatgaaaaaggtcaataatcatacatgaaaatccagacaggatgccgcatagatgcccaagcagtgaaacatttgtcatgagaagctggaatactattagtaagatccacggatacctacacatggatacaaacttttacatcatatgagcaacaagaaatgcaggtgggcattaagatgccaacaagcaagacaatggagcttacagtttagcgggaacgttgaagagaccaaacacactgcacagagaaataaagtagcaaatgaagaaatatgagatgcttcatgaatacaaagagttggcaaaaaatagcccacattcagaggacattaaacgcatatcttattaatatgtgtacagacatgtgtagcattaacatgtttggagagaatgtatctgaattctaacaagaagctcatatttacttgcactttgatcttccagagtctaaatcatttaagtagcccttgaaaattcttaccttctagaggtaactccactgagacttgtctctatgacaatcatagaaaacaagattccagaaaatccaatggcgcattcattcatgagatgatcatattggtagaagggattatatcccgccaaggatgctataagaagatgcaatacggcattggtcgttgccagcaaaactgttaggtaaagcaaacggacagatcccatgattctctccagctcagagcccataggaaccaatgccatcatgttgaacagaacatgaagcagtgatccatggaaaataatggctgtataaaacctataaactgcacagataacgagaaacgagtgaacaagaggaaacaaaaaaaatcaggacagctcaggcatctgaatttaaaattaccagtttgcaagacgaaataactttggaaatgtaagttttagtgccaataggaatatcttctacatgacatgcaagcctcaataaatatgagaacataccttggaacctcgatatgattgccgagggtaagaagcatacttcataaaaagtgtcatatccagttaagaggcatatcaggtaaatgaccccacaaactaccaccaccgatgacgtgaggaaaggtatggcattccaccactgtccaactcgagtttgaaccccagcctatgagaaaataaagaatacataactaaccagaaacaagacctttaccagtttataggcttatatctaaacattgtgccgattatctacttggttggacatagaaaccttctaataatattcaaccttatgaataatttcagaaatcttcaaacaaaagtatgatccagagtcacagttgtataatagaatggtgaaattgtattattatacctaaaacttgaagaactaatgaaacaacacaaacagaggctgctataacctattttatgaagagaatgtttctactttctacaacgaacgattggccatgaaactgaagttatgccgaattgaactgctaattagttaactctaccgaattaagagacggtcgtactgatttctgctatcagccatagctcgttctcactaggagtttctcggtaattaaacaagctaaaacctcaacaatttctgactaagatcaaggaatataagcaatcagagcagaaaattgaacagatctcacctcggtaacaatgttcggcctcataatcgaagtcgcgaatcagtcctcttctctgatgcttgcgtgtgtttgaatttcaatgaccatggaagaagacgaacaactctcgtttctctcccaccgtaaaagactcttctcgagatcttaacttcttcgcccggtttagcactttgattctggtaaagtttgtagaaccgggtcggaccaaaaactttttattcgctgagagcaaacatcaatatttcatctcttcctcgcaaattataaagttgcaacggattgaataattttttgtgatgagctaattccgtatgtcatgttgattcatgatgcaataaatcattttggtaaatatgttgagattttgataataatgtaaaagtatatcagacttgagatctgcggttgcaacaagatacagagaacgattgaacaaagtgaggtcaccaagagaacattgatgaaaaatatccaacacacatgagccgatgagtgttccctgccacaaatgttcctccgctgctagaggataagggcttgaaatgccagacacctgagattggttaaggcgcatcgtcataagaaattaacagcaactacatgaacagcaaaaggggatgacgtgaacgcgtgagatggatttaagcacattgctttttgtgatcagaagggtaaaagaacaatcactggtttactcaagaacagtcaaaagactttagagaagcaacttacaagcaagtcacaactagctgtcttcttccaagcctcctaatctggtacctggatcataacttataaacagtcggaactcgtttccgagtttgctagagtgatgaggcttaaacacacaagggcgaacacccaatagctcagctgcatgttctctttgcacctctcctgcaagacgtgagatatctcctagttaataaatcataagatcatataaatttgacttgagaaaacaaaagtacccattgtacctgtgagaagaagcaacaatgaatctactgggcttgcgaggaacaaaattgtttgactaactctttccaggcattccctactctgccaagcataaacgaatcaagatcattaacacgctaactagaaggtactcaaagacatttatgctttgaagatagcaagcaatatagcacacaaaaacatcacagattaatgatatcctcacaagtcacaaatactcctacccgggaaatatttcaaatgataatcaaaacgcagcagagagccacaaagtatccatctttaagaagtgacactaagccatgaccataaccaactgatactccattgtaaagcttacactttttttctttcatcttgtctgcttttggactttctataatcttttaaaagaagattaatttataagcaatgcctatctagcagaagcttcttgaatgtcagaagttcagagcagattacacatcagtctctaaacctatctatcaaggggcagctaaaagatttccaaaattcccatgaaagaacagcatcggaaaagttaagaacttgaagaaactttaccaagtagggaggatctgcaacgattatatggaagcaatgtttcagctgaagcggcagatcttctggttcgttgtaatcatagaaagtgaactcttttccatatctctcgaatctcatatcgtactccagcaattgcacctgaagactaggatctcttttctgactcagcacaaatcaaaacccgtcgcacagaaatttagcatcaacgacaacaaaagtatcgatttttagcaaaacggattcgatacaaattaagggtactgaacaaaactgattaatagtaccttgagataaacgtagagagtagggcaagcaatgcaagcgactctgcagcctggaattctttgagagagagtgaccacttcatctgctacagtctctgcagtttcaggttcgtaccagaactggctgagtctccaatcctccgtaaccagctccactttatcggattcttctcctccggcgacggaagacgccggtggcgtgctcgcaacagtcttgttctggtctgctagaaattcccgaagcgccgccaaagcttgagaactcaacactagtggatcgtcatcttctacatctccgtctcgtggagctgaaacttgaccgtttaacttctggagctcatcttctttttccatttaagcttcggcgtcagaattccgggataaagtcagatccttcggaaaagagaggacttaacggacacagcgaattagagagggctagggctttggttctgcttgcgtttatacagaattttcataaaaagtccccaacttttgaatgttttctattgaagacatgaattgtttttagtgtctttgattggtaaactatttacagtatatattgttatgaattagaaaacagtagaaatcccataattagcttctgtgattttttttaatggtactttagggaaattattaaaaattgaagattttcttatgatttttgtttgggtcaaattgataatgttttattttctgggttaacataggaagtttgaatttttatagggacctagttttaaaagcgaaacattgacgccaaaattaggataaactgaggaggagccaacaaaaataacagagcgatcgtggaacagaggactctatttttctcccagccaatggaacagatttgcatcattgagagattgagatttcatgagaatctcttaaatcagaaatggccgccattatcgttctctctcacgttcccatctaatcctagacccattcaaagcctcctcatttcctttttggctctgttgttttcttccattaaaagaatctcttctctgtttcatttcgtctcatgggttttgtttgacttccaggttctgcttcttcttcttcaccctttctatgtttttggtgattcgatgtaatgtctcaatgatggaatttggatatttgacattttcaggacataataaggaactgcttgaatctggtttcaagtgaaaatgggttagtatttgtgacaacttctatgaacgtttatttgaaggcattttgatctgaggcatatttgtattgattgtgcagagacaaagaccattcttcgatcaatcagttttaatgacattgactcggattcaaccataactgaatcacctgaagctagaaagacgctatacaacagatcccttagcggtaaagggacacaacgatcaagaatttctccaggagatgtggagaacaatttctctattaaacctttaacttttatgaaagaagatgatagatataaaatgcggatatggaaacctgtttgcgaaaacgaacatgcaaaagaatttttagccttgttattaggtgatggaacatatcaagctgcattaaagttacagaaagtttatagaagttttcgaaccagaagaaggctagctgattgtgctgtagtcgttgagcaaagatggttcgtggtgttatgattattggcattggtatatatagagaggataaaattatctgtttagtagtaactaaatggaatttgcaggtggaaggtacttgactttgctgaacttaaaagaagttctatatcgttttttgaaattgagaagcaagagactgcagtttcacgctggtctagagcaagaacaagagctgctaaggtaacatcaagcctatcaactatgttggtttgatgcacccgttttcgttcccattgctccagtctttatataatgatttgaccatttttatccctaaggttggtaaaggcttatcaaaggacgagaaagctaggaagttggctttgcagcactggcttgaggcagtaagaatattcttttacaatttgtctttctctgtggctataagttttgtgtaaagccatgtgatcttaattttctagcttaacagattgatcctcgacatcgatatggccacaatctgcaattctattatcatgcttggctccactgtgacagtaaacaaccctttttctactggtaagattgctattacacaatcaaaagtatgatagtatcaagcgtacaaatttacgagctaacgtccaactttggacatgtaggcttgacataggacaaggaaaagaattgaaccacgaaagatgtccaagatcaaaactttaccaacaaagcatcaagtatcttggtccggtgagttttaccctctagtttctgtgcttggttgaccaattctgtagaaccttagatctattttcagaaaaacttggtagaccaatattattgacatgcttgttagatacctttttgtaatccttcattctttcttacaaacagacagaaagggaggcatatgaagttataatcgaggatgggaaactaatgtataagcaaagtgggatagttctcgacacaaaagaaggtcctcctgacgcaaagtggatctttgtcctaagcgtatctaagatattgtatgttggaatgaagaaaaagggtaactttcaacactcgagttttctagccgggggagctacattatctgctggaagaattgtggttgacgatggtgttcttaaggttaaagaaagaaatttactcgcttatacttatgcaaaagaagagatgttataagacactgcaaaaacgttttgtgttgagtttgagttcgttggatgatattttcaggcagtttggcctcacagtggacattatcttccaacagaagagaattttcaggcgttcatgtcgtttcttagggagaacaatgtagacctcgccaatgtaaaggtaagtccattctggtctgagttttaagtcaccaacatctcataggtttggctctggtttgtttttaggctatgattacatactttattttttatattctgtagaagaatccagatgaagaagatggagaagctcctgctaaggtcaagaggatgccttcaagaatcaaagagaccgaagaagaacattgtgactttgtggatgctgagaccggttttagtcccaacactaagcccaacaatcatgcagagctacaaacattatcaaggttccattcaaaactttcaagactggatgagattccagacgaagacgacaacatgatcgaggaggaacaggatgatgaagaagaacctgaaaccccttcagaacaagggtatgagacagcagaggagacattcatagctgaggaagagttcacatatccaaaatcaaacctgttcgatgaagacattgaagattacgagaagcctgtcctgaaggagaagataatgagacggatagattcacacaaaggaattaaatcttaccagttagctgagcggctacattcgagatggagtacaggtgcagggcctagaatcagttgtatgagagattacccttcagagctacaatttagggttcttgagcaagctcatttatctccaagagcttcttcaaattcttctaagatatctccttttgccccggttagaacacgaggaacaagtcttgggagaagtcctttggccgaagaacttgaaaatctttaggtcgatttatatacatgtgacgcgaatgcccatgtcatgaagtaatcggcttgattcttttttgttacgcaagataaaaaaactagggcttcatggaagaatggttttcttatgtgtgttccttattcttcaagtcacatattcattgttcttttgttggtgtagtaatttctgcaactctgcatatttggaaaaacagaaaatcaagttttttttggttcatatttttgtcatataattattttataatccactgaatcatataatcttcactaatttaattgtcgtctaaaaaatattcatccgaatgtaaatccaatctgaagctaataactactgtaattaggtttaaattagttcaaaatttaaacctaaagaaggagatatcgtaagacttggttgttctctgtttctgactgctctaagaacaaggaaaccttttttttgttctgttttgcttttccggattccttattgacgcttgtagttgactctcattctttctgaggtctgcttcttcttgaccctttgtattttttatttcttctccttaaatacacaagttaatctcgttcttttagggtcaatgttacatggttcttggatactaatagctggtttcgtttagttctcgtttacactaaacgttagttactttttttttttcctgttagcacacacgaattgtttgtttaatatgtgtcttctacgtttcattttaatttcttaaaagtgaaacttttggtagcacaaaatcaataaattggcagcaatcacaaaatcacaatcagaaagaaaaagatagtaattagactaaaattgtgcgttgagtcaaattaagtcacgcaaatcacacgtagacttcactttcaaaaagcgctgaatcaaaactggtggctatgaatttttcccatctctcaaaatctttataacttggtctcaaaatttaacaaatactaatttattaataaatcaatctctgtctctctctctctctttctctctgccagcgaacatccattggagctcctcactatacggcccaagagatagagggagagagaagacatcataattcccaaacaaaagactttgggtataaaattgggtttattgactttgtgaaacctacccagaaaatctaccaactgtctcgaagtctctctcctctttcttgaaacgggaaagagggagggaagaacaataagaagatgaagaagattctagaaagatcaatggaaggttcagggacatggcaaggcttggtgctcgttggtattgtcacatggatctgtgcttcttcttatcttaaatttacccataaatttagatctctcttacaaccatgggtcgctcgtcaagtcgttggtggtgtccctctcattctcagaatccaggtgcctcattaattagctaaagctatcagctttttcaaaatttagaattgaagctgatttttttgccttgacttggaatttaccattttgggtatatgcagaaatgtcagaatggagtgttggatgctttcttctcagggctatcttgtgttgtctctgttcccttttacactgctttcttgcctttgctcttctgggtaacattccaaagcttcttcttcaacataaaagtttaaatccttagtatttagagattttttatgtggatatggatgtacacttgaagtcttactaatcgatattccagagtggacatggtagattggctaggcagatgactctcttgattgcattctgtgattacttgggaaactgcattaaggtatttggccttctataacgcattctcttagtttacaagtttctaaagaagcaagtgttggttttatacgctcttctttatttaggatgtggtatcagctcctaggccaagctgtccaccggttagaaggattactgccactaaagatgaggaagacaatgcaatggaatatggcttgccttcttcacatactcttaacactgtttgtttatctgggtatgttgtctgctaactcgttaccagctttgttgtggaatatcatcatagttgtagaaactccatacctagctagtaatgtctgttctcggtgttattgctgtgagaagataattgactaaatagtggaactggaatgctatagaggtcataacacttgtctccttattgtctggtgtttcagctatctactccattatgtgttatcctccttggaatacgaaagtgtgtctatccagtactatggatttgcccttgcttgtttgttggtagctctaatcgccttcggtaagacccaaaactcatacctgttaaacacacattccttgaaaggatttgattgctcaattgacaacattgttttcttcctaggaagggtttacttgggtatgcatagtgtcgtcgatatcgtcagtggtcttgccataggagtcctgattctaggtctttggcttaccgtcaatgaaaaacttgacgatttcattacatcaaaacagaacggtaagctccttgctcatagtttgataaagctcctaagttgcaaacattgaataacagaaaagccatgactctctggattgtgcagttagctctttctggaccgcgttgagtttcttattgctctttgcttatccgacccctgagcacccaactcctagctacgagtaccacacagccttcaacggggttaccttaggaattgtaagcattgaaagattttcagacgatattgtatgcactagtgttatggtttatttagacaatggccttaatcgatgtttttacttgtcttaggttaccggagtgcagcaaacgtacagccaattccaccacgaagctgctccacgaatcttctcaccagagctccctatttcatcctaccttggtagagtcatggtgggaataccgacgatactcttagtgaagttctgcagtaaatctcttgcaaaatggactttaccaatggtatccaacgcacttgggattccaataagatccagcatgtacattcccaagctcaaggggtatgcaagtgggaagaagacagacgaacccaagaattcagttggatatttgcagaaactatgcgagtttttgagccacgactcgtttgatattgatactggtataaggttcttccaatatgcaggccttgcctggtccgttgttgatcttgttccttcactattctcttacgttaacttgtagtaacagtttcattgtgtgatatataaaatcagtgcctttacatgacatagttcatcaactctgtattcacttgaccattcacaaagtcttcattgttgtggcttgaaagaacagcatttcgatttatattattaggtttcaaataaaaggtgcacgaaacagatatatggaacaaaagggaaaaattacgtgaaataaatcgaaaaaatatctcacaataaacagattctgatgcagaagggagctaataagttcagccaaacacatgttcatgagaggttttaaagttcattgacctctttgcctatattacactattccaagggagagggctaaattgattttaaagagaagcaacctggaacacaaatgcgttgaaccaaatggaataagcagagatcttcaaaaaccaacaaccggaagctgcaggaggagctgagtatcttcaaaggaaatagtcaggtgtccttcgggttacatctggctctcctctcctcggtgctggttcaaactgtttcatgatttagactctgttagttacctttccccagaaaagaagttaaaacaaagatttcaggaaatagtttgggcaaagacctgaatgaacgtgtggttcctgcagtcatcgacctcaagaattgaggccatgtttccacagcgatagcaatagtttggtgcactgaatatagtaaccactttttgctcctgtcaacgagaatatatacatgtgagctaagaatctaaggtttggctaatctatgcagggaagaggagtttgattgtattacgtgtgcccaattgaatccatccataacgagctgatgcgctcgggcgatcagctttaagttgttagtgtgattgaattgttccgaaatatcctatggaaacaaaaatgaaaaaagaaagtcaattacaaacttactagaacaaaggaaaaaggagattcaggaaagcttctgaaactgaggcttcataattcaaatacctgaccaaatgtatatccagcaccacgaggagagattccccagccacatctgtcatcaggatcagaccataataagtcacacataggcccttcatgtggaacttcttgaacccgatcaaagttcctaatgttgtcaagggtctcgatggatggtgataatccaccgtgaaggcagaatatttccgactccacctgtaaacaaggatatacgatatgagatgaacagctcattatttttcggaattaaaactcttaagaaatcgtcaattcaattagacgagttatatttaagagatcgtccgcatttctctgtagaaggtataagtagcaaatgcaatttcttttgtcatttacaacatttcagaataccaaccatctcaaactgaagtgaaacttacgctaacacacgcacaagaatgcacaagagaaaatggataatctatcttataggaataaggaaataaagatgcaatgcatgtactaagtactaaccaaggctgtcagtgggaaatagtcaaagaggtctgtaaatatcttccaaacatttgcattgccatacctgcaagtacaagcaagctttgttaagcaaattacaaacgaaataaccaaaaaaaaaacactttcctacatgcatagaaggagacatatcttatcaaattcatttttgaatggcactatctaacaacaactaaggtacgaaaaaatgtcatgagaacacagtcacatgagcaaagcaatattaacccggtagatcaatataaactagccaggactagaataaagaaagaaagaaaattagcagcgacaacagaaaccatgaggacatgcatagtattagttaaagaagtttgtcatcacatgaacaaagcgagtcagtagcttatacaacataagaatgtttgcagggaaactcactttcgcagacattcatcataaaatccataaacctgagtaatctgtcaaaaaaaaagggtattgaaccatgagtcagataaaaacttgggaggccagaaagttgcagcagataagatatagaaattccttaattgacttgtaaatatatatatcatcgacatgaaaaaataaaattgtaattataaaagggtttcatcttagattttaatgacagaaaacagaaaactatgcctatcgactcaatagcgtatacttcagaaggcaaaagtacaagtagagacaaagtgataacttagagaaaagttagtttacctgacgactttcatggtttcctctaagaatagtgattcgctgtggataccgtactttcaagccaaccaacagctggaaatgaaattaaagaggaagaaagagaaacaaatataaacgttaagaagagaatacatccagtatggagacaatgtattttatttaacaaaataacatgaccaaaaatatgtatttccacttgaaatcagattattgaacaaaaaagaagtttgtaaatggtatagacttggtaccgtaacagtttccacagaataatatccacggtcgacatagtctcccataaacagatagttggtatcaggacactgcaaaagagtgtaagattaacatttaatcaggttttgtaaacgcctgatggtagatggacaccaaaaattagaacccactttcaaatataacccctaagaaaaggctctaaatagttctgattattcagttagaaaccactcacactttgtagtccccagccataaataataattgctagaaaggattgatgcagactaaataacaaaacatgcatctttatgtccattgtgcaagagttatagatgttacctttcccccaatacggaaaagctctgcaagatcatggaactgtccatgaatatcaccgcagattgtcacagggcttttaacaggctgcatacagtaagaatataaaaattaaggctctttaaaccaaatgattgtttagttacacaatctaccacatgggttttataattggcacgagatgcaagatcaagaactgacctgaacgttgctttcatccattaagatctccttagctttctcacataatgctctgacctaaagcaaataaaaaaacactgcacataataaattcatctttcccctcttttacttcctagagaaatacaggactaacagtattatccagtttaacattaaaatgtcaaattagatacaccaatttgacacaagcaacaagcacaaagatcatctacagccaagaagacttttttacagctactgatcagtttttccctcgatattagcttagaagaacttttatcgaattgcaacctctctctcaacttcagctaaatctattatcatttaagatacattcccccaattggaaaatccagtaatgcatctaactgatgagattttaactagccaatcacctaatcaaaaggatacaattttggctgtgggtgagacaaatccacaatacaaagcatattgaaatgcgagctaatcgcctattcagaatccaatacagccagaaatcattaagaaacaaaaaaaaatgaaatccatttctatcaacccgtaaaactgacgtgaaatgagctctacacctatactagaagatccttctcgaagaatcagatcatcatatactcacagaaataatccacccttgatttgaaacaaaatctgagatctaatcaccgaaatggcccaaagttcactcgaaaaactaaattacagatccaattttaaacgaagaaaacgaaaaggtgcgaggaaagctatattctaacacaatcacaggcacctgttgctcggagagaggcttgcactgcatgagctgcgagatctgctcatctagatcgagggttgcatccgttggaagcgaattcgcgcccatgtttttggtagtgcgtcgtcgtcttctttccttcaagtcggatccggaaaacagatcagaaacgaggcaaaggtttccagattaggggcagccctaaccctaaattggatggattctgcgtattcttcgcttttttctttctctctctctctcgccttcgtgtgcagagtgagagaggaaatcaaaacaaaggggcgcgtgaggtaaaggggcgagtgggtttgtagctttcgagctgtgtcttgatttgaccattatatcctcctcgttgagatctaaatgataaattgactaaaacaccctttagttttcttataaaagtgtttaaataggtaatacacacaaaatttgtaaagtagttttatttcttttaattaaacacacaaaaactatataaacatacaatacaactattgttttgaagaatttttcatttttaacaaacattttagttttttctcaaaaaactataatctaagtaaaatgtgtttacataagggtctagctatgggaaaatacattatcaactatttattcatagctaatgaaatgtaattttgatttagccaaaacatcattttaattaaaatttgaatggttacaacataaaattttgaccaaaatttatgtgacatatatatttttattctctctaatgatgcatactaaaatttatgaacgatgaatgtaaaatacaaattgatttgctccttcatgaaaaataaatttaaccaaaaaaaaaagaagaaatctctaattattgacaattcatgagagtccgaacataaaaataatattcaaaatataggttcatgaaagatttagattactctatttttggaaataaatatggtttgaacttttttttacatataagttgaatcgtttttaagttagatacaattaaattcagaataaacaattttaaagttctaaagatttaagtgtaaatttgtttccccaataattattgtatatatgtttttctcaaactcttatgagtgtatataattagattttaaatcaattcttaaaatataaaacaagctaatctcattatcataccatatttttggcttaaggtcattttgaagattaataacatgtctattttatcgcgttgtgtccgatccagaaggtaaacatcgaatttagggtttttctctcccccgagcttgcttttccgttgggtgaacgactaccgttgattttcttcgtttttttggataccgattcgattctctctcaccgatttttgaggttctttctctatatcctctcgttttttgtttccgcctacgtttatctctcgatttcgagctgtatcaactagctagggttccttaattggtttatttcgtttgaggtgatactcctttcttcttctgtttgcgtgatacgattctaatttgcttgcttcgcttggcgttccctggctgggttctctttgtttctcttcgtcttggtagatttgatttcggattttgggggtttcctgcttatggagttcgatttttacattacacagctgctattgtgatttctatgattgcgtttgtgctaactattgacctatttggtatttgccaggttctctatttttcgtggataagaagataaagttattgtttattgataagttttctgctgggaagttgcaactttttctagatttaggacgttacaaatttcaatcatgagtgcatcatgggcagatgtggctgattcagagaaggccgtttctcagtcaaagcctccttatgttcccccacacctacggaacaggccatcagagcctgttgctgctcctttgccacaaaatgatcatgcagggtatggtggtcaaccagctgggtctcgttgggctcctcctagcagtgggggtggtggtgccagcggcggtggctataggaatgatggagggcgcactggctatggttatggtgctggaggaggaggtggtggtggtggtggctggaacaacagaagtggagggtgggaccgtagggaacgtgaagtaaacccatttggagatgatgctgagttagaaccggtctttacagagcaggagaatactggcattaattttgatgcctatgaagatattccagttgagaccagtgggggagacgtgccccctcctgttaacacatttgctgacatagatcttggggatgcattaaatctgaacatccggaggtgcaagtatgtgaggccaacaccggtacagcgtcatgctattccaatactgcttgcagagagagatttgatggcctgtgcccagactgggtctgggaagactgctgctttttgctttccaataattagtggaatcatgaaagatcagcatgtagaaagaccccgtggttcacgggcggtttacccttttgcagtcatcctctcaccaacaagggaattggcatgccaggtaatatacacaccaacaagaatagagtttcttcagaaagaaaaaatgtacgtgtatataatatacacatttctcattctgtgattttcttgcagatacatgatgaagccaaaaaattctcctaccaaactggtgtgaaggttgttgttgcttatggaggaacacccattcaccagcaggtaattatcatacacttttttgtttattggtttttagcttgtcattggagtttggattttgctacatgattctagcactgttttttgttttatgtgagtagcagctttcgcttactgatttgagttctgctagctctttccttcccaatgccagtctcctttgtcaacatatgttctgattttgaagtcagcaatgcataatgttggcgaaaatcaaatcttgtattacaaattttttcatatgctagttaacattgtcgtatcgcttgtatcatctttacataacatgcagaagcattggaatttttaatccttgttacaggtgttagttagtcaaacagttttcaagcatcgatttgttgaccacatattttattgtttattcagctcagggaactcgagaggggatgtgatatccttgtggcaactcctggccggttaaatgatttgcttgaaagagctagagtctcaatgcagatgattaggtttttagctctagatgaggcagacaggatgctggacatgggttttgagccacagattagaaagattgttgagcagatggacatgcctccacgtggggtgagacagacaatgctgttcagtgctacatttccaagtcagattcaggttggtttacttgtccatgaaacacctttttcttgctcttaaattctattctagtgaagtagcatggtaacaaagaacaggataacagtgttcttggatttatgtctgtaactctgttccttcccagatcatgaggtgaatctttgatgatttagtctttagagtgttatatttcttatgtgagaacagctgcataatattcagcacgcacaagaatgattggttcttaacgtttcttttaatattaccgtatttgtttcctgtgcagagacttgcagctgatttcatgtcaaactatatatttttggctgtgggaagagttggttcaagcactgatttaattacccaaagggttgagtttgtccaagagtctgacaagagaagccatctcatggacctgcttcacgcgcaaagagagacccaagacaaggtaatgcattatttaccatctgttcacttatccaagatttattatcactgaagctctgactaattctgcctttcttcactttttatacacagcaatcattgacattagtttttgtggagacaaagaggggagctgatactttggaaaattggctgtgcatgaatgagtttccagcaacctccattcatggcgatagaacacaacaggttcgttgattgagttaagttgaaatttggataattgtgcacactaaagctaaaaccaaactatagaaacaacctcgatgatattactgaaatgaactctttaaagatcatcatcagtaagttgttctctgttgactcaatctgattgacttctttatgttgttatgaattcaaaggaaagagaagtggcactgaggtccttcaaaactgggaggacacctattttggttgcaacagacgtggcagcacgtggtcttgacattccccacgtggctcatgttgtaaacttcgatctaccaaatgacattgatgactatgtccaccgtatcggacgaacaggacgtgcaggcaaatctggaatagcaactgccttcttcaacgagaacaatgcacaactggctaggtcgcttgctgagctaatgcaagaagccaatcaagaggtccccgagtggctcacacgatatgcttcacgtgcttcatttggtggtggtaagaaacggtctggtggtcggtttggtggccgtgacttcagaagggaaggctcttacagtagaggaggaggcggcggcggcggaggaggcggcagtgattactatggcggaggaggctatggtggtggtggatacggtggtgctccaagcggtgggtatggtgctggagtgaccagtgcttgggattagccaattaggctccccaatttttcctctttttaacctgactatttatttcttctcttctacattcccaagagagcacgtgtatttgcccccacctttgagatctctcattcaagagatggatttaactaatcttgctattaggtggatctctctgttttttcaggctatttttaggatttgtcctaaaagatagacagtagtttttccgattttgatcttgttcttggtttcttctaacaatttcatttgttagtttgaaatccaatttgtctttttgtttccctttgttgttgacaatctttcttggtgaaatacaatctctctttatatcattttaaggactttgtgcttacattgtttaaactccgttccgttacttcaaaaagataaaatgcaggtacataaattgttgctctgtgtgaattaacatacaacaattagattcaacaactattgctattcagcttcagaatcttcttcaagctcacttccttccacaatctcttcttcttcagagccttcttcctcaaggtcatcctctggcctatcaagcaaaagttcctctttagagaccatgcctagccctctcgcccgataaagaaaccctgttctcatcacatgataaaacttatctcgaagacgagtgagaggatgcggatccactagttttcctcggcgatacccttctttgaggatcacagttgttgtcttacacttcaatgagaggtagaaaatgccggggtatcgcgtgaatagacgagtgaacttgtgcggaatgttgagctccgctctcatgcttctcaagtagttcctcttggttttcttgtggatagtcaagctcaagagctcgtgcaaaacagccacagctcgtttctccatgagatcgctttccggatcaatgttactcgggtcatcgtaaggagatatgtagggaagtttttgaaactcatccatccatgctttgaccttcttctgtgctccatatcctctagggaaactcataggaaaagtcaacgtagactgacctctcttgaactcgcggtatctagactcctccccggaaacatcattgtcctcgtttcgcttctgcagcgccgagaatgcgaactcatcacgccattttacaagctttaaacacgggttaccattagaagccttgacgaagcagaaatgatcagggtatttcatgactagcgtcttttcgtagttatcgggtaaaccgagatcgaatttgagagaatgtagtgatctaagagagacagtttttgatctcatcatcatcagaactctacagagtctctccactgtatcagcctcgtggctttgatgaataatctcttcttgtgagtcaagcattagtgctgtgtccgttagcttgaaacatggtaagcttgcgtaacgagcatgaggaaattcgtgaaacagagtcggatacctgcaaaaatgtcaagactttcattaccattcttacaaaattgatttctttctaaaccgtttgttccagtaacaattgaaattttctctgattgtgatacctgcgcaagaagcggagaacagggacggtgagaccaaggagtttttgccaatcggcgacggattttgcggtgaggaaaccagtgggagatcgctttatggcgtctttgaggatacaagctgctttgagatcggtctcagtatcaatgacgtgatccaggttcttgttcttcacccacttcagtctcacctttgtcattgcacccattcctcgccattgttgatgctggtgaaacagcttactcaccgaaaagagaaagctttgtgatttgacgaacatctaaagagatttgacgaaagcgcgaaatgtggatgatctgtaattgagagtgcaaaatgggtttagggtttagtgttctctcggagtttagttaggacttatcattgaaagaatgaatagagagaagtaggggagagtaatgcagagaaggtgctcgacgaaatgcctgaacgaatctaaaagcgagatttttcgacttctaactctaggcccacaggctacagtcaaagtaagccttttaagttggttcgcgatatgtttttgcagacagaacctaaaaacttggaacttctttttatctgcggtacacagccaaatttgcaaaaataagttccaacgcgtctagactcgattcgtgcgactcgggaagactaggctcgtttaaaggttcacgcttttgatatttcgagctcctagagacctagactctagtcctgaggctgattggtagaggaaattggaaaagcttggattgaaaactatggaagcgaagaaagtgacagaagaggaagaagagacgtggaggagagagatagtaacaagcgttatgagattagtgagtacgagattgcctcagacagatctaatttctctacttctggttagcccatggctttatcgcaccctcatctcctatccttcaatctggctggtaactaaactttgacttcttttaagtctttccaagttttcaaaaaaattatacttatctgattcaaagtgttgattgttccctttcagaccatcaatttgcgcgagatgaccaatgcaggggatcggcttttagctgctctgtccttggttagtttacaatataaaaaagtttgatactttgatactggactgtgcttgaattcaacttgttgtgagtgtttggaaagtttgagcagaagtcactcatcatgctttcaaatcgtgtagccaagatatcgacaagtgaagcatatcaatcttgaatttgcccagggtgttgtggacagtcatcttaaacttgtgaaaaccgaggtaaatgttttgtagattctaccagttattagtaattacatatggcttttatgttttctgaatattcgtcgaattcaagaatatttgactttgtttgactttgtggatcgatttcttacaataatgtactggctgatttatgaacattttagtgcccggatgctcttttgagtctagaatggttgaatctgaacgtgtgccaaaagatatcagacaatggaatcgaagctataactagcatatgtccaaagttaaaagttttctctatctactggaacgtaaggtgagattctgtcttactcatttgtatcacacttcttgattttatctcctcagacgagcctaatgctttggtttatttcacagggtgaccgatgctggcattagaaatctagtgaagaattgcagacatatcactgatttgaacttaagtggctgcaaggtatcttaatctacatttttggagtcttactcctgatgggtggcgataattatggcaatgtttaacacacatggacaccctttctcttctatgttctctgtttgtaatggatgcgaattttgatttgaatgtgcaccaattgatgcagagcctaacggacaaaagtatgcaactagtagctgaaagttatccagacttagagtcactgaatatcactaggtaagttaaatatgttaaagtctctgtggttatttcaaagtgatagataatccacaacattgttggataatatcattcttcgttttttgattgttcataaagatgaaagcatgatttcagttttccatacatttttattgaatacttttggtgtttattttttttgttcacgatgctgctaggtgtgttaagattacagatgatggattacttcaagtgctacaaaaatgtttctctctccagaccttaaatctctatgctctttcagggtagataagcaacatagatctttttgtttctggctatattgtaaaactagctgttctaagttctggaaatgatattgcaatttctttcagcttcacagacaaagcctacatgaagatatcacttttagctgacctaaggttcttagatatatgtggcgctcaggtaggagttggtgaacccaattcatttagttgcattgtctttctcctttgtggatggatgagttttatttgagatcttggatatctcttactactttgtagagtataattaaagaattgattggtagcaaatccatagcacagactaaatactttgattatgcttttcttatctttgatatacacctgcaactgatagtgcaattttgtctgttagaatatatctgacgaggggattggtcatatagctaaatgcaacaagttagagtctctcaacttgacatggtaagataagtcctccactaattataaagaaaatgagcaagaagctgtgtcttcatatctaaatgctttaacgcaattgcttcttaaacatggcaggtgtgtgcgtatcacagatgcaggtgtgaataccattgctaatagttgtacctccctcgaatttctcaggtacttgatccatttctagaactatttgcttggttttgtcaatgaatctttttgctgacaccgttcaatgaaaacataaaactccagcttgtttgggatagttggggtgactgacagatgtctggagaccctttcgcagacatgctcgactacactcaccactcttgatgtcaatggctgcaccggcatcaaggtgaccttttctatatacgaaaattcaattttctagtttgtttcctctccaatattcaagtttctatgtagtgggagacactcgagaccaacactttcctcttaactattgttaaacacatggtaaatttgtgcagagacgaagccgtgaagagttgcttcagatgttccctcgtttgacatgcttcaaagtacacagctgaaatttgctcatataaattagaggactctcaacaaatgtctatccttcagttataaatttgctcatataaattaaagtctcaaaattttatttccatgtattttgtatgagtttccaagcctaatagaaaatttattttttgagcaataataaataggcaaaaaaaatgagaagcaaataggataagtccaatcataatttacctatacagtgctactactacgcgtgtcacgtattggatgccttagtacacagtaacaaaatacgccaatgcacagcagataaatatttggccaccaaaaatatctttttttttgttgttaccggttatgtgttgtagtatttatatataccccccttgaaccggacatttcttcttcttcttggcgctcaatttcttcatctctggatcatctctctctcaacaaaatccaagtttcgaagcttttattcacatcacgattcacgaggtactgttcattactcgattttctccatcatcttcttctttcttctatggtaatttcgtttgcgcatgtctccgcacctttgtcatgctctatttcttctttttcttgtttcgattcgccatcgagaacttcttttgatgttttaagttgaatttagctttgcttgtttcaagatctgcgtcaatagattacagattcggtctcgaattgtgaattttgtttgatcttcatgaggattatgtttagtagaaactagatctgcggatcagaggtttagagtttcttcttgttggtaatttgattttttaaaatcttatgatccccagatccagtcatggcgggtgcagtagcaaggtttgcgaaatggtttggtgcaatagatgtttggactcgagtatcggtgataggtttaccagtcgcattcggcgtattacatcaactagaaaaggaaaatgttcgtcaaaagaagctttttcaggcccagattgatgacttagtggctaaaggagtcatcagattcattgaggagagtgagtgagtaatctgtagcagatttttaattggtgatcatgtccatgtttgtcaagtgttattttaagctttctttttctttctttcaatgcgtttccatgaaactaaatagctgtttttgtatatgatatgcttcaaagagttcttctaatcgcattctatgatgcttaagagtttctcaataagttcttattaataagccatgatacatctgcttcagctagtagatatgactcgtataatgattttggttattgtgttcatcaactttagatcacagaggattttacattatataccatattgagagagcaccagccatcattaaaccaaattgcttgttgtctcttcctttgatgcttgagcttgtggagaccgctgcaatatttttattcgttttcttttagttccgagaaaaacggaaaattaatgtttgcacgaatagaatcaaaaactgtaagaattgttattagtacctttatgtccaacagtctgagaagaagattcagtgaattgcttaaatatttgagaggctggtgaatctggaagcagatgtagaagatcttgttccaaacaaaatgaaacaatgagaacaatctagtttgtgaccatgcaatactttttcaagccaatattgtagaagatatgaaatctctcacctgggcattgagagatgtttgcagggacatgacaagcggaagggaggctcattgcacggttggcatcaactttgaaccccaaaccaggatcatccctgtctttgactagagtacatagacatttcctggtctgccctttgtctatttttaccttgagtgtgctgcaacatgttgagtctggtgctttagctttgttagtgacaaaaggaagacaagagtagagatcagacatcgcatcctgacatccctttatatcctgactcaattctgatctcacaccaaggaacattactgctactgttatgcatagagccaacatttgtggattttgattgtaagccatgaatctagccatcagttaatgcagcagagtaagaacttaatgtggctttttataagacttgtttcttgttcacatatgtttccctctctagttatagggatactcgagagttctaagtctgcaagaaacttgatttaaaaggattatataatgagtactggttaacatgtctaatttctgaattgaaatttgagttttggaatttggatcatcttcagttattggaggggtacatataaaatatatcaagttgttcacagttcgttttcacagtatctgcaagatatctacaagtgaagagactagaaaattgatggttaagctgtagggttaagagtgtaaggaggattgcaaccatagaagacacagattttaatatggaaaaggtgaagtcactattttcttgaagaatctaattgtttacattgttacaatcacaagccagtgaagacaaaactttctggcaaagaggaaataactatagaaagaaaagccaagcgaaccaagcagtaaataaaactgtgatacagagtagaacgcaagcgaaaaacccagcgggagaaaccccagggacatggccatgctatctacttcatgtagcttaaccatatccattggaaccagtctttggtatcgggttattacagctgcagtatctctataaaatattgtttcgtctggccctgggcatgcagcgaaattcagccaaaagtgcaatgtgatcagaagaccattctggagatggaagagctgtgtccttcctcaaggactcttcatccaacagttccaacaacgattccactgttagcgtgtccgctgaaacaaaacaaaaagcaaattgcttaccagatgaaaaagaaatctgagatgaaagcaaacactggcgcgtaaaacccctgaaagtaagcacttaagttaacctgtgtaaaatatgtaatcaagtgtgcctataaagtccctggtacagttggtaaacaacggttcacttgatgcaggatccagtcttctacgttgctgctcagtaataacgttgcctcccatttttgcaaattgtgagtaggcactaacctgcaatggtcacaaaggtatgatgtctacgcatatgttgccattctaattaaaattgaagtctgcctttcacgattctgtgcatctgttttccatttttgggaaagataattaccagtggcagctgatgagtaagcttgctgtgaggacgtaaaattccaagaggatcaaccatcaaatctgggtgcaatggatcgacctttcccacagcaagaagtgtatgaggagcactgaaaatattaagaaggaactccaagttaattcaggtagaaaccacaatcataatttaatatagagtttgacaattgctacttgggcataacaaataggaaaaccagccagacctcgcaggtactgtgttgaaatctccacacacaagcattggaatatctgcactggcagctattttctccagtcccttcaataatgtgtgaacctatttgggcaagaatcattatggatcaatagtgatgtaagaatccgaaatctgagagttcttttacaatgagaaataaagaccaacctgccacagctttacatctttcaattcatgaggaacgtttacatgcgtgttagcctgcacccatcaaatacatgaaaagagagaaaacatgatcacctcgagacctttaaaggagaagaggaagtggaaacacataacttcaactctagcatcatctctgacaataaagaacaatattgaaaagatggacaacttaccacacaaagtagctggcgcttcccaggattgtcagcagcctggctaccgaattttgcttccagtacaactattaaagcaacattatcctaaaaagaaagactctaaatcagttttacatgaaaaaatatcaccaagaatgtgcggaaaacagaaatcatactatagagcatctcagagtaccttgaccaaccgattcaaagcatttttcttctgggaaacagggataatagcctcagtcaaagactgtgcagccttgttgaactcaacctggatgagcagcccaatgatttagcaaatgggcctaattagataggtaacaggagaaaactaagacatacctcatatttttttacatgtgagaacctgtctcttctgaagaaagtagcgcacccatcaattgtgtttgtattaccgatgaaaacctaaaattatccagtgaatcaatattttctggttggtacatcttgcagataagtgaccacgaaaaggtaatggaagatcaaggggatgcgttgaagcaaacctcatttgttttcctcttaaaaagaccttggtatccgtgtttatccagctcaggaagaaaaaactcctcaaaatgatcattctgtacctgcaagatgaaaaacgaaaatattggagaggtatttatccattaactagcaattgaaacgtttccaagtcagtacaacttgtgccataaatatttaacatacctcttgtagacaaactatatctgcacggtacttgacaatttcccgtaacaaattctgtctacggtatgtccaagcgagagcccatgtggggcagtaactgtatatgtcgctgctagcatatgtatcagacaatatattgtaggacagcacagtgaatgttcccatagacaaaggccgcccattagaatccaggtgcccagtaacatcagttccactaatagagatcagcctacgcggagaaggtgatggagctgggataacacgggaagtcaatatggtacaagaaaggcccacattctgttttgtctctgcattgactactacacattcaaacttcaaaacatggcaaatatcatcagccattggtgtgtatgtcttagagcgtccaacctcaacaagtgtttctcctccggcgccggtcttttgagttatggctgaaggataaactgatgatgacccattcgttaaactaacactggtgctgagaacaccagatccagaccctgagctattcaaacggggcaactcttcttcatcatttccttctgtagcagcactggcagcacgctcatgcaacacacggtgatgttgccacgcatccgaaaagcacttagtagagcaatggtagcttttggcaacaggaactttagactttagacatcccagacactgcaatgttgccgtctcggatggatgcacactacaaatcgcaactttcttatcactctgtactcgaaacctgcaacagatgatgcatcttttaatacagaaccaaaagacaagactggagacttataaaccctactttacaattaaagaaatcatttttcacactcaaatttgcaaacgaacaaagacttgaactgactaagaaacacttaaacaaatcatacccgggaattcacagaaaagtctcaaactttcggtaaaaaaaagtcgtccataacaaactcgagcaaaagctagtaaaagggagcagatttaagagtaaaaggaagccacaggcatgacttaccatctgtactttaagaagtgaccttcaagcggggctgactcaggcacatcatcggtggagggggtcttatcaggccgccggagaagtacgtaaggtgtaagttcgcagccaacaataggaatctccgacggtagatgcactcgtataacgctaagcattgcttttaccgtaactaagttaaattctgaaagcaaaccaacactaacgaagcccaaaggctgagatttttaaatatatatattgagacgagagagcataagatataaaacggatcctaatggatccgtcatttacttgaccctaaaactcgacagcatggatgaaccctaattttcccagaaccctaattttcccagaaccctagatttacccccaattttctccaaacccgaattttacaacctaaaatttatgaaattgaaatccaatgagtgggatagatttgttcgctacgactaaattaatttccaaagatggacaaagaccaaagaaaaatacttgggttctatattcactgttttagcccattaaaatttaaaacctaataataataataaaagtttaatttaattataaaatctaatttgcctcaaaaacaaaattatatatcgatttgagtttatttgaaaaaatcatggtttagattttacaattaaacaaggttaaatattgatttgggtttagaaaatacgattagggtttagattttatgattaaacgagattaaatatcggttttggtttagaaagtacgattaaggtttagattttatgattaaacgggttaaatattggtttagatttattaacaggtttagatttaacaattaaacaaggttaaatgtcggtttgggtttagaaaatacgattagggtttagtttttttacgactaaatgagtttaaatggcggtttggatttacaaagaagaattagggtttagattttgtaattaaacgaaattatatatcggtttggattataattatagcttcaatttattatgtaatttaaataggatttgacatgacatatttttattagttaatgcaaaaggaggtgaacaaagaggttcatccccctaggaatgaacgcaagtctcgttcaagaccaaatatggactcgtatttttattttattttattttccaaagggaaacaaaaagtctttaatactcttttttctatatacacatatattcacctatttataataaaaaagattgaaacttacggaaaatataatacagtacaaactatatatgtcaactaaactaaataacacttaattaaatgatgtatatagattgcataaccaagtatataatattatatagttaacattataaatataaaatttcatgttaaataaccaattaactctaacgtcaaccggtgttaaccaacaaaaatattcaaaaataaatttttactttatttttaatattaaaaatctagttttactagttattctataatcaaaaaacaatttttacatctactataaaaatattttgcatatatatttaatacattgattcttaaaatatttagctttttttaatttcaaaactaaactaaaaatgaaaaaaatgattaaaatttttaaaacaaaaaaaaaactgaaattaaaaccagaaaaatcttattagaaacatatgagtgaaagaatcttttttttgtattatcaattaaaatatataaacttctttattcattagaaaataaatcattacagaaccaaatacacatgactatataagtttcataagaaagtaatatgaaaaacaattgagtatataactttttagtctaaattttgcacggtaatttttaaattcaaagtaaatgttttttacgaataatataagaaaaaactaactattgattaaaaatatttagcaattaaaaatttaacttcttaagaaactaactattattattattattatgaatagttcatatcttaaaaaaatatttattctcttagtttagttttgaaattgaaaaaataaagtaaatattatatgaattaatgcattatatatatatacaaaatatatttatattggatataaatatatttttttgtattttacaatatcaaataacattaatttttttaatactaataattagttttgaatattttgttggtcaatgctgatcaacgctggagttggtcgaccatttaacccgagattatatgtttatgatgttgacgacttgtataatcatacaatccatatatgttaagtagttgtatgttttttagtttacttgcatttgtggccaattgttgagttagctgacaatatttttttgaaatatatgtatgatgtcaaaaatattttattttttacaaattttcattgtaatattcaaattaggtagagacagataatataataatatagatatttagaaaattatgattttcaatggaaatgaaagtacagactcatatttatgacatttgtttaaaataagttggtatgtaaatacttttgctggcaattaatatctaaatttgtcagtaattacttttgtccagaccacaataaatattcgtctctatccaatccttgctcttcgtgtttatcacgcgctatgttaatttatgacgacacacagttcacttcgttatagcaacgccggcacgcttttcgttgttggaaaacggcaaacaatctgaaaattaataaaataaaaaaacgagaaaggcttttggaaattaataaagttcatcgaaatacaaatatctcttcatcttttctcttttgctcatttcccagaaacctttgtttcatttgcttcgtgtgcgatcgcgagaacaagggaaaattagggtttatatcctcaagctttttcgaacaccattgatcgttgatctaagatttttcttctagtcgagtttcttaaggtctggcttcatatctctctgtgcatggtgtcgttaaatctatgcagcgatgtcctgttcgatttcattttgcttctagggtttaatgatttgtgcatttgttcgttttagggaacgattcttctcagctttgtgttacttcatcgtgattttgttttgttactacgagtcgtttctatttcttagattattcgattagctgaggttttttgaagattcttctacagataactacttctctcgaatcgatttgcatttgttcttcatttttagtatttggatttgttgactctttctctcatttcttacatgcatagctgcaacttatttatggaaaacgaacttgttcgaactgatatttattacgatatccaggggctttgatcaaactcaaaattgaagaccaatactttgaaggattctggtaaagctaagcaactatgagttcaaattcatgggctgatgtttctgaatcagagagggcaccatctggtggtggttggggttattctcgtccgtctcgaaccaactatgttcctccacatcttaggagccgtacaccatcttcggagtttgttgctccttcacctggtaataatgatcgtgggggatatggtggtgcaaatagtggttatggtggtcgaggccaaggttatggtggtcgaggttcgggctatggtggtagaggaggtcctgtgggcggttggaatgccagaagtggaggttgggaccgtcgggatactgaaactaacccgtttggtaatgatggaaatgcagacccggctgttaacgagcaggaaaacactgtcattaactttgaggcctatgaagatattcccatcgagacaagtggggataatgtgccacctcctgttaatacatttgcagagatagacctcggagaagctctcaatctaaatatccagaggtgcaaatacgtgaagccgacccctgtgcagcgtaatgcaattcccatattggctgcaggaagggatttgatggcttgtgctcagacaggctctgggaagacagctgccttttgttttccgattattagtgggattatgaaggatcagcatatagagagaccacgtggagttcggggagtctatcctcttgctgtcattctctcaccaacaagggaattggcttgccaggtctgaataactggtataatatcatagtttatatgcatttgttgatcacatgaagatttcatgaaaagacatctcttttatgatttttctgcagatacatgatgaagccagaaagttctcctatcaaactggagtgaaagttgtggttgcttacggaggaacaccagtcaaccaacaggtttctgttactgttttataaatgcttcattttccacgccttatagactcttgtgtatgtgtgtgagagagagattacttgtgcttttccaggctgtaattatactttagttttttggtgcgccttgttaaattttgttctgacagttgctttagctcttagtttggatgatgaaatgtcctggctgttctttgctctgtaacataccattactcctctcctgtatatgtgggtttataataatgaacaattgtgtccttaagatgaaaagctgcaggaatcagctacatttcatgatagtaagtctagtgctcttgctaatttgttcttgttttgctgttgtacagattagggagcttgaaagaggagttgatattcttgttgcaactcctgggagattaaatgatttgcttgagagaggtagagtctcattacagatggtaagattcttggcacttgatgaggcggacagaatgctggacatgggttttgaaccacaaatcaggaagatcgttcagcagatggacatgcctcctcctggtgtccggcagacaatgttgttcagtgctacatttcctagggagatacaggtttgtggaactcgttcacatgccatttctatgttttctccttaccggagaagattctcagctatctctatcttcagtctttcttgctctgttagtgtcttcattgttatgggactacgttatttgggtcttttgggtctccagtacaattgttctgagaattattatcttttaaatcaacttggataaatctgaccgagcacttatccttaacttgtgtaaatgatctgatatttgcatggagtgaggaagaatatagcggttcttatgttagtgatatgaaagaacaagatagcgattcatttcaatgaaatttaatatacttgggagtaagagggaactaagggtagctgcttgttgtaggtccgtgattgttctataactgaagaaaagagtgagatttggtaggtctgggaaatgagaaggatgatcggtacataatcttgttttcctttattactggagggttcaattcgttgtctaaataatgtttattgtttaagttgacactaccaaaattttggctcttaaaattacaagatagaagttgcgtactgtgcagcaaaggaatcttttacattccatatgcacttaattatgattttgtttttgtgtgcagagacttgcatctgattttctttcaaattacatatttctggctgttggaagagtgggttcaagtacggatttaattgtccaaagagtagagtttgttcatgattctgacaaaagaagccatctaatggaccttcttcatgcccagagggagaatggtaaccaaggaaaggtaatttaaatcaatatgattggtttcatggttaaaagtgaacatagtcagtactattgctcctttcggtttcacgattctgtttcattgtctctttgttctatttgatgcattgttgttcaagagcacctttacaatccaatttattttattctacagcaagctttgactctagtttttgtggagacaaagaagggagctgactctttggagaattggttgtgcatcaatggtttcccagcaacgaccattcatggtgataggtcacaacaggttagtgagttgttgatatcaaaattaggatattgtagagtattcttcagtgcaaccaaagctaaaaccttattgtattttttatgcatacaaggaaagagaagtggcactgagatcattcaagactgggcggacacctattttggttgcaaccgatgtggcagcacgtggtcttgacattccgcacgtggctcatgtagtgaactttgatctaccaaacgacattgatgactatgtccaccgtatcggacgaacaggacgtgcaggaaattcaggactagcaactgctttcttcaatgacaacaacacaacaatggccaagccactggctgagctaatgcaagaagctaaccaggaggtccctgactggctgactcgatacgcatctcgtgcttcatttggaggtggtaagaaccggcggtctggtggacggtttggtggtcgtgacttcaggagagaatcttttagtcgaggcggtggtggtgctgactactatggtggaggtggtggatatggaggcgttcctggtggtggctatggagcaatgcctggtgggtacggacccgtaccaggtggtggatatggaaatgttccgggtggtggttatgcaccttatggtagaggtggtggtgcttactatggtcctggaggatatggaaccgttcctaaccaagggtatggtcctggagtggctagtgcgtgggactaagctttaacttcaattcttcaagaaccgattatgttctctttctctctcacttatctctattgtttattattagggagcagccacagatgtgtatgtttgctctttaaatggttatgtagtagacacgaatcgtctctttgttcaatgtgaaaaaagaaaaccccctagtagacccatattattctcatgagctatttagtcatacaaagcagttcaaacattaaaattgatccaaggaaaagaaaagtcaaagggttttcactatattgaggatcaaaatgagatataaaaggaggtttagacagagccacacaggggtcataataaagaatgaccaacttcatagagtggtttgccttactcagaatccctttgaatctttgtgtcatctctatcacagatttggtaaaggtttcgtctaaacagttgatgtcatagtctgatcaaagaagaagatcggaacaaaaaaaaaaaacctatctgtaagcaaatgatggtgggtggtgaaggcggttaaccgcgtcttgtcctaggcgtgcatcgaaattcagctaagagagcaatgtgattagaagaccattctggggaaggaagagctgtgtcttttcttaatccatcttcatccagtaattccaatagagattccaccattaatgtatccgctgaaacccaaacacaaaaaaatcttccaattaagttaacttgttatttctgatgtagttgaaaacaaggacaatggagttaaaaatggtgaaacctgtgtagaatatgtagtcatgagtgccgatgaagtcccttgtacaattggtaaacaaaggctcgtttgtattaagatctattctccttctgtgttgttccaatccaagacccattattccctttctcacaaacgatgagtacgcgctcacctgaaaccaattcatttatcaaatatccaagagagacgcaaagataagcggtataaatttacttaaatcgaaaaaagcaatgttaccagaggcaattgatgagtcaatttggtgtgaggacgcaggatattaaggggatcgactgccagatctgggtgcattggatcaacctttcccattacaagaagtgtatgaggtgcactgtcataaaaatgccaaaaagaaaaactttagctactcataagagaattctgcatttcatgtatcatgtcaaaagaatttatgaatcaacaaacctcccaggaagcgtattgaagtctccacacacaagcataggaatatcggcactagctgctattttctctagtccctttaataaggtatgaacctaaacgcaaaagaataaaagaaaacatgaggtgaatactaattctttcgagttcaatgaaatttgatttatttcggatatagagatacaccaacctgccagagcttcacatccttcagatcttgttgaacatttacatgtgtgtttgcctaaacaagttgccacaacaaaataagaaaattcattggctttcactaaaagagcatatacagaaactaacagttctcatgagaatggaaaaaaaaaaagaaccagtaccacacaaataagctggcgcttcccagaaggatcagtaggttgattaccaaatttggcttcaagaacaactatcaacgcaatgttatcctacaacataagaatcattggtttcagttttgtaaacaataactctctgataatcagctgtggcccagaaaaatattgtataccatgtcaaaaataccttaaccagtcggtttaaagcagttctcttctgagcctgagggattagagcgtcagtcaaagactgagcagccttgttgaattcaacctggatttacagtccatgaattagtatagagatcttactggatctagcaagtaaacatatagaactgaatacaaacatcatatttcttgacatgcgaaaacctatcccgccggaaaaatgttgcacagccgtcaatggcacttgtacttccgctgagaacctagcaacaagaaatttgtggttaatagattttaaaacataaatcactgaaggaaggagtgtgtggaatcattgaccaaacctcattagtcttcctcttgtaaagagcttgatacccatgcttatccaactcaggagcaaaaatttcatggaaatgatcactttgtacctgccagataacaaaaaaaagaacacattagaagtagatttttcagaattaaaatgctttaaatcattaccaagtccatacgaataacatacttcttgcaggcaaactacatcggctctatatccaacaatctcccttaacaaattctgtcttcggtatggccatgaaagagcccaaggaggacagtaactgtagaggtcgctacttgcagaagtatcagacaaaatgttatatgaaagaacagtgaatgatcctgcagactgaatccgagcatcttgatctaagtgacccatcccatcagctccgttaacagggattagcttacgggggcttggagaaggagcaggaataacccgtgaagtcaaaatggtactaggatgtccgacaatctgtttagtctcagcattagccacaacacactcgaacttcaaaacgtggctaatatcatcagctgttggagtgtacgttttgcaacccccaacctcaactaaagtctctcctccatttttctgagtaatattagaaggataaaacggagctggaccattgttggcaatactaagatttgacatagacccagataaggaaccagcgagagacccagaacccgcactgttattcctgttcaagtcatcatcctcgtttgcgttgttttccgcagctgctcgctcgtgcaaagtcctgtgatgctgccacgcatccgtgaagcattttggcgaacagtgatagctttttggaacaagggatctacgcttagaacagaaaacacactgtaaagtagcttgttccgttggatgcacactgcaaatcgttactttcttatcactctgtacacgatacctacaacaaataaatccaaaaaatgaatctacaacaagatcagaactttacacacaaaaaccatttgacgacctaaatcagaacatctacatgagaaatctctgaattcagatcaaaattcaatctttgataaaccccaattcgccaaatgatccaagaaagcaattagacaaagagccaatcagaaatctaaccatctgtatctcaagaagtagccttcaagaggagcagattcagggacgtcatcagtggtggagttcttatcgggacgacgaacaaggacgtaaggagtcaattcacagcccacaatgggaatttcagaaggaagatgcactcggatcacgctcagcattgcttttcaataacacctggtgattgtcgaagaacactatcgaagcagcagcagcagagattcagaatcgaagcaagaccttgatgatgattattagatgatgaatattgtcgttgataacctaatgaagtggagcgtacgataggctgatccaccatttacttgaaccgaaaacccgaccaatctctagaaaccctagaaaatgtcttcttcagacaaggttgaagatccggcagaaccaaattagaatcgaagaaaagaaaaaaagaaaggaaaatgatggtatcgagaaagcttataagagatgtgagatcttgaaggaattttgtattaaggatcgattctttcgctgtgaatatggaaaaaatcaatgaaatcgattttggtttttttatgtgttttttttccccgagtgggtttaatactaaaactattattttgtgctttgaagacattattatgaaattttataatattttaattgatcttccttttcgatgaaaattttggttttggcgctcaaagattgaaagtttttcgttttatttttgtttatataaagataaaattttaaaatctagaaaatgcgtaaaaacaaataatccacaactaaacatgacttaccaaagacaaatcaagatttatgactcgtaccattacgaaaacaagattggtgacttaaaagaagtgtatttatatctatgatagattgaagaaagaaggaatggtgaagatgagtcaataggtgagtgttcaacgcacattcagtaggagccaggaggtgtagtttcttcgttaagattaagagacaagaaatatcaattcgtgatataattatcttgaagacgatttgttgcagattaaggtagaattaacttcttcttcttttttgttttttttttaaaatgtgagaattacccaagaagagcagcatagtttatcaattcaattgatcttcttaagaattgttgaatttgtcaaattaatgaaagaatcacattttaacattgtcaaaattgtcatgttcattttcgcttttgttttcgttttagctagttcatttggttttcataaatataagcggttcaaacctgaaataattaaggttcgaattatgaaaattttgttggtttttaataaatttaggtagactaaatttcattcttttcaggtttactcaattttaaagtatagaaatttaagatttatatctaacttttgttgtatttgatatgaaaagttatcggtttgtattttaccgaatttagataactatttacaaattattattttgaactaattatagaaaacaaatacaatgcgtgtccagtaaatcaaagttgagagatttctttctcgtttttaagcattcaacacaattttttctatttgttatttcggaggcctgagtccacattttatatgaagcataacatggaaaataataataattattatttttcgaaagcgatcttttccaaacaaagaagcctcaaacactatatacgctacaaaataacatctcgaccttgtaacaaagaatgcattagatatttttttttttaatcaaaattgttgagatgagcaaaagcacagaacgtattcaacttttcaaaagggttgtggcagctgaatattatttgttctatgatggtaactaacaatttgtttattttttgttctttatagtgaaatcttttgatttgatttttctttttgttgttgttagttttgttggaagccgtcaaagacatacaaaaattgaaagttgatctaacgatagaagagaagaaatgcttagaaatggtaaatgagaatctatttaacgagacagtaaagatactaaaaccgctcgaagatatgggtatgaggtctgaagaaacaatcattatagatgataatcaaaagatgattaaagagtatttggaggacaccttcatagtttgtcataaaatatgtaaggagattcaaaagttgggtatttgccctttgtgagttaagtactcttatcgtcctttttctctagagatttggagggtttttcaatatgaattagatatgtaaaccaatattattcaaacatgaggtataatctaaaaaatgtgaaaggaaagatggaagggatgaggagagcaaccttttttattaatgataaaatttcattggaaatgataaacaaattaaattatggaataaaaataaaattattcaaaaaaaaaaagttgagttgattttggttcatttagaaaaccataatattaattcgattttcttttgttaaatatgggccaatttgaaagatcttatttgtaaaataatatgggccagattggtcaattggacagataaaaccgtgatactgtggttgaaccagccggtgcggtctagatcaattatttagttccctggttctgaacttcaaactttgttcttgatgtttataaaaatccgaacttttaaaatttcagacctttattagaactttcttcatgatgcacgaaacttagttcttaattataactgagatcgatctgggaagtactctgttttcagtatccttctgcatgagcctcagctgtggagatctcgccaatcacaacgatcgtgtagttagcttactcaatgtctgcagaaaagctccttcctttgcaaggaccaaagctcttcacgctctctccatcactttatgctctgttcttttgcagccagtttatgtctgcaataacattatcagtctttatgagaagcttggcgaggtatcacttgcaggcaaagtgtttgatcaaatgcctgagagaaataaagtgtctttcaacacgatcattaaagggtacagcaaatacggggatgttgataaagcttggggtgtgttctctgagatgaggtattttggatatttgccgaaccagtcaacagtgagtggtttattgtcctgtgcatcgttggatgttcgtgctggaactcagttgcacggtttgagcttgaagtatggcttgtttatggctgatgcatttgttggtacttgtttgttgtgtttgtatgggaggcttgacttgctggaaatggcggaacaggtttttgaagatatgccgtttaagagcttggaaacatggaaccatatgatgtctttgttggggcatcgtggttttctcaaagaatgcatgtttttcttccgtgagcttgttaggatgggcgcttctttaactgaaagctctttcctgggtgtattgaagggtgtatcttgtgtaaaggacttggatattagcaaacagttgcattgctcagcaacgaaaaaagggttagattgtgaaatatccgtcgttaactctctcatcagcgcatatggaaaatgtggcaatacgcatatggcagagagaatgtttcaggatgcaggttcctgggatatagtgtcatggaacgccataatttgtgcaacagccaaaagtgagaacccgttaaaagcactcaaactctttgtgagtatgccagagcatgggttttccccgaaccaaggtacatacgttagtgttcttggtgtctcttctcttgtgcagttactgagttgcggacgccaaattcatggcatgctaattaagaatggctgcgaaactggcatagttttggggaatgcgttgattgacttttatgctaaatgtggtaatctggaagattcccgcctatgcttcgattatatacgtgataagaacattgtttgttggaatgcgctgctttcgggttatgccaataaggatggtccgatttgtctctctttgtttctgcaaatgcttcaaatgggtttcaggccaactgaatatactttttcgacggccctcaaatcttgttgtgtcacagagttacagcagctgcactctgttattgtgagaatgggatatgaagataatgactatgtcttaagctctcttatgagatcctacgccaaaaatcaactgatgaatgatgctcttcttctgctggattgggctagcgggccaacttcggtcgtcccattgaacattgttgccggaatctatagcagaagaggccagtaccatgaatctgtgaagctgatttcgacactagaacaacccgacactgtatcttggaacattgcaattgcggcctgctctcgttctgattaccatgaagaggttatcgaacttttcaaacacatgcttcaatcaaacatccgccctgataagtacacattcgttagtatcttaagtttgtgttctaagctctgtgaccttactcttgggagttctattcatggtttgatcaccaaaacagatttcagctgcgctgacacatttgtatgtaacgtactaattgacatgtatgggaaatgcggaagcattaggagtgtaatgaaagtctttgaagaaacaagagagaaaaacctcattacatggacggcattgatttcgtgtcttggcatccatggatatggacaggaggcacttgaaaagtttaaggaaacactgtctttgggttttaagccagatcgtgtctcgttcatctctattctaactgcttgcagacatggtggtatggtaaaagaaggaatgggtttgtttcagaaaatgaaggattacggtgttgaaccagaaatggatcattatcgttgcgccgttgatcttttggcaagaaatggttacctgaaggaagctgagcatctgattcgggaaatgcctttccctgcagatgcgcctgtatggcgtacatttcttgatggttgcaatagatttgcagaagaacagagaaacactctcaatgtcgtctcttttcagtagttgaagaaagtagaattggaagagatgtgcgaattttttgatatttatctgatgtttctcttgcaaagctcatatctgtatatggagaaaatgaaacctttagagttttgtctatctaatcacaagttcagagaaataggcttgtattttggaattgtacagaagataagctctcagtagcaaacaatccaaactttgatcagtcacattacttataaaacgatctttgtgtatggtaaaaaagattataagtttaaatcaacccgcagcttggaaatctccaaagtcatcatctggtgcatcttcaacccctccatctttggcttttaggtcttctttcttctcttcttcttcttcttctcgctttgtatctaaatcttgttgttcagacgatctttggaggctgaggcttggcggcagacttgacggggacttctgagcagttgtgacaggggaaagcggtcccggaggtggaggtggcaggatgattgaaggaatggtggtttctattgacttgcctttatcctccaacgagagattgcccagactcttctctaccgtttttgacttgctgtctttatcgcttctctgtttcaatcattttgatgtgaaaaacaaaaagaaaccttgtgggaaatgtatccagacaataactgtaaatcttacatttttgagttggagaacaatggtttctccttcctttaagctgtaatcaacggatgaagtgttctgatagtgttgttccatttcttctgctgttttcttcttgttcaaatacctttagcaaagagagagaaagagagggtggtcagattcaaacatgatttagtttttcgaaagaacacttagaaatctggaagtggaatgttacttcatatggtcatgtagtgctgcttggaaatcatatgcttctgttctttcccggaatccgagtccgataaaagcatgtcgaacacgaccatctgcattgcatcaaagaactaaactcaaataacaactacaagttaacatctctatatctatatggaaagtacgtacctatcttttcttcaacacggagaacaaaatatcttcaagacaaaacagattattttttgttagactagctgcacatcatgagaagagcaagttaagttatgtggtcaactttttgttacctgctactgtcgattactgcttctacaggatgaagttccccctctcttagaaatgcctgagcgtaaagttcccctgtggttttatctactagttttataatgcattcttctcctttgctcaccactttcaaagctccttcccatgcccatttgttcacgtcccactcatctgctctgcaaggataaaatttatacaaaaaaagtatcagctgatgtctatctccatcttccaatggattacttgatgcactttttcaagtatcttttaccaaagaagccaagttgagttgatacaaagcgaatgtaactagataatgaccatcttgatgcaaattaaggttaagctaccattcatagtcatacatacttcacgattggttcaataagattcgttccgagtttctgatcatttgctaagccgaagggtttatcgggaaaaggggttttgtaaaaatctcctaactacatatatcagaatgactgtttctatcataaaggtaagaaagaacctgtacgaagctgcggttttccttggaggtatctgcatacacaaacaaaaagacaatgaagaggttactttgcctagcatccccgtaaagtaacagacacagaagaaagcataaacgataaaataacattgatacatcaagctccaatgttgtccattacgaatgagaattttatagttaaacctaaataacaacagttcacaatgtctatgatttcatcaaggtagccaatttggaatctcatacatcctataacacaatgaccatgtaacaatttcacgagtatctcaaaagctagtatgatttcagagagaccccatcaagatatcacttagcatgatattggttaaaattaatgtactcttttatcacaagccttgaatctatcatacgaaatctccttgaaaagatttttcgctgatagttacatgtgcaatcgatcaccattgcaaatccaaacaaaatttcgagtgatcaagactcaacgtcaagttttcaacatatgcaaattaagacaacttcctcaataccattgcaagaaatctataacaccagattgaatttacgttataactaattatcagatccaaaacatctcctaaaatcaccaagtgaacttgcaaagaaaggatgtaacttgagcataaaagacacaaaactcatcaaaaattataaaatcacatctcatgataagccaagaaaagttaccaaataaacatagcattcaggcacttggaacagagcaatctctatagcttctctctcctcgttatcatcgacattcacaggatcagtggaagacttcttgtcttcctccatagtcgaagaagacgaagcttgatccatctcagaaacaaagaatttaacttggagaaaaacccagatgagactaatcgatcaaacaaacccgtaaatcttaaatgttaagtctttcccgaactgtgattacaacaatctcacgagtcgcgaagacgaagaaacgtagaggtttcgcgttaggtgtgtgtagtgtataccattacttcaatctgagctacttcaaaaccatcagatctaagctacctctgttaaatctgaaccgtctattacgttgactttgaaaccctgatatagactagacacctatgtatcctccaccgctgggaagtcaacattgaagcagttgatggaccaacaccaaccaatagaaagaacgtccacatttactttaatgggccttttaaactaataggcctaggcccattataaatacatggatttgttttattttatttttctcatatctgtctcttggtggtgatgagtaggtaaactgtgtgcgcttattaacttctctcacactgactctgcgaccctaatttgtgagctctcttctctttgcgcagtcaatttgctacaacttagaaaatggcggcggctacttcatccatcgctccttctctttcatgcccatctccttcttcttcatccaaaaccctttggtcttccaaagccagaaccttggctctacccaatatcggtttcctctcgtcttcttccaagtctctgaggtcgcttactgccaccgtcgctggaaatggcgccactggatcctcccttgccgctcgcatggtttcttcgtctgcggtcaaagcccctgtttctctcgattttgagacatctgtcttcaaaaaggagaaagtttctcttgctggttacgaagaggtttatctcatttaccctcttattcatttctgttctaatttgtgcttattctataatcattttgatgtgtattgattttgttagttgttgctaatgtttggtttctgctgatctttgttttagtacattgtgagaggaggaagagacttgttcaagcatctcccagatgctttcaaggggattaagcagattggtgtgattggctggggatctcaggtacttaccttttttggtctctttatctgtagctactgtgcttcttgtttgattgctttttaaattgcttacgttggattgcgaataaggaatcttggttctgtgttgtgatacgaaattggtcagaaaaaggatatgaataaagtgttttcattttcatacttttgatgcatttgagttggtggaatgaacaagattaatatattgtttcatattctttttattcagcatctcttctcttgtaataaacgctttatctatatatgcagggacctgcccaggctcagaatttaagggattcacttgtggaggcaaagtctgacattgttgtcaaggtatttcaactgcagagttggcttcatacttgtatttgtttgctttctgttgttacgtgaaggctctgttctgactttgttttcgttttaatatactattacgtagattggtctcagaaaagggtctcgctcatttgaggaggcacgtgctgctggcttcactgaagaaagtggtactttgggtgatatatgggaaactatcgctggcagtgatcttgtattgcttttgatctctgatgctgctcaagtaagtgcacttttgttatatatttccactactacttgttgaggtattagtcctaaggtgtatacatcgattttattctatcctgtttttgcaggctgataactatgagaaaatattctctcacatgaagccaaacagcattcttggtttatcacacgggtttctactagggcatttacagtcctcgggactcgatttcccaaagaacatcagtgtggtcgctgtatgccctaagggaatgggtccttctgtgaggaggctttacgtccaaggaaaagaaattaacggtgctggaatcaacgccagttttgcagtccaccaggttttctatctctttatctctactgcaaaagctatctttactgaaaagctcttatacctcatgtgttcattttttcaccactatttctgctattctgttggcaggatgttgacggtagagccgccgatgttgcattgggatggtcagtagcacttggttctccgtttacttttgctactactcttgaacaggagtacaggagtgacatctttggagaaagaggtgagtttgatccccttttagacctgtctttatatcactcaatcccatacttacatatcttcttcttttttgttaaaaggaattttgcttggtgctgttcacggaatcgtggagtctctgtttagaagatacaccgaaaatgggatgagtgaagacttggcttacaagaacacagtagaatgcatcacaggaacaatttcaaggactatctctacccaggttagtaggaagatatctgtagagaacagactaattcgtttttagccaaatataaaaatttaaaacctgtttctaatgaattgtgaacatcagggaatgttggctgtgtacaactccttgtctgaagaaggtaaaaaagattttgagactgcatacagcgcatccttctatccttgtatggagattctctatgaatgttacgaggatgtacaaagtggcagcgaaatccgaagtgttgtcttagccggtcgtcgcttctatgtaatgactcttccgaatcttccttttgttacaattacccaaacacagtttgtgcaggagttttgatggattctcttacttataacaggaaaaggaaggcttgccagcattccctatgggaaatattgaccagacaagaatgtggaaggtgggtgaacgcgtcaggaagtccagacctgctggtgacttgggtccattgtatcccttcaccgctggagtttatgtagcacttatgatggctcaggtatgtctatgtttatatctggtgtgcccacctttgctttggatttttcggtttatgcaatgtagagtcggtttcaatttccgttcagattttagaaaatatacctctaattggaatatttttgtcattgcaataggtttgtatagtctaattggattcttcttacttccattttgtttcagagaaattgtgatatcgatctgttttgtattcaattttgaattcttttttgtatggttttagttcgaattagccgcattggacaacccctagaatttaatatgctatcaattttcagtgatttcttagaatctaaatcatcgtggtttctatgtggatttgtgtagattgagatcttgaggaagaaaggtcactcttactcagaaatcatcaacgagagtgtgattgaatccgtggactctctaaacccatttatgcacgccaggggagtgtccttcatggttgacaactgctcaaccacagcaagattgggttcgaggaaatgggcgccacggtttgactacatcctgacccaacaagctcttgtggctgtggacagtggtgcagcaatcaacagagacctaatcagtaacttcttctctgatccagtccatggtgccattgaggtctgcgcacagctcaggcctaccgttgatatctctgtgcctgctgatgcagactttgttcgacctgagttgcgtcaatctagcaactgagtgaagggttgaaagtttgtcagtctcttatttgtaatcggagtattaagtcgagagtttgtgatgttttcttaggcgtgactgtttgttttgtttgaaggattatgtctctttgctttggtcttaaaatctacttaaatcaataaaatagtttaacgaaatttcgctttaactattttcgtaacaacatttgcaaactttcaacttaattttgtctagaattgtgtattgtcaatttcagtaactgaactgggattagagacgcttgagagttaaagaaggaaccagtatcgagagtttaggatttgatgaagtttatatgtctgcgttaatcttgcaacatttaggatacttttaggatataatagtgtgtaatgctacttttgttgggtcaaaaatagtatgttgctatgttgaatgattgaatatagaataaagagataagttttttacaaatgccagatagattgaatatatgtagtcactctccaacttcaattatattattattacaaggaaaaatcatttgtgtgtgtgtgtgtgtgtgtgttttctttcttttcaaaactaaagataaagaagaaaaaattggcagagcataatgcttttgtctctctttttactgagaaatgaagaatctaaattattagaatcacatgtaatgacatgtgctctccctctccctctgcacattttgcattatatgtcaagtctttttccctttccttgtaaaatcaaaaaaagaagaaaaaaagagagagagataaatccacaatgcttgagaaaaggaaaagaaacagagaaccaagagaatctgaattaattaataaataaaaattctgcaatcatatgatagtgtggctcaagaattagagaaagacaagaccaacatgtgtagccaatcatactgtattgctcttttcccacatttcatgttcatttatcctaaaaactaaaaagaaaagaaaacactaaaatctctcttttaacttcaagaattcttactgtccaattgataaggattcatgtttttggtttaaccaaaattacagctcgagtacaaactgctaagactatactatattcgaattaggtttattgcttgatttccacctagaccttacgaacatatgtacagtaatggtttgtattagtatgttgttgtgtcaccatccaaatttaaaacatagacaattttatttgtaccaagttgattgaatattttttttgttctaccaatttattaacccaaaataatttatcatctagtgtatttaaaaacatcaaaaattagttatttctggaagggaaaagactttaatgagtaataattagtggaatcccatgacgggactataccctttcaatttatttactttaattttgttataagacaaaatctcggtgtttggtttttgttaaaagacaaaatcttggtgtttagtgtgaaatcatatatgatcttgatttgacaccaatgctttgtaattatttctgttaataccaattcaaccatgatttcgatttagccatagagtaagagtatgactcatcattatcatcatcatcatatataaataaacctatatattttaattttttcatccagaaaattatttagaagaaaacaaacgtgagatgtactcaagtggtctttccgattttgtttaataatctcaaaattcatttattatttacttaactatctgccactgtttagcctgtacattattatctctctctatatatatatatatatatcaaataagtttgcactaagtcttctaaaaaccaatatatagactggcatgtgagatgttaaataaacatcacataaatcgtgcatactatatattcgaaaagctcttcaactttttcctcggtcatgattataagaaaccaaaaaaataaccatttttaaagaaactccttatttaatctgttaattgatcatgatggcgatgaacgatgatgcagataaagaagataattcacagcttgtgagcatatgctcatcacatgctcgagcatatagcctcaggtggcaaccaattaggatcattgcaataatgttgttagtttgattaattgttttggttacttatataactgtataatttgggggttataatataaacccaacaatatcaatagtactacttgttattgattagttttaacatgcatcgaataatgatttgaacattcacataaattatcaaaactagttcggatttaagaaaattagaagttgaaatccgcaacctctcgattgtaaatatagaattatataaatagaaaaacgtatgttcataaatatgtgtatatgcaacatgacagtgccacacaaatagtataaaatcgaccgttgttttgagttatagaaaaacttatcgatcattgtctcccgtcaaccatgacgcgatactactaaaacaatacaatttaattggtacataaattaataaatcatttgaattcaagcaacatctttggaacaaatctaatatatatgtattttgttttcgcatacttgtattgtacatcaaaaagtaaatcttgttagaatcagataatatagttaacactgtctagcagtctcgattaaacgtgcaacatttttatttctattaaaaaaaaaagcgagttggacggtaatgcgatctacatatattcttgcttagtgtatttgcactgacatcatttggttatgaaactaaaataagaaaaatgaatatgatggaacattggatacccttaatgaccataaggaggatcgagcttagctaagcgtagtttgtcgttaatttaaattattgatcaaataattagaaaaccagatattgacaaaacaaaaaataagaagaacaaatattgaaaaccagataatagccacccatacgtggtttatttgtcgttgtatatttagtattagggatcattgtgtttatttactctattcaattacaaatacctttagaccaaaacagaatatacaatgtgatatgcttagataaataattgctagaactatatgtttatttttaggtgcctagatcgttgtagtgtgtgaaactctgaatgattcttcaaacaagtagttttttcagtaataaaaaatgtctccaactccacatttgaataagttattagaacgaatagtttctcctttaatataatgtatatgacccagttattgggtttgcaactttgcatgtatatgttctatatatgtgtgaatatttttaacaaaaactaaaattaaattgacagatactgcagagtttacgactaataagttaacatcgtcatttggtgaaatcttcaagtgaccaaggcaaaagcatcactggaaaaaaaatcgatttcctacgcgattacgggaaacttttccgcaacagtgcaaccatttctcattcatccacagtgatcgtgaaatatagcacacgtcaccttcgaatcttacaaatgtgggtccatgttcatccagcacagcaccaacaataattaaggccttgagaaagaaattacgagcatcacacttccattaattttcttaacaaattattaaacttaattatagataaagtgtgttccccaaacggagggaaaaggagattttctcttctttttttttcccttctgtttttgtctttccttaattatttctcctttgttttgtttctttgaacccaaatcttgttattttgtttactgagtatgatgaacttaacaattaatttagtgacggtctaagaagatgtcaagtgccgtaattaccagctaattaagtactcaattccatatttgaaatgttatgttactcaccatttcctctttgtcgtttttatgattgggtcaaatgttgcggccaacaccagtacaagtatcacagatttaaatttagcttatgggatctttcaactagtgcctcacttctacttgggtgtgacttttttcgatgtattttttggagtgaataattcgatatttgagtttaaaatgttcattattgttagagtgtgaaacagtgaaaggtgtctctcggtcaatgatttttttttttttagtcggggaccaaatttttattttctatttcttatgaataatgtacttgatatttctatttattatacttgctattttgggtcaaggtttgaaaaaagccggttcgattgatccaaaatttggagacaatcatgtcacggaccgtccggtatggagaaattgcccatatcgtcggttcggcgggattgggggaccgctttcataatattccgtccggttccgttaaaatgtttattcggcgtgcttagctggcaactgtagcgaaacagctggcatggtcactctcgcacgtggccagcgtcgtcctatatttactattttacccctatatagcgctttcctaatatttctgttttcttcgttctacatccatttattttagtaagctacggaaccatagagtatatatagaaatggtaaatatatcagaacactgattaaattttgataaatgaatatttgtgttattaatccaagaaagaagataaaaattagcaggctttttcgagtgaaatgccagctatgcatcagtaaatgagccttcacttctcttttgctttattttccctatttttctgcttttcttttctgttcttttgccctactctacatataaaaatatgttgtattttcccattttcatgtgcaaacgaatataatttttaacttagatcaatgtaagtgtatatatatataataatttctatgagcacataaattgatagtcgtatgtagtgggaaaaaaaacacacgcaaacttcaaaatccaaatttattttatggcctaaaagttgactttacccttttgaggtctctgactctaatacgaggggtcaaaatccgaggtggcattttcgtttcaagctgcatatactcattacacattacaacagtattaatttaaaattttgtaataaatacatatgacgatccatttattttctatgcgttacataatttgattcgttttccatcatttgctttcacaaaaagaaaagaaaaaaaagagtgattcttaatggaagttgtccttatgtagtatttacaccgaacatattatatggttgcatagtaattgtttgaacctagatacaacaacaagaagaagacacttctgagttttttttttcctttttctttcctgactgtgcttcataaacatgtaagatctcgtatttaccgcaaaaaaaaaattcaagataacattttattttgacttttatgaattccggatttttttgtggtcggcaaatacaagtttcaatctagattctgttcaaacataaacaaactctaaagtcaaccattacatacagacacagacacagtcagtctctatagtacatgatatctaaaatgattatattttttttaataaaaattttgcataaaattaccgaatttttagcagacaagcagccgtgaaacacacggaagtcggggaagataagagaagctcgtgatgaacactaagaaagatcaatgtcttaatctgacaattagtcgttttacttaaactaataatatttttttaacggtaatctaaaattatttttgatttcaacatcttcattctcattcttctgcttcctttttatatatatcacaacaatctctcttctctctcttcaccaattcttcttcttgattctctgtgtttattgattctgaggctttggtttcgagaagatgtcacattatagaagacattcgctagaaccttccattaccagtaaattccgtgattctttgagtttccaacgagacgatgacgtcatcaacaaaccagatttccgagaactcgattttggttctccgttgaggcctcgtggctcctcctccgccgctgccactcccgccgctagtggcagcagttcaagctcctctggttctgcttccggaaaacccgctgtcacttctcagtttgctagacggagtcactccggcgagctttccggtttaagccagaccagtccggttaaacccggatccgtgaaccggaatttgaaaccgggtcacagaagatccgcttccgctggaacgccgttgatttattccggtttggggttctctccggtgaacaataacaataacagttctcgcggcggaggaagcggggctacttcgccgaaccccggcgttttacctaccggaaacatttgtccatcgggaaggatcttaaaaaccggaatggctacacgagcctccgttagacccgagactctatgcacaggcacggccaactacggccacggaaacatcatccgcaccggcggaaaggtgagtcacgcgacgaaagcggcggcggaaatgagtgactcagaggaggtgaagaaggcaggtaacgtaatgtataggaaagggaattacgccgaggcattggctctttacgacagagctatctcattgtcaccggaaaatccagcttatagaagcaatcgtgcggcagcgttggctgcgtcagggaggttagaagaagcagttaaagaatgccttgaagctgtgagatgtgatccttcttacgctagagctcatcagagactcgcttctctttatctaaggtaaaaaaaattctatcctttaaaaagttttgattgaaaaaggattagtatttgattggtttggttttagattgggagaagctgagaatgcgagacgtcatctttgtgtttccggacaatgtcccgatcaagctgatttgcagaggttgcagacgcttgagaagcatctcagactgtgtacggaggctcgaaagatcggtgattggagaacggtgattagcgaaatcgatgcagccattgcaaatggagctgattcttctcctcaggttagagatcaaaaagtggcattgattgcctcttttgtggttgaattatcagcgaaaagactttatcttttaaacaatgaggtttgatcttgtgcagcttgtagcttgtaaagctgaagcctttttgcggcttcatcagataaaggattcagatttgtgtatatccagcattccgagattggatcatcaccatactcaaccacctgagaaactatttggtatagtatgtgatgcttatgtgctctgtgttcaagctcaagttgatatggcgttaggaaggtgagcttcgaaatgcttaaacttcgaatggtgtttttgattctttattagtagtcttgtttggttcttgggtgagtgagtagagatgttaggtttgttgcagatttgagaatgcgattgtaaaggtggagagagccatgacgattgatcatagcaatagtcccgaggtagtatcggtcttaaacaatgtgaagaatgtggcgaaagctcgtacccgaggaaacgagctttttagttcggggagatactcggaagcgagtgtggcttatggggacggactcaagttggatgctttcaattcggttttgtattgtaatagagcggcatgttggtttaaactcggtatgtgggagaaatctgttgatgattgtaatcaagcgctaagaattcagcctagttacaccaaagctcttctccgaagagctgcttcgtatggaaaggttagattgaagacactgaatggttttgaaccgagtttctaattaagtatttggattaacaaatgttaaatgcagcttggccgatgggaggatgcggtcagagattatgaagtattgagaaaggaacttccaggagacagtgaggttgctgagtctttacagagagcaaggaacgctctatcgaacaaatccgaagaacctaaatatttgggattcaataacgaagttgaagaagtttcgaccttagataagttcaagaccgcaacatcactgcccggtataaactagctaactcactttgcaagtgttagtttcaagattcctctctttgctaaacaaaaaaaaatggaaatatttttcaggaatctctgtgtttcatttcaaatcatcatcaaaccggcaaagcgaagcaatatctccattcgtcaacactttatgcttacggtatccattagtacattttttcaaggcaagtcacttgttcttatgctcaatcgcgcaaaatggttatcgtttttggtctaacgctttaacggggtttgtttgtctataggtggacgtagaggagagcttggcattggcgaaagcagagagcatcaagaaaattccaacgtttaagatttataagaagggagagaaagtgaaggaaatggtatgtcctagtcatcagttactagaggactctgttacgcatttcctcttataacatatctctcttctcattctttcaaatctttagtcttcacgaacgtaaattgattcaaagagccattttgttaattgaaattttcattcttttgttttgctttactgtattatcatattgaaacctgctccgattgtattaatccgaggaaaatgcatgtttctcaattatcgttcatgcaaaaaggccccaatttaatggttcatttggttttcttatttttgtttgttttagaaactcttacttattacaaatgggtcctggtgggctgggttacttgtaataacactgctttcaataaaatatccattgacaaataaactatagtttcatagaaggaatttgaggcgccaatacagaacacaaactatgacaaagtctcaatgagagcaaaaatgatttgcctcacattttgggcaaaggttatgaatctcaagttcttaacatttcatattaaagtctcttaaacttaacatgttatggagttgagaacttgagatttgtaatagataaataatgaattactaggatatagcggtatatccctgaagattttttttttattttccacctcattaaatcataaattagaacacaaactaagaaataccaaacaatactaaccaatataattttgctgaaaactgtttcttgtactgtttcattgtgtagatataccaatataacgtcaccaatttttttttcaatcctgggttggaatcggaatcttctaaaagggttaaaatttacaaaacaaagagaaactcatgtttctttgttaccatatcttctattggttggtggaagaacgctgactttctctcatcttcatcaaaatggctacaatcacaaactcatgatgctgcaaacaaaaccaacgacttagcccaacaagtctacacattttgtacataggcaaagttttgatcgactagggagttttaaatataaataaaggagtcgtacctctagaagtaactagggaaatccatcatcccataatcaagagctgcataaacagaaaaagttcacttattattcatacatagacctgctgctgataatttgttctagtggtcaaacatgtaatgcaaagaggaattcatcaaattagcaggtgactaacaagtaaagaaatatggaccaagcgaaaacgaaagaaacaaatgtctgtcgtgtaatgccatagccaagttgcaggaaagatttgatgcatccaaaaaaaaatcaaattttgtctcctgagactatatgtcagaaactaatggttgatgcatccgaaaaatccttccacatatcatgcattctcttttcaaacatccatacccattatttcctaactttcgaagcagttagcatgtaaactcacaatcttctcaatcaactaaccaacaaaaaggctactctacactcaaaacttactgggcatcacactcaaaacacttcacaaagcactcatgcttaacaacaaacagaagcagattcaagtttctagctcatgaactgcttcccaactaatgctcacatcagtcattgtagaaaaactttccacactcagactataattacaagaaacacaagtaacaaagcaacaacatctaggagaaaaatgtaaccaggacctcctccttaccatgaataccaatacttgctactaattagtttatttttgttcagattcatcatctctgtgcgatatcaatttgttcttgtactttgattgggtttattatagccgtcgttggcacagagactatcacaagtaaaaaggtaaaatttgtttctactcttatgctatagtcactgttacacagctaaacaatggagaaagacatagaattctgaacagattacgaaatacggcgagagaaaggattcaggtctcaccggcggaggcggaggaagtcggtcctttggagccagaggtacgccggagcttatgaagacgtacctgcatctccgtgaacagttgcatcctatggcattccaattccttagcgaatctcattctctgcttctccaattcaaccatttccttcctcttcttctcctcgactctctcgtatatctgtccaagcctctcaattgcgtcggcaacttccttgtagccttgcttcttctcaattttcctctcccgcttcttgttactcccgctacgaccgctcgatctagaccttgaaccttccgagtcatcttcagacgccggacacgccgccgccgctgcggctgccgcgaatgcgttgagattcccgcgaaatccgagtaaatcgtcaccggcgtgaggtataatcgccggcgatgtcgccggacgtctggggatcgccgatcgtggagcgaccggaactggattaatggacatcggaagtgatagcctctggtgcgggatgttatcagttgaatcaggattactagacgtcggaaagctttcccggagaaggtcatcgagagcggagaagaaaggccaagggctgatgtaggcaccgggattggattccgaaaccctagccttctcgactttgtacttcttcttcagagtatcgatccggtttttacactgaacgtcggtgcgatacggctgcgatttggcggcggaaacgtttcgaccggtgttgtagtgacggtcgttaacggcgttagccacctcttgccagtgtttctgacggagattacctcggctgaggtcgacgtagcgattaccccaggcttggatgagcgtgaaggtcgcttcctcgctccagcaatcttcacgagaaagcgtcgccggcgaaggtcgggaagatcccggcgaaaaggaatcgttgacggtgtccattataaggtgaacgacggcgagttagatcgaagaagatgaacggtgaggatgagataaacggaggtgaacggtgacagtgacggtaacggaattgaagagaaacgaagttctttttttttaaaaagacaaaccagcgtttttgctttgtgtgcatgtactaaaccgtgagccagactaaacgagccagctctagctaatttatatacatcgttaatttggtttttattttttaacagctaaaacgttttaatttttattttattttgttaatgttgactaccgaacaagataatatttctctatatttttttttcttacaaaagctttaaatattcattttaatatgcaatttgataagtctaaagttaattagtaatattatgtgtggtagttctaattaaatttcattatgaatcgttggtaatatattttttttttgggtgaatcgttggtaatataatatgtaagttttggttgatattttcctttttttttgttgtctaacttaattagaatatgataacggttccaaatgaattggtatcacatcctaaatagtatgtaattgacaaatttatagcatggtgaaatttctgaaactgtagattgtagagaaaaatcaaagctaattaaaaaatcggatatggctcgttagatgtttggtttagtttccgtaaaatgtaatgatagtactgccaagtagaatatgatcaaacgatctatttttgtaagttaatgacacattgctatattagaataagttattctaagttttgtgtgtttaggtgataagctaaatgggtaacgcgaactactagtatcgttgttatatcaccgaatttaaactcggtactagaatgtatgttgttgtcaaataggtaatgacaaattacggctacgaacataaaatcgttttttctttaaataactagaagttctgcaaaaactgtagtttgctcttttttctttgtcaatcaaagctccttttcatttcttaaggcacgaaatataaacgaaaagtacatgtatttgtccgtaattttcttatagcaaatgcaaagcagggaacaaaccttatggtacgaaaaagagtagcaagcttgatcatttaaactgaaagaatgagcaactcttctcaccttttgtaaaatttataagacttacttttttgtttcagaggttttgaaatttacgaatttgcaaatgattaaacggaaaagagttccacaaagctttttgtggatgtgaaagcgccaaagttcttttgtacaaactcaaaggagaaagccaacaatattcaaaaaaaagaaacgaagaaaacaaaaacctctctcgctgcaaagttttatattcacagaaggaaaatatgattgagagaaagttagcaaagcgaatactcacaatccagcaaacgagagagtatctcattgcaactcggtctttgttccggttctgtccaacaatctgcgaacaagagacaacacatcagaaaaggatactccataaaccccaaacaaagcttcaggaaaaacgaaataacaacactttgacaagtcacaagacctgcaataagctttcccagtggtccttcaggaatctcaagccgagctccctcgtaagcaatagcataaacaacctgagaagaaatatgaggaaacttgttatatatacacatatgtcactaaagagtcttcttcttgttcagttaagttacccgttcaggcggtactccttcccaaggtctggttaaagtgcatagctcccacattattacacctaaactgaagatatcacacttttctgagaagggctcattgcggataagttcaggagccatccactctggagttcctgcagagactgtgtctctcattgttgtccctgtcattattctcgacagcccaaaatcacagatcttgactgtccatttgttgctcaaaagacagtttgcactctttatatcacggtgtactatccccatccggtgtatacacatcaatcccctagcaacattttacaagtttaaacgctgtttgttaattaaagatgattacgaaactttctcatcgagacacaattccaggtcctatttggaagtgttattgccttctcctcaaaccaaaattttccatattaatactacatactatgttggaaagaaggatacacggttttgtatggaagatgaaattacctgcaaatgtcccgcagcatctttagcttcctccgccagcttaacctctttttttgtccactcaagtggagcaagtaatacaaagatcccatttccatgtactcagtgatcagtgataatcgtggaggctttgtgcatgctccaaggaacagtataactacaagaagtcgaagatgcatgcattgatgaaaacatatactaaaatctcacagtgaaaattcatagagatagatgagtagtttagtaccattgggatgtctaagtcggctagtggttatttggacgcagaaggagaaggcaggaaagaaagtcagaagacaagtaaagacgttattgccaattttgaataaaacagagaaagcctatagacatacctaagaattgatatctcattgcagaaatcctccatgttctcagctgtaaggtcttgctcaaggaacactttgatagcaacgtctgtcccgttccagatcccacggaatacttctccgaaaaatcctggaaggaaaaatcaacgaagaagatttagatgggttactaattcaaaaaaaaaaagtaaacttttgaagatagataaatacgagggtaaggatcgtgaagtaagataactagacgtttctcttaaggaaacttatggccaacaatttttttaagaacacataaattcgaaaacattgagctaaagatcctaaccaattccgacacgtgtcccaacagtcagctcagagaagtctatgttccattcttcataaggtaataatggcttattctggaacatgggagatcccaatactttatcccagatgtggcttatattgcgatgtgacgatccactctgttcatattggcttcggtagttctggggagaagaaggtagtgagattgccttctgcggatctagtggttcccttgaaagtgtcgaccttccaccagaaacttggtcatgggcatcaagatgaaaaccagagacctagaagcagagaagtctagttaagccacaaatttataagtcgttatccaaaatgagtgaacgtttccaagaatcataattttaagcatgtttgataaacatctacttgaaattgatcattgtgcgttgttgttgaaacagaaatttttatttcctaaaaatcacaacgcagcatattctaggatttttctttcatttcgtgaaattcaggacttccactttcaacttagtcaacgagaaaagagacacggtttggtattctgttgcagcccaagtttctttgttttcagtaaaactattatgattccaagcaagcagcatagccaaatttctcaatatatttcagtgatgtatattaataagcttagcgtacatttttctggagatgagagctctcggttctgtcatttggagagttaggagatgaatcatcatccccttgctcttttgagaggcgattctgcttcaaggcttcattcatcgctcgtactgccctgataaagattaacaggtaattttaaaaataaagttatcaatataataattaccaaaaacactgaagctccgtgttccaaatagttaatggtcaataaatctgaatgagaggtaacaaccattgcaattgctaaaacttttagttccatatatggaatgttatacaatcacatgctcgtgcagtgatgtatgagatcccaagttagaaaaagaacgcccctctcttggcattcttttaatatttaccataagagtgtaccattaattttgtcctaaacatcatgtatgaaatcacaactgagaaaaaaatatatggtgaaactgtatacaactgcaacctatcactggaaataattatatattgaagtcagagaagaatgttatgaggggaactatatatgtaacccaaaatgcagatagttaaaaaaaacatcatactagctttgccatgcacatgaagttcaatgagcaataaactaaacacccacctgacaatatcatcgccaatctcaggagttatactgatgcttctcctccttattctcttagtttccatttttgctcctccaacagatttgcagctgcacgtgaaaactgaatacataagcatttttttaacaaactttaggcatgagaacaaggttctctgacacccacaaaaactagacaaaagaactcggtaagcactaaacgagacaccaacaaacaacataccctcttgcagcaatatattgcatatttataaaactaaaagctcaaatcaagtctgcaaagacctctccaacataatctaagttacaaaggacaaaaaccataacgaaccttgatgtggcaacatccccggtgaaatctcgtgccaagttcttgtcgccacttagcatggactttgtacgggctcggaaggaaagatgttcgggacttcagacgagatatatcaaaaacgatctaagaaattagattggaacttggttcaaaaatgcatatacatatacaattcaacggggatgagagtacctggaactagcagtccgctgatcagcaatgaccttcctccggctctgccgccaaaactcgttagccatgtttgactcgctctgtgagaaactgaagaataaaagataaatactaatgacatacggtcatctattccactgcttggtttaccagaagctatattcaaacctggggttggttagcacaaaaaaataataataacaagtaggcttatcaccttaatttcctctctagcgcagaggcagatcgtaacagcatattccttgatggtggaccagacgtatttggagacccatccagtttcctgtgcaacgaaaggttttcatctttttctgcactgtacaacaccaatcattagaaactctgcacaacaaaacactgagtattgaacagaaggtgcagtaaaatatggtacacactatacttatatcctgcatgttcatgcagtgagattttacaatttaaaacttcaacatctacttacttttcatggtcaaatttctctggataaccaaacatgggactgtttggctccaaaggtgaatcacaagagtcattctctgcagaatcactttcccctgccgctgagatatgactcataaaaattgctttggttgatagaggaataagctgaccaggaaatcgcattaggtcaaccagcatttccacagaattcagcaaaacagtgacagaaatatgactatatgagtccacactctcagcagctccatcacttggcaaaccctgatcaaacaaatcagtcataatgcaaaggatgttaaaaggtgatcaaaatattcagaaatttaagccacgatgaatacttttttcgagaataacattaatcaaacctaatcaatcacaagccaaaatggagtgatactcaagcccactgatcacatttttgtatggtacttagcacttaccactacaagtcgactttgcaggccaacagtatcagctaagactttgaacaagattgctcgaggacgacaagaaccatgcttgatctgtcctagcagttgaataccacagttttcaaatgactgcgtactttttgctggactctgcagagttgattgcttataaacatctgctacctgccagccaatttcgacaaaggttttcagataagtaaaaggagttaacaagatttatgaaatgcttgctcttaccgcatcaataacaattcaatgtcccctgtatagactaataggggatacaagagaaaaagtcaagcaaacaaagatacgtatttcctaatttaacgcttttcccaagtaagcacaacttacaagtggaattagagaaagattgaaggcaagaatctaaatagtctggggaactttatcttgaaccacagcaggattctattgatagtttcaccaattttgaaaacatagaagacgttaagatcaatgtggcttctattagtattataacggacactctcagcatcacttttcattagacagacaactagtcacaactcttcctacctcaatttttatccatttatgatcactgtttttgcatgcaactttaaaatggaaaaacaatatggttattaagtgatttcatacatgaaacaaattttgagcatgtcgattataaaagatatgtcaaatactcttaccagtccagcaattttcttaataatagtagctggctttgagttcaatccactgacaagtttggtaatcaactgcttctgcctgaaaagctttttatctttctgaaaatcaactagaatcacatcagccttaagaccttcgtcacccagagcatgaagatcttccaatgtaggaatgttattaaatagctgcttcaatctattatcctgtagaagattgaaatataaacattgtcaaaggaagcaaataaaaaagattcttgacaggtaacagaagttaatcgagttcgaatgaatttcactcaaaaaatcattgaacagatctaatatcaaaataaaagtagcttaccgggatcacagagtagaagccatttgggatgggctcagaaagtgaaccagtactccaaagaatattcgaagcagtactagatggcagcccatcttgcccaagatttctaggtgagtctttagtactagatgtctcttcttgcgatcccagataaacagaaccaaatttctccacaaattctgaaggccaccaggtttgattagaaggtccttgctctgatggcccagcatcatctcccgtctctcccattgccaatttccttaatgtctatagttatatcagcccctacttatcccataaacggaacagtcgaaaaaagaaggaaatcctagagaccaaaatattgagaatcaaacttcatttaccagtagcccttaagctggaggtcatttgatctgcgttcacagagacgaaaatggtaattaaaaactacgatggtcataaaaaaaatggaaacaaagaaggcggagattttaatgaattcatagatacacattgaagaaacaaactagttgaacttgtttttccacatcacaacctaactagtgcagtgccaaatagaggaaatttcaaacgttctcctcttcaacgatggctgcatcaaatattttctaaaggatcaatctaagctttaacaccaaacatctcactggatgcataaaatgatccattatcagccaaaaatacaaaacaagaagcggaaaataagagttaacgataagaaaaaccatcagcatttcaacaagaacaatagaattccactctcataatccaatctcactctcaagtcaacgagagaatctcttaaggatcttaactgaatatagcaaaccaacatagatcccatgagtatcctcgtgtactaaataccacaattctacataaacttactcccgaatagaacagttcataagtgcgatctacccagaaactcagtttcaacacgaaagcaatcctaacacagaacccaccataacttaaaaccgatacgaaagcaaacaccatctagaaacacacctaagctcgatccaatacatagctcaaagtgccacaaacatgaatcacaattcgagagaacaaaaaaaagaggagaaaagttcaaaaagggtttttgtaaaatcaccgtaatcagatccacgcattcaatttccgatcgaacttccgattgacgagtaaacgaaatcaaataacaaaatcgatctcactgcgaagatagattcagcaaaaatctcgatcaaagacaacaaagagctatgcgttttcgtacacacatacaaaaaataatcagagagtatttgtatgtgtgtacgtatatggtttttttaatagagctgggaaattgggattttatatagtttttgagggaccaaacgaaagaaagagagtgatgggatttgaggaaagtgatgaagacgagggaaaggagaggaagatgaagaagaagagagacgactgaccaagtgacgatggctatgtcacgtgcgagttgatgagtcacgtgtcataaagtagatgcacctctcttggatcgacagctggcatcacacatcatccctcgtgaatccccaccgtcgcttctctttttcttttttgattggtggtggtaatcttatgcttttgtttttgcttttttttgttaataacttaataatacggagatttataagaagaacaaaaattagttacatatgctatattttattttttgacaatatatatatatatatatatatatatatatatatctacatatacatttttgtaatcattttgtggaaaaaatcctggagttgagacttatttggagttgagacttatttacaatggctgccactggattttaattatttgattttttttaattaatagtttatatttttttaaggcaattaattgtataacaaaccaaaaatattcgaaatatatgacaatcccatatgtcacgcaaaacacgataaattatcttctccttatctcacctacaatattcactaaatcttaaaacaaccaaaatttgaactatttgaattatttctattaaatttcggcaatcaattaaaatgaaacaaaccaaaatacatttacaatcccataaaatgagcaaatccaattatatgtgcacctaaaaacattccttatcttggtttgaatattccatgaaattaaaagtccataactttttcggcataaaatcacaatcacaactaattcaacaactaatatttaaacttataaaaaaataaaaaatcatgagacaaaaaatatagcgggacggatttagattgatatgaatagcaggacgggtttggattgatataacacatgttaaatatttattttattattttatcatcaccaattttttttagttacaacattaatataaaattatataactttaatactaaactaaaaccgtaaaatttatattattatatataaataaaatatttgccttgtagtgtaccacgggttaaatcctattatatatatattttacctattttaaaaagagatggtctttaatacaatgaatggagtggatgaaggattctgtttataagttgaataaagagaacttttatcaaattcggatttttaaattgttatcatacttaatacttttcatactattattattttttcattgttaaggaataatattaaaaaattaaaacaaagaagaaatgacatcatatgaaataaataaaaatgatcctacgatatcgaaaaaaataaggggttaaaatgtgaggaacagaacctgtaatttaaaaaaatctaatgacgtactgatgatgactatgtgttgtgcaattatggcaaagttagcaatcaaatttagggaaaatttaattaaaagtggatcacgtcaaggtcaataagatttggaggaaagtttcaaaagaaaaaataaagaattgcacgtggaacattatcatcgaatctattcctttttttttttttttttcctttttccccggttataatttttttttgctgggccaaagttaatattcttcgaataattctgataaccaactcattaaaacaaaaatcaatttgatatctacttaaacaatcaacccttgaattaacatcttctaattgttttgagaccaaacacacaactattaccaaaccttacatattttaaagctatttctcgatatctaacattttagtttaattatagacataaccgttttgatgattaaaatagttaaataaagattatgatatttattgggataatttcttttcaaacactatattattatttattaagaaaagactttcttggtttcaaattagttgtcgtttgagatttttttcaggcttatttttaaatattcatttatgttttctgttttagcattaactaaactaaaataatttattcttttctgttttagcattgatattatcaattaataaactaaaagaagaaggggcaaattgaaatttttgtcaataattgtattgaaaacacaaaaccataaataatttgaagcaaacttgaacgtctacagttacaattaatttgaaacgaagtgggtatatttttcaaaggttagaatatttttagaatctatataaaaaaagtaattaaggattaacatttgttaacaagaaaaactaaacacgatctataatttgatctctggtaatgattctttttagcagtaaatgaggaaattattgcatcaaaacaattttataaaccgaaaatgagaaaccgaagaactcgtgccctcgtcattttgccaccgacacctttgactttctataaaatatcactcaactcctaacatttttaaaataacattatacttcttctgtagccgtatattctcgcattacttcagttcatgcagacaatttcagaaccagaagaagcttcttacgaagacaatacaagttacaacaacgaccgtttaagaacactagtagataaaatatcactaactaaatcatcaaccaaagcagaaacaatctctccttccatgtctattccttcctcaaacatctctctttcataaccaatccatctcccttcaaaacagctcatgtcatgatccacaagctcgtcgatcatcatctctctcatcttcttcaacccttttacttctctgttcacttcttcagccaacaaatctctatgttccaacaaaatcccacctgacatcatcatccctttgcagcttccaattaacatcctttcaaatttcaccgctaagcactgattcacacagtcgaaaagcgcctttctttctgtcttcattgacgttgcagctcctcgagagcgttccatttcatcaaagaggctggagggtagtaatgattcattagtggttgtccctgaggcgaagtcttgaaacatgagctgcccagagttgaggatctcggttatgtactcgagctcccaatcgagtgttgctgattctgtttcatctaaggtgtgctgggactcgttggatgaaccccaagtgagctcttgatctgatgaactctgtttcatgcctgaaaaaaccaacaacattaagcttatctagctgcaaatcaaaccaatactaagactattaggtgtgaattcaaatcctggtgaagaaaatctagacataaattcacaaagacataccatattctctgtcatgtctgcaatctgagatactcttgctgcaggagagtgcaaaatcatcagcttctgtaagagtggtgatgctgctaacttcttgttcttctccctgtattaccttctgcttctaaaaggaaaaagacaagattttctcagagactggtaagccggaaaagcattcgatattatagaatagtgaagctatagtttatggaaactaacctggactttctggctgttaaagaatgaagtgcagtcagaaacagattcactctctgttaaaactctatcaagactgctttgagtcaatccgctatatttggaaggcgatgaaatcatcgcattcgctctatcttttgaaatggaactcaagggctcttcttggatcaagctagagctagatgattcaatcttcgttgtcaattccctgagcttctgctccaaaagcgcatttaaagaatcaccacctatcacattgaaccttatagcagagtctgcatcttgtttggttccttgtgaatgaggagatgataaacctttgatcgaagatgagaaagtgaaagatatcacatccatgtcccttttctgatcatctttactagtactcgagtcgccatcaatggaaatgttacattttatcgacttttcaccccttttgatccgcttatcttcataaattccagattcttgcactccattccgcggttttttgcttcgaggaagactctttttgcgggataaaggtaaagaagtgggtttttctgctgatgacatagtaaatcctgagctcttcgatatagatccactttccacaagaaccttatttactactttgttcattactctcctggattgctgattgtctctgcagttctgcttctggttgttttgcctaagcacattctttccggtactcaaggaagatcctttgctactgttttggcttttaaccgccctattcttagcttccactttctccttttgtcccgaagacatcctcttgttgccacttgaagacattgataagctgtcttgcttctgattactgctgacttttgcttgcgcagcgaaagaaggtggcttcacttcaccacctttcaaagcatcataactgtttttccccaatactgtagttttcttctcgttttgatctcctcttaggtacctactgttccgagtatcattagagatttgaggaactgaagttgacgctttctgcgcagcttcaagtttctctttcaaatctcgaatcctcaatggaactggagaagaagaatcagacgatgacaccatccgtgttcttgcaatcatccgtggactttgctcgatcattcttgaagcagcttccattacataagcagggttcctagatggaacaaatccaggattccttattggagacaagagcttattgtgagtgacagagatcggtttagctgatctcgggggtaaagtttcggtttgaaaccgctcaatcatccgtttacgcggccctttactggttcttgaatccaaatgatcccaagaaacaccatcgaagtcactctgacgatcaacattagcatcccaagtgtttgcttggcgcgaggatctgagaaagtatggatcaagatcaggattaacccgtggttccaaaacgtttggtagtggtaaaccctctaaacccataagcctcgctaccacacttgctctaaccacatttccatcatcactagtaacagatgaagcacaacagctagagtcacttctcgggttgtaagttgggttctttacactctgatcaacttcaaactgttgtaaacagatcacaccaaagaacacaaatagttcatgtcattcagtaaactaacacaaaacaaaacattgcatcaaacaaggaaaatggtgttgagtaagaaaaggcttacaacagaatgcggcgtaatagaggggttttgaacattctcttttgcttgcttagattcttctgttttaaaagaagaaactttagattattaaacttcattaccttaacttatatatacaacaaaagctggaagacataccagagagttgggagagattggaagagaaaagcttcttcctggattttccatgccaatcaaacagatttagaaacgctcctcttggtctttttctctcaacgacgtccatcttaatttacctatggatcaaaacaattgaatcagtttaatttcaatggaatgcacttataagacgctggatcccatcaaacaacaagaccccagataaaaaagatcaaaacttttccattttattataatgaatcacccaatttcagctgaaggatatagagaatgtgattgatatagcagaagattaaaggaaattagatcaggaatgaaatttgattacctctcagtttctcaggctgccaaagatctcattttttacttatggatccatccattaagtgtaatttgcagaaaccctataccgaattcagcaaaatgagaacccagacagacacagctgagagatgttttgcaaattggattgacccaaatcgaaacaatggtggctttgggagatctagccctaaagatcgaccaaagctctccacttttatctctctcagctcacgaatcgcactgtagaacaagaacaacgaccatggaagaagataaaaacacaaaatgagatttatcaaatcagacaaacaaaacaaagaaaatatttggggggttttggaggaatgcgtaagatcaggaaggctcaaagcagatttgagattagggatttgggtagtgagctaagagaagtgaagaagcagcaagagacgtttttaaaaaaatgagagaagctgagtttgaattgaaatgacgacagagagagccgttgcaaagagagagagagagagaaagacagacagagacaaagagagttttgaatttaggaaactgaaagctccctcctttgagctattaaaagtgtttcttttttctatacataaaaggaaaatcttttgtttcaacaactattttggcttttatacatatagcatgatctcatctacaaatatatatagcttgatgatgttttttttttttttttgtcacaagcttgatgatgtttatatttggtatccaatgcagatggaaatatatagcttgatgatgtttatacatgtttcagttcagtttgcagtttcaaacataagagaatttgaattggttaggggacaaaaaaaacacataatttaaaagaggtcataacgattcaattttcaggtgtagaaaaataaaggcaaagactttattgtaaacagtgcaatcactgtatatattaatattccattttgattattataaaattatttcgttgggcattaccacaattcatatttgtgtccgtctcacaagggctccactttcgtatagttttgaatatttgtaatatgctgcattctatgattcgaattacttaaaagttcaaattttttttggactcttgatatttcacaatcagtttttttttttaaaaacagaataaatgagtagaggaagttgttgtggtttgagttgcttcgaagtagcgaaaccaaagagagtagagtatatgagaacgatgtctgaacaattcgataaaatccctaggaagctttacacgcatgaagacttgaatctcacaatgcagagccgatagtgaattc

SEQ ID NO: 1093 - DNA, 91851 bp, Arabidopsis thaliana
aagcttatcgtcttatggcttcttgtggaaagactgttcctctaaatcaaagtctcaagtcctatttcaagtgtggctaaaaatagtcaaccaacaaaagcaataagcggtcgtcaagccgaaccggagatacttaataagattagttaatcaagtctttccttgtctttttttaatcgtataagttgttgctctaattggccttcattatatttatgaaccatctctcccacattccacgtttttcttgctttttggaattactatttcactctttcaaattcgatactttgtacttgcttttatttaaagaaataaaaaagtagtctacttctatttaaagaaacaaaaaaaaagtagtctaaactagagaaaacggcatgtacgcgttaattatgcatacatccttggcccttgggactattcttgtgatttcacttcataattaactgtcacacaaacatggccaagatggtatcaagaagggaaaagatggtatctactatctagaactctcaggcgtccattctcgtgtttgtgagtttattaaagggtgtggtccccgactctttcaaatgtatttataacaagtttaattagttcacatgtcgcgattgttatgacgacacaagaaattatcgttttccctttataacgttgtcgttacgaacttccttaaatcccccaaaaaaagttttgtttcctaattatcctataattagttgatgatgttagggtttgaaaacttaatatagcgaagaaaaacggtttactatacttaattatgagcgtattttctttacgtttgccactttctttctttgcatggacattcactaagagcgtgtgtttgtgtttcaggtgattcttcgctgtgttagacgtggactacttctaccggtgttcaacaatctggtaagcttgtcttttgggagtacgaacaaaagaggttggaaactgctgccacttctgattgagcagtctccaaagcttgaaactctaatcatccaggtacgtatcattagctaatatatctaaagagagtcagagattagggacttagtggttgagcctttacatccatcttcttgatgcttttccaggggctggatagagttacacaggcgatgtgaccatgcctccgttccaagtgaagatgctgcatgttcatggttatggaggaaatgcggaagaggtggaacgcttacataaatttattggggagtcggaatgcggtgaagtggtgctaggctgcggaagctgtggtggataataccatgtattgcaaaccaaaagggttctatagtctatagttgaggcttcctggattttcggtttcatccaaatgcaagatctcatgtagtttaccaaattattctgtgtaacaattcatgtacatgtcgcattgctcttgcagttgcaagggcctctttaatttcagggagctatttttctgtatcttttggcagtctctcccttagatgatacacgagtaaccttacctacctcgtcaaactccacctggcataagattaacatttctgtatttgatgactacatcgtccctacaatgcaatttcacacttctttccactcttgcagactttacacaatatgtggtccattagcttggattttcagtttcatccaagtgcaacatcttagacgatgaaaggtggtgattaacaagctgatttgattcttcactttctgatttgtgatcttaaatagagttttaggattcttccaatctgtagtatatatagcttactagtttttaccagcagaaagatcttcaggagaatgccgatttaattagagcgtaaaaagtaaaaacccttcactttatgtgcactaacctatggctatgcatcatccgaacgaaaccaatgtcagaacagaagaagaagaagaataaacaaaactttctttaaggcaattgaagctcttttgttttcgacaagaaaaatctttattaaagagagaaaatgggggaagagaagatctatctcctaaatcaaagtgctgaaaaaccagagaccaaaagactatacttggtggttctgttgatgatctctctgttccagattcctcacattgtctactatgtgttggattctcttagaaaggctttcgttgtgctgttcgatctgttcaaatagcatctccagatgtcttttgtaagtagccgctctctttttctctgctgctagctgctgcatcagttcctgaattttgtcgtgttcgttctgcaaatgaggagagcaaagttttagaatttaagtcttttctagtaacaactgatatataagcaaaatcaaaacaccagcacatgaatatgaatatgctatatagcaactagtcacgaaccagtatcacatcagcatatatatatatattaaccagctaaccaagaaacgccaatttggattttcaaatgcaatggctgaatataaagaaatattgaccaacgaaagagagtaacaactaaccggatattgatcataaatgcaaccccttcgaactctgccaggcatcaaagagtgattgtgctccttgacaaactttgtgataacccatttaccagagttctcttttctaatcaagatcattgctttacatccaacccttgtttccgctctttgtctaataaccttatcccgcttgctaggcaacctgtaaccttccttgttacaaacaagttgcctgcctatgggagatccatcatgccttgaccgtgacagtttactaacacggatgacgaaccctactttagtagcatacgcattataaaaaccatgagccgctgcttcagattcgaactcctggccaacgtaaggctcatctccttgagcctctgtcatatctgcaacagccagaggaatagaatcaagatccaccttctcatcttgctcaccagaattttcaccgagttcattatggttgtcatcatcttgctcaatcattgcttgaccagagctttcacccatttcattatgattctcaaccgtggtaacctcaagctcaacaggaatccccatcatcatcccagcagctactccattatcaatcctgaaatccactgcaactcaaaaaaagggaaaacagcaattccactaatcaaatatctagcaagaagagctacaagtgttcatcatcttactaatacaaagttgtcatcttttctattccactgtctaattcaagatatgagaacaaagctcaagtacaagtgctctcaaaatcatccagcctccaccaacaatacaaaacaaacttaaaatggaaccattctttgggattcaccgtcccatagattcaagagtcatcaacaaatcggggtttccaaaagtatcgagatgtccaacttctcagtctcattctttcgcagggactagtctaagtggcttaatcgatcaatccaaaatcgaaaattaaaaacccgaaataatggtgtaaggaataaaacaatcttactggtcaaaagatattttccggcagatgtaggtcggagacgacgatcgaattaggttttcgatttgggggagagacagagaaggtgccggttcagggtatggattgcagaggacgcagtaccctatgacgtggcgatagatgattgggtcaaaatcggaaagaagtcaactcaccgttcatctaagctttgggtttatcgacttatggttcctccggtgcgcttcgcctcgtatgattattcctcatgttctttttttttctttcattacatgtttattttattttattttttacagcgtaattctcgccgaccgacgcacccgttagaccggtgtgtccatgacttttaataaatgttaaaattgacccctttattatccttcatttacataatcatccttgtactaacaaaatttctctaatttctagcattcattttgttcgtgtcaaccaggccaattcagccggtttaattaactttctttaaaatgctattgataaccagctaatgatggtttagtatacgatttgactaccaaactacattagctaagtttttttaatcatagaaattttgaatagcaaaaaacttattacatagtaatatattcagttacttatatttcatgatttagcttatatcactgttatcatcgaaacctatccagatagttttaggcatgaccacggttacggttattacggttacggtttattaaccaccgtatatgattataactttttttaaccttaacattaaccgttatatatacggttaaaacggttacggttaaatacggttatggttagatacggttacggttatttgataattatgatataattaatatatgagacaaaatattatattaatctttataataaaataaataaataaatagtgatatatcaaataataattattttacgtgattatgtgtttcaaatatttatagcgaatcagctatctattttttttaaataaaccaatgaatatacaaattaatggttataattataatgatttaattaattatatttttcaaacaaaaacaataataaagaaaagatgttatgagcactaagaaacagtttttagagtataaataataataatatgaactacttatgatttgatttatggtaaaaagagtagtggagtaacttcgatcgtattagtgggcatattaaacgatttaagttactattttagtaaaataattatttatttagaattatacacagttacaactatatttttaaggttttaataatacggttaaccgcgcggttaaacgtacggttaaccaacggttttgatacggttacggttattatatttttttaaccgtaatgaatctattttcacggttaacagttacggttattaaccgttttatacggttacggttgggttacggttaataaacggtccgattacggtccgaaatacagttacagttagattttggtcatgcctagataattcgcaactctagatttttatagacattataaatcatccacatatatatgaatcagtaatccaaaaaaaaagatctgtaacatatggttttctttcgttgcgttttaaaatatccattttatttagcatttattaaaaattctcttcacttttttttttttttttggaaatcaataaatcgctttaattacgtggaataaaacgtctaagaagaaggatagtcgttagttagtagtgataactgatgcataaaatataacttgggaaataggaaaccaaatagtgttggtacttggtagatagtctctgataaataaaaagatcatacatgtcaaagctagccccgtttataaaatttgtaacagatttgcatttctcgatttagtagatttacatgagataatatcttgtgtaatcggaaataaaagttatcctaacaaatgagataatcgaaattagaggaggatattaacatatttatccaacaacggatataagcccctcgtaattaaccttgcgaaattaaattataacaaatcattcattaatacatttcgattttggtagatttgcctaaaaaattatccatgaatggtattttattgaaaaagaaagttatccaaaacaaacaaaatattcggagtcaaaagaggaggattaatagtatcttttactccccttaatagtactatcttaacaacggataagcccctaataaattaaccttgtgaaatacgtcgtctaggtcccattgaagaagcataaaatctggtcaaaaacattaatcactatttactctaaatctcaccaaatcataacatatatgtaaacaaccaatagaatattacgattaaaaaataagttaccaaacacagtttagatatcttatctgatcaatctttaaatggataaatttgaatttgtattaattaaaagtcttgtggatttgactaaaccactcaccctaatacctctatataaacccttgattctctctaatacctctcattatatccaaaacataatctctctctatctctctctattttgctcaatcttaatcgtccgatcaaaacactccgactaaaaatggctgcatctaacggcgagaaaagcttgatcgtgagcttcggtgaaatgctcatcgatttcgtcccaaccgtctccggtgtatccctcgccgatgctcctggcttcatcaaagcccccggtggtgcacctgccaacgttgccatcgccatttcccgtctaggcggtcgtgccgctttcgttggaaaactcggtgacgacgagttcggtcacatgctcgccggaatcttgaaacagaacggtgtctctgctgaaggtatcaatttcgacactggagccaggactgcacttgcgttcgtgacactaagatctgatggagaacgtgagttcatgttctaccggaaccctagtgccgatatgctcctccgtcccgacgagctcaatcttgatgtcatcagatctgtacgttatttttatttttaattaatatatgacacgtaggcaaattcttttttgggtccgtgtctcacatttaattagcgaacggtgctacatcattaacgtaacggttgttggtatacgtaacgtagatgtcaagttaggttaatgagtgctctgttttgtttttgttttacacaggctaaggtgttccactacggatccataagcttgatcgttgagccatgtcgatctgctcacttgaaagccatggaggtggctaaggaagctggtgcgttgctttcatatgatccgaacttgaggcttcctttgtggccctcgaaggaggaggctcagaagcagattcttagcatctgggacaaagctgaagtgatcaaagtcagcgatgaagagcttatgttcttgactggatctgataaggttgatgatgagactgctttgtctctgtggcactctaatctgaaacttctcttggtcactctaggtgaaaagggttgtagatactacaccaaggtaatggttttcgaagagtttttctttcttgtggatttgactttaccattaatgttacttaagttgtgttcttgtatgtatatgattacagagcttccgtggatctgttgatcccttccatgtggatgcagtagatacaactggtgctggtgattcatttgttggtgcattgctttgcaagattgttgatgaccgtgctgtgcttgaggtatataccaaataattcatcaaatcattctgcaagtttttatagattgttttcagattcttgactgtgttctttcttgctttttacaggacgaagctcggctgagagaagtgcttaggcttgcgaatgcttgtggagccatcacaacaacaaagaaaggagctattccagctctccctacagagtctgaagttcagagcctcctgaaaggaaactgatttcacaatgtctggatttttaggacttcaagttttaccttttcttggctttgttttttattttcccctgcttttggctctgtgttcttgtagaaccgttctattctgttatgaatctcgttttattccaattgcaaggttttttgtcgtttgagtaactttgatgaataaaaactctttaccaagttcagtgaacaactgtctgaaatgtaaaaagcctcaaagcacaattgcttgaggataacattcagaaacttgcaaatctaatgatctccaaatgtgtttgcattcttcccaccttgaactcatcctctccagaaatttttcagcccacacttccttgctaccttccatactcagatcatatggcactgaaaaactgagtcgattcacaaaacacacttttacataaacatttttgcttaggcagtaaagttatcatcttggttttgaagttcttataccttgttagctcttctaaatgagagtccttctcggtggtaccattcctaaaatatcttgagttagacacccaagtaataataagatacttgagttacaaatatacaatagcttgcctgcatactagaactttgaataggcggagggatttggtggataggttgtagattgcttcttctatgtgatctgtgccaaatagatacacaactggatagtccagcagccatctgcagatacagatagaacacaatggtatgataaattgaaataactaatggagtaatggtggacgaatcttaaaacgaattgggcaattacccgtttaaggttgggattgtaactttagtgtcttgtaaacaacagctaagatcaatgcataaagaagtctgagaagagttggcctcatcaagtaccgtagtggtatcagtattgctgtcatctaaaggaaatgtcgaagagaatagcttctgaatcgatctaagctgcatccccagattgctttccttgctttgtgttaccatcttgatacaaacaaaggaaaagacaagataaatccaacgtgtattgtaacatgaaaagagaaaccacttaacaaatacaaaagctttataaaaggaacaacctttggaggatcttgttccaagtcaatgaagaacaactcgggttctgaatctaagctggagcttacaaacttgggcaggcttcttacatttatgaggtatatcatatcctctataaccataaccttcagatctttaaaaactggtaaaccctataagaaaaaagcaggaatcaaatcagctacaaatatactcaagtactaatgtgcttgaagaataactagagcctaacctctcggatgagctcaagaagtgacagcaaacgattctgtagctcaggcatctttccaccatagtcaatcatcacaactggtctcattcctgtgcataatgccagaacatctggtccaagaaacccgatttagcatcgtttacagattcaagcatatgacaacaaattgagataatactagaatctagtgttgatatatgaacgctttataatgcacgaaatggctttattctttgggttcttaaacagagcaatcaaagcaccatcaaacttaagaatcaatttttcgttcctcaaggaattgttaagagcatatactcatataaactataacccaaattcccaaattgaatcatgaatatcaaagagtcgcaaaacataagaaaaaagtggaattcatgagacctatttcgagacggcgtttggaattgctcttgagtctccatttgatctgagagaggcaagaactcagaaactgaagtagttcctcagagcttggaacctccatattcgcagaaaaattggagctttcttcttctctgtcgcaataagactcagtgataccctttctctatcggacgttttgttcttagaggaaattacaatatggaccctaaactttctagtttctcataacacaccctaactttaaaataacaccaattatgtcacccacgtgtcaagttttcacgggaggggtgatgacgaagaacaacgtattttcacacgtgcgaacaataggcttcacacgacttttctttcgttatttttttccacattggatctaatcacttttgcaattcaccggaacttagccgacgagcgctgatcaaatcaaccggagaagcaaagctatagatctactatctccttcacagttgctatcaggtctgtgttcgtcttcatttttaccaaatcctgattgttacaattttcttcgttttcttctgtgtttatcttcgttttcttcggtttaaataatgggatatttcttgtcgaaatctggattctatgcgcatgtttagtcacggataatatcggaaacccctggagtatcagcaatgtcgtaatttttctggtttgcttagtgaattctctgtgaaggaaatatagaaaagaaagtagataacgtgaagaaattgttgtgattgagcaataagagatagagagaatagaagtaattgatggtttcttgagtgttggtgatattttgatggttggatttttttatgtataaagaaagcttataaacaagaatcatgcaaagaaattttgttctttatgcttatggagtttatagttagtcaaattattaacggtaagctctttgtgttggttttgtttgaatgtcagagatgtataataatatgggaccccggcctggaatggcaatgcctcaggcaaatcctcagcctagcccatttgggaatccgttctctggacctggctctggacttatccggagtggcttgggagcttatggggagaagattttcggttctagctctgagtatgtgcagagcaacgtaagttactcctatctgtcactctaggtttttccagtctgttcattacttggcgtttcatttgttttaaccggttgaaaattaacagataagtcgctacttctccgatcctcaatactattttcaagtgaatgaccagtatgtgaggaacaagttgaagattgttctacttccattccttcacagggtaaatctcacttttttggtatgcttttttctttgtatttggggtctttctcatatgagttttgctgcgacctcagggacactggactcgaatatcagaaccagttgggggtagactttcatacaaaccaccgatatacgatataaatgcaccagacttatacattccgcttatggcctttggcacttacgttgttcttgctggtttgtcactaggactctatggaaagtaagttctttatttatgttgtaactattctggtttaagtcttctagagtgccttttcaacattttgatccttctgaattttctaggtttactccagaagctctgaactggctttttgtgaaaggaatggttggctggtttttgcaagtgatgctgctgaagataacattgctttcacttggaagcggagaagcccctctcttggatattgtggcatatgcaggctatactttcacaggcctttgtctagctgttcttggcaagataatctggggatactcttactatgttttgattccgtggacctgcttatgcactggggtattcttagtgaagacaatgaagcgagttctctttgcagaatctaggagttatgactcaagcaggcatcactatctcttgatctttgttgctttagcccagtttcctcttttgatctggcttggtaacattagtgtgaattggctcttttgaaacgcattacgtttatattgttgtgaaaaacacctctgaggttatgtagcagaatttggaatgtcctcctgatggatatattatatggtagttgagcttttttggtttagacttctgtatgtcaaacatcaatatggaaagaaaagtgttatctcccttcccttttctgaatctcacttttcatatactacatttctaacatgattgaaaaccgaacaaggacatgaaatttgctttggtaattatgctttctaacagaaactgcttcccatgcgcttgatctctactccaagctccccagcattgcattggtgcattgtgattttggcttttgtgttccttggcagatttgaacattcttaggacattgcagacagttgttcgataggtttcctctgatctgtttggtaatcttttgaaactcctcaggaagtatacctgacaggtagttgttctccaagtataagcttctccatgaattctccagtcttttcccataaatcctaggaatatcgccagagaacatgttgctccgtagattgatatcctttaggttttcataagttgccaggttcagcggaaggtgcccctgtaaatggtttccttcagcatcaagcatgcgcaggcgtgatcctgtaactttaataacctctatggatatgaactggttaaaagacacattgatgcgtgcaatctcagggaatgttaggatttcatggccaacggtgcctgagaatctgttctggctcacatctaaagacacaagctgttttagcctatgcaagggtgatatacgtcctgcaaggctattgaaacagagtgatagagttcttagacttgggggaagcttaggaagcattccataaagatgattgttaccgagttctaatacttgtagcttccacaagccgttgagcgcaggtattcttccatcgagatggttgtttgataggaccaggtgagtcaaacttctcaaggctgagatccttggagggatttcaccggcgatactgtttttcgacaggtcgatggttttgagctccttgagccgcgtgatttctgctggtatgtctccagtgaagaaattttctgctagtgagagtttggtaagtttccggagctggaacacagattctggtactggaccgcggaatctgtttttgttgaggctaaggacagtgagctcagttaggtttcctacttcatcagagaggaaaccgtcataaccgtcatcatcaagatcgatctctataacccggctagttgtgttctccagagggaaagaacacataactcccaagaacgtccctgagccttcacacgggtcttcagagaagtcccatgtgctgaggtaagaggatggagagatggaacttggatcaacgctgcgtattatagactctagagcttgaatatcagatcgaagagtggctgatagaactgatgaagggacaataagtgaaagaagtagaaagaacaaggacatgatgaatactaaggaagaagaagcagaagaagaagatggtagtattttgacagccattgttatggttcttctttaagaggaaagatggaaccatttctttttaagtgagtattcttgtaagaagaagaataaggagaagaagaagatcgtgttgaacctaattggaatctaacatgcttcaaagggttttgggtatgttattggtgagattcacatctttgtagcatcatcattaataaatgatatatcaaacaaaatatggattgactcacatttagtttttctttttccatgctttttccgttcacggacttggacaatatcactttgttacaataaaaatcacaaacaaagtgataataacttatggttattaatttttcatgaagttttactttgaattcaaacttttgtaaaattcacatgataggcatgtgtcagcttgaaatttggaagataaatttagaattcaatctaagaaaccacaaaactagaggtgatcatttgaccaattatctaagtaaagactattgaaacattccacaaaattttaattttagtaattcactatatatagacgtttgattttacatataaatacattgatgattcaaccaaaagatacagaaaacaaaaaaaaaaaataaaaccaaaaacagaaaaaaaaacaaaaaaaaaaacaagaaccatttaaaaagcttatcaagcacaatggccatcgaaaagagaaccatgattgcctccttcatcatcgttctgatgatggtaacgatgatcgcaaccaacgttgaggcccggaatcatgtcaaaatcaagccaccagcaaaccccaagttcttctttttctaaattgatggctcataatgtttacaagaaataaatggttggcttcaacaaggagcttcaagccttcaagcattagttaaactaatgtttactttttatatatatatatatatatatatatattcactttcatcctcttatttgttttagctatgggtgagattatctaaataaatttttataaataataacatttatacttgaataaaataaactagtttcaaatttcagtcacaaagatttattttatgttgtagctagaaattaataacaattatcatttatcaatatatttgtttttagtttaaagagggtataatatccttaaattaataatattagtaaaattgtgttatttagttgtcttgtgtctcgatatataaggattggttcgttccattgtaacttaaatgatgaataacaacaacgtacgtgagaattagaatactgaaaagtgaaaactacatagtgtttaaataattgtcgtcaattgctggaatacatatttgtgcgccaaaatttaaggatgggttcaacaacaataaaacgaacatagttttgatattgtcattgttgttcattgataacgacagtaaaaacaaaaggcgaacattctttttatttgtttgtaatctagtattaacagacgatcaaaaacatgaatctgtaatcccaaatttctaataagttgacaaacgatctaccatgtttaaatttcaattcgtccaaatttgttagttattattttggttacatgatatataaccaaagaaaaaaaacaatttggttatatatattatgtagctgacttgatgaactttagaaattgtaaacggatttgtctctatttatttggatttcaggcagcttatgtatgttagaacatcatgtgaatgttagacatgaacgtaaaagaataacatgttagctagggactaattaccaaagccatattttgaagaacaaaatcaaaatgaaagtttattttgacaagaataatagcaaaacattatttagctattttttttaaaatggaaatctattatatcagtcatatttagctatgtttttcgaaaaaaaaacattattgctatgtgagaaattcaaccgtgatcctataacattttttcccacaattaaacattgaattttcctattccagattttttatagctggacaaaagaattcatggtgagaggcccaaggtctattacgacctaggcccagtaccacaagtcaagccgacacagacaaaaaattggattcaatgtttttttttctgactcgatttggtgaaaagacgaaactttctcctggaaaaatctggaacaagttagcgcgaacacgacgaatcgaatcagagtcccaaggaagaaaagatctctctttcatccttctggagaattcatatactttggtcgattggttttagctgaaaaggtctctgctttgagactaattctcagatctgtgtattgcttgcttgcatcgctttctacctcattgtcgatttggaggagggaattgagcattgggtttagcttcttaagtatgggaagacctttgttttatgatatcattgagaaaccagcaacgagctgtatcgtaacgttatgcagtgtgatttggtttgtgattcagaagaagagtattgggtactctcaagttggattgagttacgagactgcaatcgaagggcattactggaggatgattacatctgctttatcacatattagtgtcttgcatcttgtgtttaacatgagtgctttatggagtcttggtgttgttgaacagctaggtcatgtaggtcttggcactgcttattaccttcattacactcttgttcttgttgtgttctctggtgttttggttattgggatctatcatttgttgattgctagattcaagattgattattttcggcgagttacagctgttggttactcttgtgttgtctttggttggatgacgattctctctgttaagcaaccttcttcaaagctgaatctttttgggcttttgtctcttcccattagctttgcgccattcgagtcactcattttcacttcgatcattgttccacaagctagttttctgggacatttgtcgggaatccttgttggttacgccatttcgtggggtctgattggtgggatgaacaactactgggctcttactatgcttggttggattgtagttgtctttgtgttcagtttgaagaaatcgggtgcttatgatttcagttttttggagatcgaatcgcttactgatgcttctttaccctcagtgcggtttattggaaatggccggaccttgcaagccagtgcagttcctcttagtggagtggaagttgtctgaattcagttcatggtcaatattgtatttgggaacaagttcttgtcatcgaggtagtagatgaagactgagagttggtaaccaagattttgcagtttcaagttccaaccaaatttaagagatcctcaaggcttgcttgaactgcgtaatgtggtgaaaaggattaagcaagctagtgttgtttaggcatcattacagatgaatatgacacagtcaattcttttgtcatgtggttgatgtatagttgcaaaagggtcccatgtcttacctaaagattccgtccactagacatgtttcctcatttgtgacattctcctttatttcaatacgaaagcatgctaccaacagtcttgtattactcgtttttctttgatatattgaattggtgaaatagcagaacgatatattatttgcactctttcaagttcacaaggtaattagatgaagttttctgcaggtctcttggactagagcagtgtcttcttttgttattagtttccatcttctgtcatttccttgttttatattccaaaaagagaaggtaagagaagggtagaacaatcaccgattcacagtttcaagtttttatttatgagcagttttggttagatgattattttgaagctctatctcaaatagagtcatgagaattgtatttggtatcagagtagtctaacttagatcaacttttgactagttgtttgtttccattgaacctactttcaacccaattttattcacaagatctgcatttctctgcacccacaatgttttacattgcttatataatttgtacattgatcaggtgaatctgatcttactttctggtccacctctaagcacttttaaatggagaagaaaggccagcatggtacatatgaatcaatgatgactcatcatccgatcctctgtatcattgctttatctgtacttttcatagcaatcgacccctttcacatgagtccaatcgggggtcgtgagttcaaacccgtgaagcatgaggttgctccatataaggaagtcatgggaagctggcctagagacaaccttagtcgactgggtaatcatgggaaactggagttcgtggaccaagtctttggtccagagtcattagagtttgatagtttaggtcgtggtccatacacagggttggctgatggaagagtggttagatggatgggtgaagcaatcggatgggagacattttcggtggtaacatcaaaatggtaagagattacatattcatcacttcttttttgtgcagagagttttgtttcagtttttcttattgatgtgtgttcatgagaattaggtcagaggaagcttgtgtgagaggtgtggattcaacaacaaacaagcaatggaagcacgagaagctgtgtgggaggcctcttggactgagatttcataaagagacaggaaatttgtatattgcagacgcttactatggtctacttgtggttggtcctgaaggagggattgctacgcctttagctactcatgtggaaggaaagcctatactctttgccaatgaccttgacatccatagaaatggctccatcttcttcactgacaccagcaaaagatatgacagagcgtaagacaactctcttattcttgctttgtatgtcaattcctaccgtaaattgtatgatatagaaattatacttgtattttgtaggaatcatttctttatattactggaaggagaatcaacaggaaggcttctaagatatgacccacctaccaaaacaacacacattgtgctggagggtttggcttttcccaatggaattcaactctctaaagaccaatctttcctcctcttcaccgaaacaaccaattgcaggtatgaccctcaactttgtgtttatatagctgtatctatcattcatttctcttcatcattatgtgtatgacagattggtgaagtactggctggagggtccaaagatgggtgaagtcgaggtggtggcagatctcccgggattcccagacaatgtaagaataaatgaagagggtcagttttgggttgcaattgattgttgcagaacaccggcacaagaggttcttacaaacaacccttggataagaagcatctactttcggttgccaataccgatgaagctgcttgcgaaaacgatggggatgagaatgtacactgtgatatcgagattcgacgaggaaggtaaagtcctggaggtgctcgaggatagacaagggaaggtaatgaagctttggattggaacagtggctcataaccacattgccactctaccttatcctttgacaatgaatcaatgaaggactttgttgtgtagttcctgaactaaatcatctctctgtaacttaattatcttcgttttgattcaagttcctttggaccggtttgtcttttgttgatattatgtgtgaccttagattcctcatgaaattctctttctttctttcttgagtctctttttttttttgtttggttcacgtcctatggaaggcttcataacttgagccatcgcccagtcttcttcgactcccgcgaaatagaaaacaagagtatgcaatgaagaattgccttggaaaacaagagtatgcaatagagaaagtctcgaaagtgttggaaggttgaagataaagagaatacagagaggtaacggaaaaataacgactgctttttctccaaaatgatgacgttacaatcatctccattacgacgttttactcttttttcagtaactttttctgtagtttgtttggcatcacatagcaatgaacattttatgaaatctgtggtgtctgctttcttctcaaagcacaactatccaaaactccaaactgttggggccatatatattactaaccaagttgatagcaaaaaaaaatacaaatccaactcataatttagtcttgaagttataagaaagaaactcaacggaagtctgaatcatagtcattcaaaagacagcagaaagggaaaaaacaaaatcatctaagacaagggtatataaaaccatgatagatcctgatttcataagatcttcaaaggtcttgcacactcaaacctgaaataaacaattggcaaattcaacttagatagagatagacgcatgcgttcatggaccaaccaaaaataacttgtgacctaaacatgccaattaaaagtgtctgaattaaagtagattaaccacaagactattcgaattcaaaaaccaaaatccaacaatattatgacactagaactttcaagtgatgaattactcaaagctaggaacatctatccaatctaacaaatgttatgagataagaggtttcaagtgtgtaatgtttgggctgagtcacagagagagagagagagagatagtgaacctggaggaagagactgcttcaacttatcggccttctcttggtcgaagacacatagtgtgtagaggtaccttgagcacctgaccttgaacttcacaatgtccttgcttctcttgatcttcacagaccttgcatccttccttctcgccgtcaaaaggaagtccttgatctcatggatttgcttcggctgcagattatccaaaccaacatccattttcaatcaatacaaaacaaaacagaacacacaacaagacttcgacccaaatgttactgcatgatgaacacttcatacatttcaagatgaaacttaaaccaatgggtcaattacgaggaagactctaatctactagattatcagtaaccaaacaagaaacccacaataagagattgattactttcagctcaatcatgcaaactttactaaaatcctagtcgtgagaacagataatcaaacaaataatatttagcttcaataatcctcctgagaataataaaactgagaggcgaagaaaactttaccattgtcggatctgatttagtggctgcaactttcttccactcaagagaacaaacagcaaaagcaagaacccagcgtctgaaagaaatagagaaacctaaatatgaagaaaaccctagactctcatatacgcgaatttccaaatgtaccccttaggcccattaatccgaaaagttggccattgggtttagtggcccaagttgttttgtttggcaaatttcaaaaaactcggatccaataagaaaagggtatttaagtcattgcgtctatttgcctatgatttcaacattagcgccacaaaatgttttttcccgctccactaaaaaaacacttcttcctctctccaaaagcacacaaaaccctaccgcttcgtctctctctctttcgctctgcagtttcctattcaaaattgattggtttctctaaataatgtaacaccttcgattcgataatccttctctctcaaatcaacttcagtatctccatctctgcttctttagggctccttgttcgaaggaattaaaatgttttattcacatacgcttttggctcgaaagggtccattggggacggtgtggtgcgccgctcatgtgcaccaacgcctcaagaagtctcagtacacctccatcaacatccccgacactgttggttcgtctttcctatcttcaattttcgctttttgatccaaagttcgcttcttttttttttgaatcccctttgattgtatccaattcgaaatttcaaaaaggcaatacgaatttttacatgggcattcatcaaattccgattttgttttttatatataacccattgtagtaattgaaattctctgctttaataaagtttctgacttttcgagaattttgcaattggctttgcagataatataatgtttcctgaagtaccattggcattgagaacgtcaagtcaccttctagttggggtagtgcgaatatattcaaagaaagtggattatctttacaatgactggaatctccttaatacttgggtagctaaggctttcgtttctactcaagttaacttgcctgaggatgccagacaggccccgcctgagtctgttactttgcctcaagcactaaatctggacgagttcgacttggaagatgacactctcgacatgtattcttctttcttgcttttatttgagtttttatctgttctaaagcctgactcatctttaacattcttttcttgtgaattctagggaattcgataatcatactcggagtgaggaagatatcactctcacaggtaccttttgtctgtgttttttttccttggttctagatgcagcataccatgattttgaggtgtttatgatgttgatgcttatttttcagatcaaattcctactggcattgatccttatgttgctgtaacattcgacgaggtgagattactgcttgcttcttatgactttgaagttgattctgacttcttgtttcccatgtctccgagcacttgttattgaatgaaagtttgtatgcctttcttacaggacatcatctcagaatctatcccgatggatgtcgagtgaggctcttcatagagttttgatttcctttactacaccttgctcttaatcttccttatctgtttagttgatcttctttaataatgttgttacatatttttttgctttgagcagccaatcaacagaacctgtgagtaggcataccggagaaattgatgttgaaacggctcatgagacaggaccagacaatgagccaagagactccaatattgctttcgatactggaacctatagtcctcgtaacgtcacagaggaattcactgaagtccaggatcctagacaaagtaacttgacagaagagcgcattcccaattccgagagaaacgatgccacttctcctggaactgttcccgagattgagagaatgcgtgacgctgcacatgatctaagccccacgtcccatccatcatttgctgcacaacaacaggatgtcagagttgaacgcactgagtcattggatgaaactttgaatgagaaggaacccactatccctagtattgatgaagaaatgttaaattctggaaggcattctgcgtttgagcttcgctcaggatctccaggttctgctgctggttctgaggaagaacgtgcagattttggtgagctagcaacatagtctgataatttgaagcttaaccactacattctctctcttattatctatttaaaacacttttttctttatgttaagtgcatccatcacctcaactggtgcttcagccatctcctcctccccaaccacaaagaagggcaaggaagaggaagaactttgatggtgtcacagtattaaccaacaagtaataacttttccgttgcttcatgtggctttgattatttcattagctgttccgtactgatcaaatagtttgaacaggaacataagtgaaaggcttaaggatcctagtgatactctacgtaagagaaagaagatgccttcatccaaattaaagttttggagaatgaataaccagtcaaggaaggatcaaaatttcaatgagcccttgtttactggtaactttctttgattattattttattttcgacagttttgccttctttttccctttgtttttgaagaaagattattgcctgtatgtgtcaacctgcaggcttctcagatgatttacgcaatgtctttgaaaaggactatgtagcttcaaagccacatcttgctgtttctgatgaaactttaccagaacctgcatctgtatctcctactcgagaagctgaagtagaaattaatccggtctctccaattccagattctactaatccagacagtacagttcagctatctccagcgcagcaaactgaagatgtcctagactctgcaggtcctcgacccgcgcatgcagagtctgtagcaacagaagcacaatctcctcggacatttgataacgatgacatgggaatagaacatttaagggatggtggtttcccggtgtacatgccgtcaccacctccaagatcttcaccttttagaaccgatgacttcaccactcagtctggaaattgggagacagaatcttatagaacagagccttcaacttccacagttccagaggacttgcctggccaaagaaatttggggctttcacctgtttctgaaaggactgacgaggtttgttctcgcatgttcgcgtgttttgtttttaccattcttggtgcgttgctaaccttgatagcaataccatttgcatgtgccatacaggaactttatttcctggaggtaggtggcaattccccagtaggaacaccagctagtcaagattctgctgctttgacagggagagcaaggtatatatattcctaaaaccatgtggatttcatttaagagcctactgtttctctactaacctgtaacattcattgaacattgcagagccttggctcagtatcttaaacaacgttcttcaagtagtcccaccacatcaagccatccttctggagatctaagtttgagcgagatcttggcaggaaagacacggaagctagctgctcgaatgttcttcgagacactggtgagtgattctctgtacatatgtttttctttgtatctctgtagtgcctcgagcttagacgagttgtttttgaatttgcaggttttgaagtctaggggacttatagatatgcaacaggaccgaccatacggagatatcgctttgaagttgatgcctgcccttttttctaaggttcaaacgtgaataaacaatgcttaataaacttacttatgtatattattaacattgaagctagacgaggaagtagtcaattcttaattttttgagccctggttttattacattgtgtacaagtaaagcttcaccctaagagatggacaaacgtctaaattccatcattagccaatacttcacttgagttcaaatttgacaatgttgtaaaaaaacaagtttttgagattctctatgattctggaaatgaaagactagcacgtgttgtgatggagtgaattatggagctagatgctctcaagcctcaacatgtgtagatgctctcaagcctcaacatgtgtaccgatggaatcaaagatatcgatcacataaattaacggagtatacatagataacctcataaatgttatagcaaaaccttcttcaaaatctaaagacgacctacctattctacaattgttcttcttttgtatatcttagcagactatggaaatctagaaataatattataaattataggtggaatctatcgtactcatcagtcatcattctctaaggggcatgacaggaccattgcataaacttggtctttggctacagttctcatcatgacttgtaatctcttctgggatttggttctccatcgcggtttgattctgtatctcatggtgtttatgattctgagactgaatgtggctctcaatcttgattacctgattctaataaaaggtatgcagttcgatatgaggatggaatattgccagatgcaacaaaactatgtatactttatccctaagtatgaaaggatacgctagtaaatgaatgcactgagatataacgtttcaattcatatgaaggaatttcgaagaagaagaaaagaagaatcaacttgttgagcatctaaccttgtacaagtatttcttacgaagttttatggctgtgcgtatgcatcttctcactctaattgcaagcagcttgtcattacaaatctgaaaatatctaaaatcagtaagaagttttatcgtagtataaaaagtacaacagtagtattcagcaaagaaacaaagcccaacatgcacaaatgcagtgaaaaacatcctacctttatcatgtcatcgatcgagcgagtttctttcatgattttatgccgattcatgattagaatagccgccacacaaaagactggaagagggtcatctcctttcccacaggatgaaactacacaagaggcatgggttctttcattcctagaccataaatttcttgtcaagccacataaactgtatgaacctgctggcttcatcccaaaatcatcagacagcggaccagtttttggcaatggaccactttctggcagtagaccgctcttggacaacagactgctctttgaagtccggtcgctctttgaagttgattcactatttgtagttgtgccatttccatcatctattttatggtcccccatatcaactccagatcgttttggaagctgaacaaccaacggcttcaagcaatccttctctaaagtttcagcaaaagactcatcaaaatcagcagcccacatcatctacaacagataaagatccatgaatacatatgcaagagttttgaatctggtacgtgaaggcacatatgtataataagaaatccaagattctcttttctaccagtctcttgcaaccactacataactaaaatccatttgttatcatgagtgagacacaaattctagtaagggcctgactggtttaaacgcggcggctgcggttgcgggagtttgcggaaacggacggttgcggtttcaaacgatatcaagcgttttcaacgactggttgagcgtttgataatgggtgcgtttgcgagagttttatgactggtaaaccagcgggtgcaatagtaattaaataaaaataaccaaaataaatataatatattactataaaaagaaataaaaatacaatatattattatgataaattgataatattagaaaagttgaacatgcttaataattaaaaccataaataaaactctaaattcaaaaataaataaattttgtaagaaaaaaacttaatcctttatgtatttggtacatcaccaaaaattgtatcaagtagtgtgatacaaatcgaaacatgcattcaatcaaaaaactcaaaagaatacaaaataaaaaaacaacgatgcaatgaaatacttaaaaaattatactagctaatgaatggataaaaagatagatgatacttaagtttgattattgattttgattttcatcagtttgggtgaatgtcataattgagagaataaggttacaatatattataatagtgattagggtggaagccaaaattattttaattaattaaaaaataaattattttaattaattagaaaaagaattatttttttctaacctaaccgctaccgcccgcaaccgcaaacgcttgcggaaaggagcttttgaaatccggcgatttcgagcggtccaaagcggtatttagcggtttctatgattggtgccaatcgctaacaaccgctaccacccgcaaacgtagcatttgcgggtgaaagagggagaaccaatcaagccctaactaatcttaatacaataatttaaacagctaaatcaaagtcaaaatttgtaggtaaggaaaaatttccaactttctactctgctcaccgcaagaaacctatcacaactatttaactactttgtgggttataagataaaggaacaagaaactggcaacacaaagcaaacagcagaagaattaccaacctcccacatcctcagagccttgttaaaagacaactctcgtcgaaacaacactaacagcatccggaacgcaaagtgaaggctttcagcaccaatacgtgataggtgtgaaaacatttctttatctgtgagttgcaatatacgccatagtgattgcaattgatccattactccagttggtccctccatctggaaattagcacgctacagtaataaccacatagcaaaagaacatcatattacaccacagcctttgtcacttgctggtaggggaaaactaaaacacatgttacgtatcagtaagcattggaataccgttcttcttatgagcatttcaaagcaccaaaaggcgtcagcattatcttcaaaaagaaatacaaatggagacactaaatcgctcattcctgtccacagattcgcaaccagacagttagtatcctacattagtatgaactcatacgagcgccgttttataacacgttacaaacccaacacaagagagatttgggaccttggcaataaccagttgcaggatcaacccaagcatagaccgcaaggatatctgacattctacctagatttcctggatcctcatagaactcaaggtggctatctgtccttaccacgtcaacaactgaggaaacaaaaagcaatttttaattcggattagtgaccattaatgtgcagactgaaactgaaaagcaagacttcctgtaagatcttgaaataaaagaaatgcgcacaagtggtacctatccggtgcaatgtccaaagccattcagagactcgatcttcctttacagtcccaccacgagtatgagtctcccttgccgacggcgtttcagggacatctgatattctcaaaccatcaacaatctctgacgtgcagacagaatgagacaacttttcaacagattgaagatgtacaacttcaatttctgagttaatagaagcagttacatcattataagaagacccatgcggttctataactaaatctgcattcttgtcaattcgaaaactgtgcattctctcatcctccgatcttaaatcactttgcgttgaagtttcttcatctggagtagaaagtcctttcttgcctaaactactcctcccaaacaaatctgtgaccggtagagagggaaagtcaaagatatcatctgcaaatggaccaggggaaggaaagccatatggactggacgggggtacaaaagaagaagtttcatatattgtgctatcaggactgactaggtcaactgactcactggagcttccacttctgcgcacaggagatttttcagtatcattattactccaatcaccgtgattgtcagtgttctcatgcccatctaaacaagcttcccggctttcatctatatcctcctttactacctcatttttgtatgattttcgcatatccataactttagatccgacaacataggcaagtgaaccagttcccacagtcgaatgcatcatctggcattgcttgagcagctcattgtatcgttctctgcataaattatgaacagcttattaagctttttccataaaacttgagtttcacatagcactccatcacgatacaacatgaaagcaaacaaactgcccaaccttcgagctaccctgagttgcgtacgatactcagaggtgctgcttaatgcataacagccaaggagaaattcccaaacttcagctcttatggatggatcgattcccttaaaaaaagcacaaaggaaatgcattagaataccatgttaaagaacaaacaacaatgggatagcctgagcagctaaaaaatcatctgcaaacatacccccaaaataattaatttgagcgccttgtggaaactggaaacctttccatcgccatcgaataaagcctgccacttctcaggcttaagcattttgccaatctgtacatttgaaacacttataatcatcaatgctacatctgagtaaagttcaagtaaaaagatgaactagagagtgaaagaagggatcttacagtcaaaacaacttgtatgcgagattgtgaaagacaaggctctctcagatcccgaaccaaagatgccactttttgtagacttacaagaccagctttccgacgagtccatttctttccctctccagcagaaaacatcagtaatcaaaacacacaaacaccaaccctccctccccaattcccacttgttccttcacaaacggaatcatccgttctcaaagcagcccaaaagcagtacagaaacctgcaatacaagagagtaaacacagtcaatatgtcacatataatggacgaacacacattgctttatctgtcattgacaatcaaaagatagataaaccagtgaccaatcgatatcaaccgatacccgaaagcagcccaacacaaaaggaatctagaacgagaacaaaaaaaaaactcactttaacgacatctcaataatcccagatagaaaaggtttgaaatttgaaaacttgatgacatagtaatctacaaacatgaatcattcgatcccgttcaacagaaatcggttcctcaaatacatggataaatctaacatcctttgatgagcaatgaaatacataaaatggtgaatgcgatactcaatgcggacagacatagagagaacctgtagaagaagatcatggaggacattcttctccggtgaacattttttcttcccagggaaagtccgttgatttatccctgcctgccttttctctctttctctttttctgtgtttcgcaaaagtttctctttttaatttaggttgacatttcaattagtcaatttgttacactttatcaagaaacttgtatttgttacgaacaagctgaaatgaaatcgacaacaatattgtttgactttgttgttgatcatccaatagataaattttaagaaataaagggaaaaaaaaactatatttgttgaattcttcttaatttcacataatgggccttaaggatccatatttcggcttgtatgtttaggcctgttttggtttatctaagatggatggtccaaagcttaaaaagactacagcgaacgatttcgccagcaacatataattaatatcgctaaaagaactgaatccccatgcccgttgataattggtatgttatgcatttgatcgcactagattttttgatcaacttgatctttttattcttattaaattttgacggacctagctagctttattttatgccagtgcgaaagatactaatattgaaaattgggtggtgagccaacatagcacaagtggcaaaaggcaaactactgaactatacattaaaattttgtgtatactaaaaatgtcttctcttctattaaatctaacaaagaaagggaaaaatagttaaggttacgtacttatcaataatcaatctatcattcgatgttagaaagcgaccaacgtcataagttgacattacctgaaaaaagaattacagtggaaatcttctacttcgacgacgcgcgttaacatttgtatatatatattaacaattgtaactttattaaagatttctttactttactgcgattgaatattatgatgacttctttttatttattctttgtgcaaacgattgacgaaagaacctttctatagtataaaagaagtactaaaaggtacacctgttctctaaacaataaacatgacatgatatatgaatatacttctgattaacagcgaacatggactaaaataaaatactcctctctttttctgtcgacagatatttttttatctacatatcgttaaatacttgaattagtatataagacaatccgatgttttttttttagacaactaatattgtaattgatttggaccgtttcagccatatcccgtgttattaatacagtatgcaaaccattttggagcgtacgatcttgatccgtttttttttatttattagaccttcgtataccctataaaaatttgaaattgagtatctaaactgagtttttaaatcatatacactgtacatttgattcaatttagacaaactagttacgtgccaacacgaaaagtaaactagatataaatatataatccctacaccgcgcgcataggtaatggaaaaactaatcacactaagaaatgtaaagaagggtttaaaaagtaaaaaagatgtccacagcaaataggggaacaagcacattgctacaagatacgtaaggtaggctttgtatattgttgaagattccacgtatggagctaaggaatcttgaaagagaatccgaatcttagaaagaaaaatagacggtcaggattcttcatatctctccactttaagaatctgttttaaggagaataacatgtaacgacaagagaaagtggatcattcgtgacataagcgcccataatttgatgtttactttaatgccccgggtaacacatactttgttgttctcgaagtatttgatatttcattgaatcctcttaattggagtacataagttctcacttctcagcaacgatgaaataaaaaaaaatgacaaaagagagttctaaaccacactaatctctaaattgtatctcaagagatcactatatgaataagccagctttgataaaagtttttaagtgttgatcgaaaatactgactaacgcttagatgattaatttatgtaaagatgatacaattattgtttttctatggtgtttaaatatttgtggtcttctgctatttgcaaatatttaattaattttcatgtgtattaaagaattgttatatctctgccgacagacgctcctatactatgggagatccaaagcaaattttaaactaatatgtggtctattaatttaaaacaaaatggcttaggtttaggatgatcctcggtattatatgcaaaatgcttaaattaaatataaacgaaagtaaacaaaaaagagtgacatatataagcagtaaacaaaaagagtattttaatgggaaaaaaacatatacaactattgtcattaagctcacgacagcatagcaaaatatatatagtcgaagattactgtatcaatggcaacaaattatatatgaattatcttaatcttaccgattactagtcaaaacactttgaatgtctccacattacccattttttttctatacttcccaaacctacctctgaatctgataatacagtaactacatgagtaataaaaagtctaaaaaagagaagagaaatgagtttatttccatatttttgtcgctttaaaaggttttgtttgataagggaaagtcggcatgagaaagaggagaaagtgacagctctctgataaaaagagggaatgaaggagaagaatttacgtcagattacgcaattttatgtcttccccaaatctaactgttgtccacgtgtcattttcctcttcactgtagatttaacttatcctcctttgtcatccttttcattatctgtattttttgttctttctttttctgttttgcttaaccttttctatatcctttttaaaataataataaaatctctatcaattcaatatttttttttgcagtaatattatttactgagagtcacctttaaagaataaaagatataaaaaaaatccaataataaaaaggtaattgtactttacttttcacattacgtcatccgtggtagtggggtcgattaggacgcatcattttttttttacggctcagtgactcacacacacacgccaaaagcagagtttattaaaaacagagtaaattcgctattccaatcaaaaggtgaaagaaaaaaaaactcaagagtctctcctccattaatggaaggaaccgtttctctttctatgtgctgattgctgatgtagctcccacgagctcaagagtaagcttctaccgcaatttcctctaactgaaaccaaatcggctctttactaattttacaataaagtttcctcttttatctttcctctctggctaattaaactttctcttcctcaataccccattcaagtttcaactcttctacactgtgtcttacagcttcatgctccaggtttaggtctaaaactcataatctggttctctttttttcggtggggtttgtttacttttgctactagataatgacttttagattccttctgtatgtcttgttattgttttcacgttttttttttaaccaaacaatagcaaaattgttacatgttttggatgttcatttctgtgatttgggattatttttaccttttccttgcggtgaagtttgtcctgtttcgtaatttgtgaacatatgaataatttagtgtttgtgattacctgctttgtgtaggatactgattagcatttctcaattgaatcaaactgctgaagacatctgtattacaaggaaaccaaaccagtcaggaaacaaaaagtctctgtctttggccatggagaacccatcagcatccagagataataaaggtttctgttttccagatattccagtagaagaaatggatggctgggttaagaatttgatctctgaagaagatatgtttagctcctcttcaacttcagagcttatgaatttcgaatcttttgcttcatggtgcaacagcccttccgctgcagatatcttgttcactcaatacggtttatcgacctctcaatctattatacctttcggaggcttagaaggctcatacgcttgcgagaaaagaccgttagactgtactagtgttccaaggtcattgagccattctcttgatgagaagatgctcaaagcattaagtttgtttatggagttctctggagagggaattctggcacagttttggactcctattaagacaggagatcagtacatgcttagtacttgtgatcaggcgtatctgcttgactcgaggctatctggataccgtgaagcgtcgaggagattcactttctctgctgaagcaaatcaatgctcttatccaggtcttccaggcagagtctttatctctggagttcctgagtggacatcaaacgttatgtattacaagactgctgaatatttaaggatgaagcatgcattagataacgaagtccgtggttcgattgcaattcctgtccttgaagcatcaggttcttcttgttgtgcagttctggaacttgtgacatgtagggaaaaaccaaactttgatgtggagatgaactctgtttgccgtgctctgcaggtaattaactaaccttatctctcttctctttgtgtatgtgtctttgcttcttctttcttttatctctcttcactcatgtttttgtctatgtttttcaggccgtgaacttacaaacatcaactattcctcgtcgccagtacctttcaagtaatcaaaaagaagctttggctgaaataagagatgttctcagagcagtgtgctatgcacataggttgcctttagctctagcttggattccctgtagttactccaaaggagcaaacgatgagttggtaaaggtttatggaaaaaactcaaaggaatgttctcttctttgcatagaagagacatcatgttatgtgaatgatatggaaatggaaggctttgtgaatgcatgtttggagcattatctaagagaagggcaaggaattgttggcaaagcactcatatcaaacaaaccgtctttctcatctgatgtaaagacatttgatatctgcgagtaccctcttgttcaacatgctcgaaagtttggtcttaatgctgcagttgctaccaaactgaggagcacattcactggtgacaatgactatatacttgagttttttttacctgtaagtatgaagggaagctcagaacaacaacttttgctggacagtctctcgggcaccatgcagagactatgtcggactctgaaaactgtttcagatgctgaatcaattgacggtacagaatttggatctcgtagtgtagaaatgacaaatctcccacaggctactgtatccgttggaagctttcatacgacatttcttgatactgacgtcaactctactcgaagtaccttttcgaacatctcctctaataaaagaaatgaaatggcaggttctcaaggcactcttcagcaggtatgatgatgcatctaatccattcatttactctaatatattttgatacatgctgctaggtatagagactgagtattgttgtatatcttacataggaaattagcggagcaagaagattagagaagaagaaaagcagtacagagaagaatgtgagcttaaatgttctccaacaatacttctctgggagcttaaaggatgctgcaaaaagccttggtggtgagaaactagtactagtagtgctctttgcttgtttcccttacaagattattcaattgctgatccttggatgtttttctttttgctttctttctgcagtttgtccgactacactaaaaaggatatgtagacaacacggaattatgagatggccatctcgaaagattaacaaagtgaataggtcactaaggaaaatacagacggtgcttgactctgtccagggtgtagaaggaggactgaagtttgactcggtgacaggggaatttgtagcagttggcccttttatacaagaatttgggacccaaaagagtctgtcttctcatgatgaagatgcacttgcaagaagccaaggtgatatggatgaagatgtgtcagtagagcctttggaagttaaatctcatgatggtggcggtgtcaagttggaggaggatgttgaaacaaaccaccaagcgggaccaggtaaaaaataataactacattttaagaccttttttggaggagctataagaatgtgaatatggtctaacaaaagatcattctcattgtgttcaggatccttgaagaagccatggacttggataagcaaacagtctggcttgatctatagtgatgataccgacataggaaaaagaagtgaagaggtaaacaaggataaagaagacctttgtgttcgaaggtgcttgagctctgtagcacttgcaggtgatggaatgaatacaagaatcgagcgaggtaatggaactgtagaaccaaaccactccatatcaagtagcatgtcggattcatcaaatagctcaggagcagttttgctgggaagttcatctgcttccttggaacaaaactggaaccaaataagaactcataacaatagcggtgaaagcggatcaagttcaacactaaccgtaaaagccacttacagagaggacactgtacgtttcaagcttgatccatacgttgttgggtgttctcagctctacagagaagtggctaagcgtttcaagctgcaagaaggtgcctttcagttgaaatacttggatgatgaagaagaatgggtgatgttggtcacagattctgatctccatgaatgcttcgagatattaaatggtatgagaaaacatacagtgaagtttctggtccgtgatataccgaacaccgcaatgggaagttccgcaggcagcaatggttacctcggaacaggcacctaagcatcaatgttattgtgcttaaatatgtacagataatctatgtttggtctgacattagttactcatgtagaaagacaaaaaaaaaaaaaaaaaaagggtgcagtggagttgaagaatgtatataaacatagaaagacacatcacacagatcctatatttttgtctcgaacaagtcgtagaagtaaatctgaatatatcagaaacgcaaggagatagaagctcaaatctgtggactgcagattagacatacatgttttttgttttgtttttgtcatcatcttcatgtttccaacttaatttcttttgaaatattctacttaaattaaagttgtttaaaatagggctattatattccagatttctttttaacagcttctagatttctttttattttataacttttggtataattattcattttggatctaaataagtttatttacgtacatccgatctaaaatagtttattgataaagctttctaattaactcatattttttttattttttttgtcgaaagtgaattttattgattaagagtgacaaaagtcatgatacaattgttcaagaatccaactagggggacaaacattatcagagtaatagttacaatggagacaaccctgtttagcaagtaaatgagctaccctattacactttcgttgagtgtatgaaaaactgatgttttggaatctaattaactcatatatattctttttttttaaacacccatttttttttaccataaatcaattgttccaatattttctttctattcaatttttacatctacagtaattattgtattatgagggggtgatttagttatctattttgaatgatttgagtttttttgtgagttatagatgattttgggtaaatatagtaaaattgataacttatgaattttcctaataacctagaacacttttttttttttttgaatacctagaacactttaaaatcattaaagaccaatcttggaaaaaaaaaatcaataaaagtggatttgaatatactctttcaaattcattagttcaatagcattggatttagcaattcttattataaccaataaccctagattttttattaaaaaaataatctatgataggataacatatgaattatcatcccaaacaaattaatttattgcttgccaaaaaaaaaaggtatattaatattgttactttttcattttattccacctattgttgttattattttgttatatctttatgtaatagtagtatactaacgtaagctataaaattctaatagaaaattcatctatatatatatattcttatgggggtgtaattgtgtaaactcgtccgtaacagataacataatgcaactagaacaacttccgtgggaattggaggaaagaatactcactttgattccaacaaagtgtctcgctctattcagatctgtttgcaaacgatggaactctctttcaaacgagagaaggtttatcaataatcatttggctcgtgcccatccacaataattcatcttgattgccagatccaagatttgctcggtggaagttaatcttgatgttccatccatagaggtgcatagccataacttaccctcatatattcccggttataatggtttcttcatgacggtcgaatattgcgacgggttagtggtttatgctaccgagaacgggattgggatatgcaacccattgttgagacagattagatggatcaaatccaaagtgaattatcgttacaatggggtgggatacgacaattctagacccgaaaatcattacaagatctttgagtcttgcccctatagcgatacaaccgtgaaagctagtatcaccgagtttgtatccgatgcatggatttcgaaaccgtacgagtttgcatatgattgggattttatgtcgtcctatagtgtatcattgaatggagctttgtattgggttgctttccatatggcgtctgatgaccagtttattcaaagctttgatttttctacggagaaatttgaaccctattgtctcttgcctaataaaaaatgtgatccaagcaatgctaggtcccttgcagtttttaggggagatcgattttcgtatttagagcaaaactatgagacaaggaatatagagatttgggtaacaaaaaaagagattaaaattgagaatggaaaggctgtggagtggatgaacttgatgaaagtgtcagttcctaaatggtcgagtttaagagtaataagctatgatccgccaagttacttcatcgacgataaaaccctcagtctcgcatttgtgttgtttgaacaagaaggaaaaggcttgcatttatattgccaagggagataagttccatgaaattataataaacgatttggttgagtatcctactcgtcatcaccgtacctatgttcctagtttggtcccagttccaacgttcacgatgagcaatagaagtaaaacgcagcaggttgagtcccgcttcacaccccctagaggaatacaagcgagcgatggaggaaacgagtgggacgacggcatcttccacaatgtgaagaaaataaatgtaggagtaaatgattttgacacggtctttgtcaagtttcactactccaaatataaccggattgaagccggagcaggtcatggaaatgcgacaacacataatccagacgacgaagtacgtgacgtgatgagatttcttacttcttaatttattagtttctaacttatatatagttttatcatacatatcatatggatttcttgcatagattatgatcgctggaggcgactacattgaagccgtcgaggggacctacactgaaagccatatcacctccattacatttcggatgcgcaagggagacatgatgccacagtacggacgcttgaacgggacgcccttctcgcttcgaggagaacgaggctccaaggccatcgggttttacggaagaagctctggtgtccacctcactgctctcggcgtccacttctctccaccccctctatattattcgtttcctaaccattcaccagtttttaattattaataatcatgccaataaaaagtaataattcttttttggatatgaatatgatcgtttttcttgaacatgcacgattgagtaaaatgggaatattactggccgtgttttttattgggttcgcaaaagcctaataaaaaaagttggacttatgagtaaaatgggaaatagggttttccaatccttctttctgaaaccctaaaccgacaaggcaagcaaacaacaacgctgctatacaaatccatctataaactcttttttttcttttcgaccgtgtccattaaaaatatatgatgcaaccagagaaccagccgtgggaattggaggaagagatactttctcaccttccaacaatttttctcgctcgattgaaatcagtttgcaaaccaactagtgtttaactattgctcatactcagcaaaccatgcacctactccaatatttcaaacttctgatctctcctttaatgcaacatatgtaataaacaacaaaatatacatggaatgtctcggaaaaacacaaatctatagggtattttctgtaataagtaaaaatataaggaaaatatgtaaataaaccaaactacaaggaatatatgtaataatatgaaaaagtaaaaaacaaaaaatcctttctctctcgcttctcttcttctctgcccctccttaacactcttctcgccgccgttcctctctctgcctcttgagcctccggagctggtgaaaaaaatcgtcttttctatctcctttgaaggtaattcagcttttcgatttctccagatgctcatatagttgttttatgccagtcgaatcggattattttcatgaaattaagagtgtttagggtttgaatctccgtgtttgtagatggcgagcaatattatcatgttcgaggatatcttcgtggtcgataagctagaccctgatggcaaaaagttcgataaaggtatctacttttttttttaacctcagtcacgatttgtaatgcttgtcatggcttaaatcgagtttctgatatgaatcctagtttcttgtgtttgttttaagttttagataaattggaatccaagttagtgtgaaaaagatctcaacttttaaaattttaagcctcctaaagtttgtttgttctgacttcaaattgattgcgtctctgtgtgtttgtggtaacacagttacgcgtgttgaagcaaggagccacaacttggaaatgtttatgcatttagatgttaacactgaggtttatccattggctgttggtgataagttcacgctggctatggctcccacgcttaatctcgatggaactcctgataccggatactttactccggtactgcatgctttttctatgttagatttttggtgtatattgcatactcttttttacttgcttggataaatctcatgaatggttacagtaagttaggccagttaacttttcttaaggttttggttggggcataccattaagtgctaattgctcgatatgactaattccactggcttgattcaggagataggaataagactaatcatatgaaaacttgagcaatacttagtctcttgaatattgaattaaaacctatctttgaaaaccaagactgttttctttgataatttgaacattcatttagtttccatgtcgctctattacaagaacatgtattaggatttgatctaattgcttaatagaacaattgctttggcttgattcaggaagcctatctaggaataagagtaaacatgtggaatttgagcaagacttagtgtcttgactcttgaatcatgaaaccaagattgttgttagctaatctaatctagtttccatctcgctttgttacagggagcaaagaaaacacttgcagataagtatgaatacatcatgcacgggaagctttacaagatctctgagcgtgacggcaaaactccaaaagcgtaagaatcccatatacctagaccaacaaaatcattttttcccaaagagatccaatttaacttacagatctaaccatcatgcttcggtttctatcttgcaattatgtgtttgcagagagttatatgtttcgttcggggggctcctgatgttgcttcagggagatccagctcatatttctcacttcgaacttgaccagaggctctttctactcatgaggaagctttgagatgccattgtctaatcactttccgagaatattcgcataaaaaccgaattaacagagagctttcttataaaagctttatcttatgttaaactttgctattataaatactattttcatgaagcaactcttgtacatccaatatttaactgtccaattgaattatgcttgtagctcagagctgttgatgaatgatgataaccacttgaggccaataagttataaaacaaacagagacaaaaaaattgtttcttttctaacaacactctcacatgtgtttagtaatattctctctttgaacaataacactaagccaataaaacaaaaaagtcagtttctggcgtagcaggaatttttctttgtgatagtgaagtttttggagttgttgttactcatgcttgtatccagacgccttcccacttctcccaactgtatgaggctcatgcgtattatcgctgtttacctccaaaccatgataagcatggctgaggaaatactcggatcctgattttgcagctgtttgatttagtgagtgagttatgattattgcctctcaactgcaatgctttctctgcagcttatactaatgccattggctctcatgtgtccgtcttcttctccattctttgcttgatctgcatcaagtagattgtcaaactcatggaatcaaaaatggctttggttgacttaacaatgtatcaagctttctatgataccgtttgttttgtgatcttctaggtaaccaccctgaaagaagaagatccgtggctcctctgatccgctatatatgtgcttctgaaaagtggttagcaatttgtgaattgtgatcacttgcggcatttaggttcatattgggtgtacgattttggattataaagaaaatcatcaaaacgttcgtagaacacaattcacaaatttattgatttaaactagaacgatacacgtaactgattcttctttttgcatgtccaaaattatcatcaagaccggactaatcatcataggatacatgtgaaagttgcagcctcttacattttctccgtaactattttgctgtcctgcttttatccctacattttctgagagaaagtcttctgtcagtgctagatttcatacttattccatgactaaagttactttacttcatttcataatcaaataatatactttctatttaaattattatataatttgttgacaaaaaaaatataggtatctaagaagtaaaaagtatatttttcatatatattaaattaaattaaacatgttctaaaaagggataatattttttatttatttatctaacttttggtataattatttattttctgatacaaatctactcactcacatccagattatatgtattttctctttctaattgcctcatatctacagtcattcatttttttataggttttctttcctaattacaatcatttatggacaaaagttaaaaaaataaaaataaaattttcttttctcttcattttcccatctattaatatatatagttattatattcttcatgtagtaatagtagcagtatctgtaagcattgaatttctgttatacacatccatctatatattatcttgttctgatatattatcataaagctaaaaaaaaggtatgatgcaaccagatcatgacctgccgtatgatttggagggagagatactctctcaccttccaatacaaattctcgctcgatttagatgtgtttgcaagagatggaacactcttttcaaggaaaggaggttcttcaacagtgatttgggtctcgcccgtccacaattcatcttgcttgccgaatccaagatttgctcggtggacgttaatcttgacggcccatctatagaggtgcataacttgccctcagatattcccggttataaactttatatgcccatgcacgtcgaatattgcgacgggttatttctttatgcaacctgttatgggattgggatttgcaacccatggctgagacagattagatggttcaaatccagttatgaaggttatgatttcagtgggatgggatacgacaatagtagacaggacaagcactacaagatcttagggtcttactgtacaaatacaaccatgaatgctagtgtcaccgagttgggatccgatgcatggaaatcttacgaatttgcattccatagttggaatttatctatgtcgccttatagtgtttcattgaatggaaatttgtattgggttgcttataatcatgagtctcgtgattattttattcaaagcttcgacttttctacggtgagcttcaaacactattgtatcttgcctactaaaaacgggcatcgtcaatgcgatggtagatcacttgcgatatttagggaagatcgattttcgtttttagagcaagagatctataacacaaggaatatagagatttgggtgacaaaagaaactattaaaaatggggatggagaagctgtagagtgggtgaatttgatgagtgtgttagttcccgaatggtcgagtttaagtgtcaactattacccgccaagttacttcgtcgatgaagataaagttggtttgactcttgtaatatgttgttataacaaggagggaaaagcttatatttatattgccaagggagataagttccatgaaattgaaataaaagatttggttgagtataatcctcgtcaccgtacctattttcccaatttgatccaagttcctacgtttacgatgagcggtaggagtataacccaacatcaggttgaatctcgcttcgcacccctcaggggaatacaagtgagcgttggagttggaggagacgagtgggacgatggtttcttcgacaatgtaaaggaaataattatacatacaaattctttaggcatcatctttgtcaagttttactaccgcaacggtaacgtacgtgtagccggagccgctcatggggattccaccgagactcgcggggtgaaatttcttttgttttatttattttctaccttaacattttcatatatacaactatatactttatggctttttatacagcttatggttcccgacgacgactacattgaagccgtccaagggacctacactgagagtcacatcacctccatggcgttccggttgcacaagggcaaccggtcgctacggtttggattcttcgagggaatgtcctttgtgcttggaggagcacgaggctcaaagatcatcggattttacggaagaagctctgatctctacctcaccgctttcggcgtgcacttctccccccttccctagatttttcatttccaagatgaataatgatgtgtaagatgggagcctagtaattcatttactctattttttgtttaatatctttactaaataaaatttgatgtctcaagctaaatgttactagtcaatctatcagattttgttgaaagtaaaactaattcgcatgaaagtaggataataatcaactgatcaaagttttggaaaaattagatatacaaataactaatagaaagtaaacacaatttaaacaaatatgaaaacctaatatatatttaatcatatgtgataaagtttaactggaaacaaaatagtagaaaaatagaaaaaaatcaaattgtcaatgtttaaacctctttttgtatgggtgatatgatgttgttttctatttcgtcattcatatctagtatattcttattgtggtctttttctgtatcatttatttgatgtgcatttcctctaaaacttcatttagtaccaagcaaattttcaggtttctacatgctaattagcacacttgtgctttatttcgctccgttataagctgaacttttactatattatgtataatatggttcacatactcttgtttgtttgtttggtctttttactccggtaaggaataagactagacatatgaaacttgaccaaggcttagtgtcttgaatcttggaataaaacctatctatgaaaaacaagattgtttgtttgataatctgaacacgcacttcatctgatttagtttacatctctctctatcacaggtggcaatgaaaaatgatgatcgatgaagtcggttgagccttatgcgactaattaaattgtagaaccaacatttgatgattctgttatgtagaagaaccaacatttgtttcatttgatttagaattaagttctgtcgtgtgaagttgattctgagtatcttcccatgatactctctttcgatgttctccgatatctctttattaaagccatcatgatacacattcagatggtttctcgtatacgtttagttcaattttttactttctcattaatgcatatatatatatatatatctactggaaaattttggttaaagttgtgtgagcattggcgaaaatcctcccactaaatgatgaaaaaagtttccaacttgctatgttgttcttgtaatcttcttactattttttcagttcttttttttcttcataattgtgtttttaaattgggaaaatttcctaattgttaatggtcctccaaattatgtgtcaaataaaatttgtagaaataccaaaataaacacaagagattaagcatgatatacccttgatcttaaagtgcgattccacttaaaaatcaaactcggatcgctaaaatagtcaaaagtatctagtaatcaaagactaagaaatgactggcttcgaatatgagtggataattattaatgtctgtcttatccatatataaatcttgttttatattattttcaaagtttcaactcaggagtatttcgtaggaacatatctagtaagaacattaatgtacacttaattttaaccactctcttgcatcacaagtaaaataaaaataaaaatatatgggttaattaacatgaaacattaaaaaaaaaaaaaaaaaaaacatgaaaggccaatagaattaaagacagcggtttttttcccaccgattttcgtattagatttctagtggaaagtgttagaatataggaaatatggaatatttccttattcctgattatgacaaatatgtaaacaatatacttgtagagcactcgtgttatgcctatataaggcttatgttaatatcataaatctccatggagattcataatattacagaaagatgaggagtcaagacggttttgtcgtgtgtgtgtttttcttttgttaatctatataaggaaaacgtgtgcgttgatcttacaaatataataaagttaatctatacaaggaaaacgtgttagaaagttgcataaaagtatttaatcgtataaatgaaaatggtctcattcttaataaaaagattttaacaagaaaaaaaccaaacgagtcaagacgaaagtaaaacgaattgacaatggaacctattattcgttgtgtcttaatcgtggcttagttgtatcatgtatggtacatacgttgatacacgaagtaggtagtgagtcgtggttttttctcttctgtatttacattccactcactttctttcttgcatcatccttacacaactacttcctataaatagaaagagactactaagaactttacatctgaagtatggaattaatttagcaactaaaaaaattcaagagagcaaaaagaactatatataccccctcctacctcatgaagtatcatcgctctcattctctcaagcatcatcacatatacagcttgaattagagctaagaaactgaaaggtcacgaatactcactttctctacttttagtttctctcttcatattaatcttctttctatgttactggtacttattcgtcgtctctgtagattaaatacattatacttttagtttcgctctacatagtccccctacccaattcatcattctcaagtatctatcgtcacacataccttgaaaactcaaaagtctcacgaaatatagttttctcttcttttactttagaccgtcatttctttaaatctatagtagtctgtaatctacatatattgtatatatatatatatatatatatatatatatatttaattggttatatataagtatattttaattaactaaagacaaatacgtagttgatcattactaatttactatgattgcgccgtaactgagtttgtgtttgaatctttcaggaaataatggcatttcgtatgagccgagatcatgcggactttgttgctcatggtggaaccgagtgggatgatggggccttcgtgaacgttaagaagataaaaatatttcacgattgggctggtatcaccttggttcagtttgactatatcgacggcacgggggctattgtaagcggtctcgatcacgggacagaaccttttcaatttgatagagaacacgggagggttccagtcgagggtgctcgagcagaggttaattaccaaactaatatttttttaattcttttttattgtttctattccaaaacattaatgattttatttgttttccccattttgtttggtagttttggctgagagacgatgaatacatcacaatcgtcacagcattcggcggatattgtgtgaggaagattgagttcatcacaaacaagcgaacctttgacttcggtggttttaattgaccaccttaaatgttttctttaaagatatcttccataggattataattagttcttacaaagttaaggtcagattataatttgcatctcaattaatatttaatacatatgcagtaatttttttgactaatgttaaaatgacatttataattatttttatctcatgaaagaaagataaagataataaaatatctaatacctaattttaatataagatgaaataaaaaaaataacatttgaacacaaaacagagtctaagaaaaagatgataaaacgtgtttgttttttttacaaaggaaaggaaagaatcataattaaagtgagacatccttagacgattctttgctatgctcttcgacttcactcactttgctcttcgacttcactcactttgttcttcttcatctaaagaggtcatctaccgagcttagacaaagacgtacctcttctgatgagaccttaccatgctctgcgacaagaacattgtaatctcttcctttcagataagagagagtcttgacaaacaagttgaaacaacttttttaaaatttaagaccttttgaaaaggttttaattaaccttaaactttaaagatatcttccataaacttataattgattcttacaaagttaaggctagatctactttgcatctcaattaatacgtttgtaacatttaacaacttaataaggaaggaaatggtatgagagagagggagagagaaaaaggatataatggacggcaaacattttgtgtgtgtgcaaacattttctcttctaacaatctcataggaagccagtaaaacagtgtctgacatagcacaaatctttctttgtgatcaaactcaacttcttggagttgctactcgtgcttgtatccagacgccttcccgcttctcccaactatataaggctccggcaaagtattctcactatttatctccaaaccgcgataaactcggttaaggaaatactcaggtcctgattttgcagcggtttgtttagtcaatgagttatgatcattgcctcgcaactgcaatgctttctctgcagcttgtaccaatgtcattgtctctcctgtgtcttcttctccattcttagcttgatctgcatcaagtagcacactgtttgtcaaactcatggaattaacaaaataaaaggctattgttgactgaacaatgtatccagctttctatgataccatttgttttgtgatcttctacgtaaccaccctgaaagaaggagaaccgtggctcctctgatccgatatgtgcttctgattctgattttacagagttgatcacatcttggaaatgcattaggtatgcacctgtccattcactccctctgcagaaacaggaacaccagacacaccgactcaggaacctcgtggatcgaatacaaaaactattaacgattttcgcattataataatttctctctgtacctgctaaaagcaagattggcttcgaacggagtaatgacaggggacatgaactctttgctatctaaaagagccgtttgggcacatgagatgtagatgaaaacatcgcactaagagaaaaacacaagacagaaaaagacattactcacttgacatatctcactttgataattacagctaattggaaggctctgttgtttaacttacctcggggaagtttgcgagtttggccgggttaggccgtcccatggcaagaatgtaagattttttgccagctgcagatatgagtgcttgcatatggtgaatcatatgaaggtaaccagctgcatatattgccaggtgacattagacatttaatgaacttatcaatcttgacatcacaaaatcaatcttgacaacacaaatgcagaagaataggaacttaccaacaccaagagtccccaccaaaatacctataatattcgcatccttagctttttccaccaagtaatatctgcaacacataactctgaatgaggacttgaaatgtaattcaacagagataataaagaagatcgaaatgattgacaaagtttcatattgtgatgtataatgtctgcttgaaaaaagtgattataccgtcgcttaagtatccttctttgttgataaaattccgtcaccaaagaatcttcttcagcatcatatctgactaacatcaacaaacgaacataaacaagaagataagctactcatgccttagtcaacccattggatatttgtttaagaaaaatggatcaagaaatttccatggatagagccatatacctatgtcacaaccattgaaggtcagtactacattggcaaaagctgaactgtcagaacctatccagaaaagtaaatagtcctcgattttgcttccttctggcaagtcccaagttagccctcctagtctatagctcctagatgaggataagctatcactagaatcactttcgctatatggtctcggatgctccatggattctctaggatctttggatggactaatgaatgaacacaagacattggctacagataattgagaatcagtcttcgataatcctaattcttctcggatttgtggaattacatgcgcgtattctagaccataaagaatctgaaaacaaagcaaagattgagaaaacagaacatgttcatcaatacctataccataaagataaacttatgaaaacaaagcaaagatagagcgataagcctcacataccatgataggcttatcgctctttgacgcataatctatcaaatgcttaacacagctggagacgtttatcgaagctttcccaaaaacgaagaatgctggaagaactgatgtcctgtgaaaacatagaacctcacaataagacattgtttcaacaagggaatttaaagcaattacatagatgaagaaaagggtttatgactcacgggcttagacatgtttgaccgtaatgaacaacacattcagaatcaatatgcaaagctccaacttcatcaatacagcaactaccataagttgtgtcagccattacaaagaacctgacttctctgtcagtaagcaaacgagttttgctcttaagagcactcacgaccttagtcgaatcttttaacaactcatccgggaactatgaaagaaaaaaactaagctttatcatcaaatattcattgaagtaacaatttgaagctaagaaacaaaatcaaacttcttcattcagaaactggagaaaaggtttggtacctgtaaagcaattctggtgaagcttttgctaataatgaactccgccgtacggttaatctcgtactttgattcaaattccaactccatagattaatcacacgaaattatcaacctttccggccgaataactaaaatcgtcgtattcgtcgacttggatttgcggctgaagaaaaacaaaccagacgtagaagaatgatgcttgatgaaacggcgtcgtttctaagtatagttctcatcactggttttccttatttatcaaaccggtttaagatcctaccaaaaaaaatcaaaactcaaaccggtttttaagtatttattttagcggttatgatgaaacgacatcgtgttgattccttaaaagtgcctgaaacatgaagtgagctcagagtgattcaactgatggatttacagaagataacaaagacgagagaagctccaaaaaccctaagagccatttttcacagttacaacttacaacgcaatgaaagctgaatcaacgaagttactttcagaaaaaataacaacagtgtcccttttttttgaattgaatttaagggaagattcgagcttgagttaacgccagaaatccgatcagtggcaaactacaacagtttcatctaaatcaatcaaactataaccaagtcgaagctcaaaagaacaaacactatgagcgcttgtaagaagcagaggataaaccatagagaagagagatcagatgaaatccacatcgcaaagcttgcaattaacgatgacgttcgacaaagaaattttaaaaaaattaacctttttagtttccgattgcattcaaggatctgggttttgtcgcgacgtcgcacagagaacgatggacgtcgagcactatgtttccgtattgattaaaaccggttcaagtatatatttatcggtctatatttgcaaataaatcacacccacaccggccatcgctggtttccttatttattaaacctggttttcatcggataagacgaaacgacatcgttttaatccaccgccgtcaaaaacaatttcttcggtcaattatacctctaagcttcgaagctccgacttcttcggtctgtttcttattaaacacacaaacaagaaaacgcaaaactaatcctctctcgaattagggtttcgtcaaggtattacattatttcacacccttatcatcatcttctgatttctggtaatcttcttttgattagatcttcctatcgattggttcagtcctttcttattttcgaattcttgattggtttaccgtggttgctacgatttaaacctttaacatacctaaaagaacgtttttgtttttgctttttgttgttattgaagtttttttttttttttattgttgttgatgaagatcctggagttgatgtattgagagaagccattgagataagagatgagctctacgcaggctaatctatgcagaccatccttgttctgtgcaaggacaacgcaaacaagacatgtctctagtgcaccttttatgtcgtcattacgctttgattatcgaccactccccaaattagctattcgggcatctgcatcatcatcgatgtcttctcagttttcgcctctacagaatcatcgctgccggaatcagaggcaaggtcctgttgtgtgtttacttggtgggaaggataagtctaacggtagtaatgaggtgagatgcttcgtcttcattctaagatgtctttgcttattagatcatataaagatgatgcttaatctttaaatgttccaaattgatctttttgtgtgtgtgtgcgtgtaagaagttcggcacagagttgagttatgtttctgattataagtagtattgatatgattcttttctgttttatacttacttggtcgaaaggataaatctgatagtagttatgagatcagatgatttctcttcattctatagatgttcttgctgagatttgaatattaaatcttgcaaaagtgatctttttgtctgtgtttgtaagttaaggcacagaactttagtgcgtctgatattaatacgctcagtgatgatgttttatcatcagctatcatcaacatgggaagctattgagaaagcaatggggaagaaatcagttgaagatatgttgcgtgagcagatacaaaagaaagacactggcggcattcctccacgaggacgaggaggagggggtggcggtagaaatggtgggaataatgggtctggaggctcatcaggggaagatggtggtcttgctagttttggggatgaaactctgcaagtggtattagcaaccttaggcttcatctttctggtaaggacaagatcacaagcccgcacaagttatctttgaattatagtatctttagctttgatcattgtttcttttttttgcagtacttctacatcatcaatggggaggagttgttccgtcttgcaagagattacattaggtaccttataggaagacccaagagtgttaggctgacccgagttatggaaggttggagtagattcttcgagaagatgtcgaggaaaaaagtgtataacgagtactggctaaagattaagcgatcatcaacaagtctacctggtctggtaacccgggcaaatacaaacgcatcttgagatcttatgttgattcaaatgaaatgaagatagtgatcggttttcttactggtttaagtagtttcccttagacccttacccgtgtttttgtttttgtttaagttacttttgccagtagtaaatattgatgctcatcgtcacaagtattgactctgtcgtgtttacgtaaatgaaaagttaccctgaatggctgaatcatattatatagaaaaagtaatcgaaatcgataacaagagcagagcatgtaaagaagaataccgaggagatgacataaggtgttagttagggaaccggaatgagagtttggaagtaagaagaagcaacaacacgagcgtatgcagacttgtctatatcaccaaggctactggaggatgagtgtgacttaagatacgacaatgcaacttctagcatcacttccacttctttaaagaaagtgtcaaaaacaaatgcatcagacaaaccgaaaaatgacggccttttagtttatcgattgaactaagggcaccaaactaacctcgtcaattgcccctgctttaatcttcgattgcatcaaacaccatttcttgaaatgtacacctattgaggaagccaaagagatcattccacactatgtgctttgcaaaatttcacacggaaaagtagaaatcattactttggtttacttaccgactcttatatctataacagatgaaattatctgggaggagatcaaatatcgtttgcagaggccctggcttttgatgtacaatggttgggccttactgagccaatgacccctagatatcttttcagagacctacctcatgattccagctctgcgtcttcctttgaaagtcaaactacttttgtggtaatagcagccagtagtaaatgtaaaccaaggccaaatagacaaacttttttcgtaacttttttgtattgatattaaaaatattctgagatattacagactccagaaacatttcccgtatctcgagtccgacttaacacatatagtaacacctttacttaaactaactggtaaaatggatctttaaaagtgttccactggttttcccactgcagctttgcgaccatctgctcaaataaaaggatccattttaggatctacacaaattaaataattaactggtgtagatcctatatagtttgagcatatactttgaatcttaacaaattgtttcagatccaatttgtaaaagcttgcaagagcacatatccacttagaaatcgacaagcatctatgtatctacatcacataaagcatttgttggaaacatttacaccaccaaagagtgttccaacaaataatgtcctacgactaacctcaaacaacgttttttttgcttgaacaatgctgaattttctgcagtagattctggttttctcgcagatcttcacgcgaaaatcaaacatccttcgatactaaacttcaacatttgaaactagtagcatctcttctggtactctgacgagggagcagacactatgggaatgtaagggcagttccaacctcccagacatattttaataccaaatgaactaagattagaaagggtaagagatgcgtgtacataccagttattactataatagttagtttttataatttcaaaactaaagaatgtaaaaaataagttaaattttttaaaatataaaaatttaaattaaaaccagaaaaatcttattaagaacaattaagtaaaggaacttttttttgtcttatcaattaaaaaatattaacttcttattttcatagaaaaaaaattattacaattaaacccaatacacatgactatatgagttttataagaaagtaatatgaaaaacaattgagtatataactttttagtctaacttttgcacggtaatttttaaattcaaaatcaaaattttaataaatatttaatcaaataaaaattaatatttttaattgataatataagaaacaaactaactattgattaaaaatatttagtaaattaaaaaaattaacttcttaagaaactaactattaatattatgaatagttcatatcttaaaattgtttattctttgcacacaaaaaaaaatgtttattctcttaatttagttttgaaattgaaaaaagctaactattataataattatctagacgaaaaaattgtttaaaaacaatacagtttttagattttctatgcaatattattaattactattgataaactgtaaacttgaagaaaaaataattgactatcattggtttagaattgtagaaaaactgtaaatcacaaaagcatcatatacatttataattaacttttaatatattttttgtatatgtgtgaaaactctaaaagatcgattatttacacaaagagtaaatttaaacataaataaaactgaataattaatattaccccacatgtttataaaaacaataataataaaatactacatcacaagattgttttgtatgtagactctaaaacaaaataaaaattaatttaaaaatattcgggttacgccaggtatattttttaaattttatcaattaaaatataatttaataaatataaaatttatggtttaacataaaaattatttgaaataattaatatgaacttgaattagggttttattttttgagtgacgttaattattaaagaaagaaacaggaatatcataaaaatagtttctagtaacctttaaaaaacgttgtaattcagaaaaacgtgaaaccaaacgggctacaaaatatattaaaacacagagtacaacaggcttttggtttgagcccaaacaagcccatttaaatctatttagtctgtaacataagtcacgtgcacctatcacgtgatcatcttctttcttccttttttcttgtcatctgttacacatcggttagggttttagtttctcttaccgagattcaaatggcgcttagaggagtttggcagctcaagaaactcgttgtgagctactgtaattggggtggtagcagtagaggcatcaggtaattttgtttacctataatttgatttcgcaatctatgagccgtattttttcatttatcatcgatctaccatttttcctgtaattcactttggaacttgagactatctatacgaatctatgagtctgtacttggtatttgtgaagcaaattaacttttcatgtcaatgtgggtttagaaatgtgaagcaaaatgatttagtaatgaatcgttaccatttcatcctagtttggtactacgcattttcttatgatgtgttgttaaacatacagagcctttatggaatcagaattgcctgctctaaaggagaaaaacccgcagctcgaagtaattaccgagctttcacggggacaacatccttatttgaagggcatttacagtatgtatatttctcctctattgaatacaatcctgattcaacggttgttgatattagcaatttcacttgcacaattcatagggaatagaaatgaaagggtagtgtgtgtgaagaacatggatcctgaagaagtgcttttgaatgcaacgaggctgaggaactcgcttggacggaaagtggttaaactgaggaccagacatgtcaccaaacaccccagtgttcaaggcacctggacaactgctgtcaaattctgagactttcctgctaaattgtttgcaggttttcatcttctagctgttaaatcgaatgttgcaagtatcaggattggtcgtttatctgtattgcaaccccaagttgtttgtaccgtctgtgacttgggacaaagatgtagtcttcaaatgttttgcagtttttgcaatgtttgaattttgtcttgtccttctggttgagtctataataagattacacaagggtttaaggttatattctttgtttgctctcagaattggaattgtcacttactttgtatttgccaatacaaatagagttgtgagagaacccaaacttttcctttgttattgtcacaagtaccagaaatcagacaagcctctgtaaatatccattcataattactgttaccacatatacactttaacatgtaaaagaagaagaaaaatgatggtggatgatcttaattagctggctggagaatgaaactttgagaagctttttgattttggtaaattaggttttagctgatgttttctggtgttggagatgatagagcagacttgtctatatcaccatggctacttgaggaagagtgtgacttgagatacgacaatgccacttctagcatcacttccacttctttcttgtactgtgtaaagaaagtgtcaaaaacaaatgcatcagacaaaccgaaaatggcggccttttagtttatcgattgaaactaacctcgtcaattgcccctgctttaatcttcgattgcatcaaacaccatttcttgaaatgtacacctattgaggaagccaaagagattccacacaacgtgctttgcaaaatttcacacggaaaagtagaaatcattactttggtttacttaccgactcttatatctataacagatgaagtctcgtctttagcttccaagcgccatcgacagtggacctggtatacaaacagaatttataaagcatgccaaggtaaaatttgattggtgggttgcaaaaagaatcatgaaacaagaaccacattttcctcataggtaacatacctcaaagtaagaaccaaaaggaacatcatgtggctgttgcactgtttcaaaaacctgaaagacgggaagacaagtattatcagacagataattcttatttcattttgcctaaacaacattagcaactactatatcccacggaaaagaaattgcaataaatcattcctaccagcactttcttatctggtgatagaacaacatgctgccattccgtcacagcagtgtctggtggacacatcggactattacaaatggatctaaacttaatctctctaacttgaccatcatattcttcagcagtatgccacggctcaatctaaaagataacaaacagacaataatgaggttcctgagaagtcgagtcgcaagaatgcagctttaaagcatgtaagcaattcagtggaaaccacaacaagaagagcacatatgtatgaagactaatgatctagataccaatgccaaacttacattaagatttttatccttccgtgcagatctgtactcattagtataagtggaatcatcagccaacaagacgttcaggacttgctcaggtgtactggcaaaaacatcctgcatacaagagtatgatgcaaaaatttcagaacaatatcttcgaagaactatagcactaacaagacaaaccgaatgtttacattgtagatgttaacaaggacttcttctttgatgaaagcctgaaactttacaggtacagctgcagtatcttcaggagctttcacttgtactttaccacctcctttcacagagctactatgagcacgcaaagcagactgtgctctctcctatatggtaagaaagtaacccaacagatgtaacatgttaagacttcaggcaacaacatcaaaattaacttattgattaaccagcaaatattgaatacagcatgcagtggaggactaacatataaacgtaaaaatttattaataaaaaatggagacagaccttcttttcgacttctaacattgcatgataattattcaccgcacgttgcaatgcttttagtgtatggttcctgttccaaaatgatgcaaatttatacctcactctacctgaaataaagaaggaattccacagagacataaacataacaaagcaccactacatatgaaaaactccataaggttgggtcctacagacaaatggctatgccaggaatcaaatgcaagaatgtcttgctgacttgtgccggtaaaacagtaactagcaaaaagtgtttgatgaagaaaaagaaaggtatgaacattgatatgatcacaaatatccaataacaaacattattactaaccatcaggagtcccaagagggggaacaccatgtccaccagcacccatccgtagtatgattgttatagctgggtttatcaacgcgtgttgacttctacgaatctataatatacaataaaagttatgtatccttagtccgcttatcagtttaaatcaacagaaatccgagagatcaagaaaagagtactacctcatctatatctccgagagggacaacaacctacaaaatatgatgaggaagtttttagcattggttcaaagaactcaatatgtagttacttatagaagccctgaccttcatttgcttagagaaaacattggagtggaaacatatgtgccacgcggaaacatacattcggccatgatacaggaatgacctctccagggcacatgaataactgtgctcgacaacctaaggaaaacatacatcgaaggcatacatttttgaactttcatatatactacaatgagattttgtactagttaagttacctcatccgggaggagatcaaatatcgtctgcagaggccctggcttttgatgtacaattgttgggccttgctgatccaatgtgacccttcttctaccggctccagcatatccagttacagccctacccatcaaatccattttgtacaaagttttaaatcacaaaggctactagatatcaagtcagaggtgtggttccattgaaagtgaaaaaccagccaattagcactctcctatctaaacaagataaacccacagcttatagaaagattgaagtagcactggcggattacctaggagcattcacgggtagtttgattgcattaatgttaaggcaaacctgacaaacaaaattagattagcttctaaagagaaaataaggattcgaataaaaccattcaagagaaaaatatacaaacggaaactaaggaaaaacacacctgcccagacgggctgtctaatgagtgccacactggacccgtttggccttcacgttcaacattaatagttactgagccaagaacagtacttttccaaatgatatcccaatcatgaattgttacattaatctgccataacaaatataatagtaaatgttagaaataggtatctggtaaacataacaggtgcatgttttcaaagttactgaatctatatgtctattttgaagaataagtgtttttcatatttctttaccaagtcatatataagcgaaattctcatactaggagatatcaagtgtttgaacttagtgataaaccctctgcctcatattcccatgagagtctaaacaactttaaggtgaaataagtttcctaaagcagtaaatgatatttaaccttagcaggaagttcatctgtgggaaaattgaactcttcaccccacattggatttctcgagccagggaccatagaactgtaacaagcacagagctactacattaacattagaccatcaaatgtgtaagcactcaacaaccaaaccaccaattatatgttttcactttttttagatggatagaggttgttgttggtaagaagctaaaagacagcggaaaagagcaggaaagaaacatgacatcgaaaaagttgctcacatgttcctttgaaaagttataacactaattgaaaaggatatgtaacaacctgaatcgcttttctgatccacaattaacaatagcataaggatctgatgttccatttaagttagcaccaattagattcttagcagccaagagttccacctggaagaagatcctcacattgatgcaatgttagtatcctatctatgcacagatgaatcataagaatcaggagaagcatttaccttgactatataagcagcattagtttgagtgtctcctctcaagtgtcctatctacaaaaataagtgcagaaactgcaagtcaaaaaatttggaaaattacccaattagagaaggggaaagctaaaattcattaagaacccacgagatttctccggctaagtaaactgagaaaccgatcaatttagagaaatgaagaagatgatataaaaaccttgtctttgtcaaaggcgtcaccggaatcgagattctgcatgagacgagaccgatcaaatccaacaccgacgacatcgtcatctccgcctcctctgtaagcgaatagccaataggaagcgattaaaaacacagaagcgaccaccgcgacctcaatctcccacgccgacggtaatagaacttccaccgctgactgtaccatctcgatcaacggagttaaaaagtttaaatttttcgaaacgaaaagcgcgatcaagaggattgtctagggatttatcctatggaggatcacaacacagagaatcaacattattctggagagaagaaacttcgccttctttagaagaagaacaagtgagtcaaaaaaggacaatcgctgagaaagaaaggattttggaaagaaaagtagaaactgagaaattagttgtaaggacggagttacggaaatacccttggaactgtaaacagttactggctgtgggactcgaggactgtgaggagaattcgagggtagttctggtaattaagaaacttcgaacgtaaatagtaaccgtagaaaagtcgtacgaagactttttataaactgaaaaatgaaaaatcttgtcgtgatgtatattaaccaaattttcttactggttgaataaaaagggaggccaaaaacaaaaatcgaactagtcaaattgaaccaaaccacactaattacgttaagtttggtttaaaatttcaataaaaactggtatatgactcaaatccgtgaatcaaattagagtttcttacttttctattgactcaatggtttttatttgttttacttagaacaaatttgtaaaactatattaaaaaacattaaacaaaagaaacaagtgtaaatatataccttagatcatttaattaaaagctctatttatagaaatgtatattcatattattttttttgcatatctaattaacaattaaaaaatccaaggatacaatagatttgatttctaaaacctagtaaaccggataatgatccataataagattaattcagttaatttatcggttcggtcttaataaagtggttttaattgtagaaaaggcgaatggaaagaggccacgtggaaaacaaaggagacagatagagagggaaggacccgttttaggttttttgattgaggtataaatagatttcgatcagtagacgtttttttaagttgcctttacacattctcttttgctcctcctccttctctcttactctcttctcgccgcaaaacctcacttgctctctctttctctctggtatatctcattatctctctatcttctgtgttgttgtatatatgtatagctctaacttcgattctttacgagctcaatttctttgtttagatggttccaaatgttttacctttttactttttttaatacctttttgtctttgttgctgccatgtgagctcaagctctgttcttgttagtgggttaaattcctttcttttatggatattctgattctttgagcataattgttgagaattgaagtcagttttgtctcggttactcaaaagtttcgagctttgtatattgctagtgatagaggcagcttcaaatccgaacaataggaatacttagagtggactttgattgtggtgcccctgagatttactctgtttatttggttgcaaatattgtacctttgcttttacctgccatgtgagctccaactccgttctttgtcgtttgctagcttcccttttttaaatagttttcagattccttgagtataattgttctgaattgaagtagggtttttcttggctgctcaaactttgtagattgctactttgctagtgatagaggcaacttcaaatccgaacaaaaaagatacttagattgtgcttctcctgagattactttaaagattttactttggctatgaacaaaagcctatagctttgtcttttatagtctaatttaagtaatgaaatcccagattcttagttaatttagagaggaaaatgggtagtttgaaaggaaagtgatgagatttcaagaattctactaagattttatattgcttgatgcattctactttcaacctgaatgttagtagcagaggtactgacagtcttttatccgcaggatctttatcggggagcattacccgcgttttaacttacggtttccaatgtgaactaagagtgtgttatcagttgtgatgactgtggctgaaccacacatggagctcaacgaagaaagtaagcaattcgatgttgagaggttatcgccaaagaaagagcaaagtcctggaggagaacataaagaatgtggtcttaccagtgctaatacaagtgaggaaactgttacttcagtttctggtggtgaggaattggatgttgatatagttgaatctgatgaaaacaagacttccaccactgatgaggacccgaacgctactgaatactcaagctcattttccgacactgcatctgagaatgctgaaatgttgcttgatggactaaccggagaagctgaggtcgaatctcattattgggatgaaaccgatctaggtcctgcttatgattcttttagcagcatttttcattttaggtgtgttttctgcctaaatccttctcgtgttctttcttttctactgttcttgctgttctgtaattagttttctcttccgtgtgttttttctaggaagaaaaggctaactaaccactggaggagatttatcaggccactgatgtggcggtccaagtgggttgagttaagaattagagagttagagtctcgggcattagaatatccgaaagagcttgagttatatgatcaagaaaagcttgaagctaatattgatccatctgtgttggaaagttgtggtgaggggataaagtcattgcctttctctaatccgtgttacaaaaaaagagcagcaaagaagagaagaaagcgtaagaaggtcgagagcacagatgatatagcttcatatatggcatgtcacaacctcttttcttatatcggtaagagactaatgtacttgtaacattattaactccataactctgtctttgctttgagcatatcattcatatattgctgcggtttttgttacagagaccaagagattgagctcagatggaatgggattggctgatgactttggtggtatgttcaccaaaactgcaataatttctcatttttttcagactcttaatgtttttggtgtattgatatgttacttgggacagatgcaaaagatccacggagtgattcaaatgaaccggtagacttagatgacgctgactcactttttcatcaccgagatggagatagtgtcttagaagaagttctctggaaaatcgagctggtgcattcacaagttcatagattgaaaacccaagttgatgttgttttgtccaagaacacagcaaggttctcttcctcagagaatctgagccttcttgctgcaagttctgcacctagcccaacggtttctgctggaggaaatggagatgtgatctcctttggagcaatttacaatgcttcacagcatatggcagattatggtcttggtgatatagttttctcatccgaaggagtgatttcgagctatggggatgcgtttcatattcctgacattattgaaagcactgttggtcttttcgcagatgctgatgttacattacatcatcaccaaattggagattcttgtgaagatgtaagttctctttgatactttgagttatgtttcaacgtcttcttccatgttttctgattcaacttactgcagattttggataacatcttgattcgaaatggagtggctgaagaaatgaatggtgatttgatggaaactagttgccatgacgaagccgagaaagcagaggaaggagaaggaaccagtgtcccgccgttgcagcaaactgaagaaacagaagaatataaccaagaagagaaatctttggtactacaaggccgtgaagattcggttcttagatcatgcttagcctctgaaatgcttgttcctaggaacaaaaggacaagaggtggagaacgtaaggcaagttcttggtgcaagaaacatctcagcgatcctgaaagccagtgattgatgaaaaaaactcagtaagcttttgatgatcagagtctttcctctttgaatctcccttaaatcacagctactattttctacttcaatattttgtttctgaacattctcttagatttttctttatttctgcagaatctgtgtgttcacagagaacatttacttcttcttttttttcatatcattttcttctttagcttcttttccgttttatgatgatgaaaagttagagtgaagacacaaactgtgtataataaagctttagattgtagttctatcatcttcttcgtttcactattattaattctatttgatgatgaatatagagaacttatttactgtttcacgagtttttgcgatccaatatttgaataaatgtttggaacttatttattatattttcatgagatgaaaaagtatgaaggtggattctttgtgtagccttggtggcctctatcatgtgcccttggtgggtgataatcaaaaagtccctacctcaagtggaaattcatctgattctgatcatcccaacaaaaaaaaaaaaaaaaattaataatagaaaaagcttcaaatttcagctttactagttgcttgtttaaataattgttgggcattgaataaattagattaatttacaaaaccaacaagaccaatcataatgttgtagcagctttttggaggttcttggttcttgatataacaccacccacgatatcaaaattgagaaccatgattgtttatatactatctatttctcaattatctatgacttgtttgaagcaacttcatggaactcacaaaccttcttgcttgaatttctcacatcattataaccaaaactacaaaaggactttgcaaatatattatttgatggacatgcatatatacatcataatctcaaataaagataatggtttcattatgtgtaaatattagtatatatgtctaagctaataaatgcgctaactatgatgcatgcccataataatcatctttcaaaagaagatggtcccatgaggttaacatgattaatccagcacttaatcccttttttttgttctcatatattctatgtaatctctattgaatgaggatgagcattgagctcaagtaaagcttagctaggcagaactcaattatttcataagaatttattatattacaaagaaaaaatgtttatattatcaagcgacaaaataaataattgatttctatgttaagaacttatggtaattgtttttatgtcacaacttgaattactcctatataaaaacaattaccataactaaacaactaagattaaatgactaaacaattaccataactacacaaaataattgattactggtcattatgtgattttcacttttgtaatctaataactatacaaaatcatatattagacaacaaccattcagcttaagattaaatgaatataacatgtcaaatattgtgaatcaaggctcatatgaattttgatgagagaagactactccataaaggcttccacagaaagtggatcatgaggactatggtaattgcattaaaagcaccaattctcttcactttttctttacaattttttgaatctcttatctcactctcctctctctctctctccacaactacaagactcctatgactgttaaagcaagagagagaagagaaaacagcaactcttaaagaatgaaataaagaggaaaacaaaaaagctagtcaattgtttaactcacactctctcgccctctctctctctctccctctctcaaattctctaaaattggctttgagcagatgaaaagaatctccatcttcttctctatctcttggctatctctctctctaaactattcactcacacagtcattcttcgtcttcttctgtttcatgcaagattcaaaggcctcacctgcaaggtatgcatattaaattcactcctttagtcactgcttactcaattttggatttttgtttttgatgtgttaatacatattgcaaaacaaaaaactcacataattatgtaactgtctggggttttctcttaatagcaaattaaaaaaaaaaataccatatcacattctcaattattactaggaggggtcaaattcttataggtctatctatattattcaatcccatgttttttggaagttttgattccaaaacacatatgcagtcccagttcctttgatcataactaaatatttgaagtacttagaagttaaaagacattaagatagatcaatccagaggcatctttgttatcaatggtgatcaaatagactttgctatttaacccaaaaaaaaaaaaaaaaactgttaacttagtttgggcctattgggcttaatctcaaccgttctgcccaatattatcaattgttcgattctttttcttctttatcgttggttgatcctttaaaacggccataaatattactagatacgtatcgaatacaaaaaggacatgtaccataataaagatgctttggtttaaatgggattcatagatttcagattctttatttatgtataggttttatggatcatataacacaactgtctcaaataattactaatccataattggtaaataaataaaaatcctaaaacaaattaatatttagtttccttgttaaagtcaaaattaatagttttcttgtttcctttgatcctaaacccaaacttggaacctctaatcaccccatttttagaagttgaaagcaaattagctagcttctcccatttcaattctcttacgcgctttaacgaaagtgatgatgatgattcattttatgttaaatttttattagtactcaatcatcatcgatagaaaagagatgtgtgagtgtgacataaaaaaggttatggcaaacagaaaaccttggtaccagagagctatggcggttgccagattcgcaacgaattggagaacaatccctaaatcatcatcacaacaacaaccagagaattttcgtccgtctcgaaaccctagcgtcaacagcaagtcatccaatcataaccaaatttatcaccagctgagaaaatgctcgtctctcaaggtagctgcgaattctttcactagggtttgcctctgcgctccgattggtccatacgacgacgtttttcggattcacgtcccgccgagaagaagttcaagctatcctccgtcgaagcctcttcctatggagacggcagtggcggtggcgacggcgaggatgagtgtggattcagggaggaggatatttagagggaagtcgttgagggaaaacgcgttgatgaggagattcgtggtggcggaagaagaagcgataatggagaatagaaagagagatcaaatggagattgtgaggaagagaaatcagatgaggaggaagaagaagcttggacctagtcctcttagtcgtatggttatcgctgaagatcaagaagtttgtcttctttgaaactttttcatcaagatcagagaaacaaaaaaaaacattggaaagatttttttggttattgtaattgtgcttttatttatttttggattcagagataattaagcaaaatacgcagccgtttaatacctctttgtaaacggtgcccttcttgtttatttagttgttttccggagttttgaatgaaggatggagctaaagagaattaaaatggtttactaattttctttttggtttcgtttaatttgctacgcatacggcatactataccggtgattaaactattcaactgattaactttgttgatagtttagtattcatatctattaatggatgcttaagattgaagactggttggttctgcaatcgttctcttgatgatcagaaataaaataattaagacaattagacaatacactttatcaaaaaaaaaagacaaagacaatatatatatcatctacttccgttgtatgtggaatgttatacatttgattttttttttaaaaaaaattcaatgcatgtaagctagtctttatgatatattgacaattgcatgcatgcatctatatacgtatatacataatgaaagtaagtactatgtattcctcgtaattacataagaaaaaacatatcatgttacatgtttagttatagcttagcttgaaaggtattcaaaagctcggctggctctctgaaatatcatgtgatgttgttatacatactccagcatttcctcatgtcccctgtttataatttgtgtatccagatttctgtaactatataccattaacaaaaatctacaaacagatccgatatttaaaagttataaagatataatactttattcgaaagaaaaaaaaaaagttctaatacttatgttcaataattatatcatgatatcttggagatatagacttcgttgtggttcctttttcccaactagttaagtatattttttttgctaaacttggtaaatattataaaatgaaagttaaggtatgacataagcattacctagagctagggagagtcaccttggtaaaaaagaaaattaaaataaacaaggctacaataaatttacacttgtgaaaaattgctaactaagtaatttaagtgactaaatgtagaagaaaataatcatagttaatagaggacgtgaccatatttctcacgaatgcattcaaatgtacggaatgcactaaacaaaatgatgcttgcatgattacatatttacatctattgtcaggataaatatttgttaattgtatttatttattatatttttaattacgaatgtacaaactttttagtatatgtttcaacaattcaatggttttttgttgttgtttaaatcgtagtacattcaaaagtcaacaataaaatttaaagtgtattattgacgttctgctatattacaattacaaaaccacaccttttctttttgttgaagttatatttgaactcgtcatatggctgctgactgctgaatttttctatttccaccagttaattcatatgtcccatgtatctgtagttgatcgtataaaaagacacacgcacgcgactgaggtggcgtgtcagcagtatatgaagaagaaggaatgttgggaaggagacttgtcagttgtcactttgggttaattgttttattttttcaatcttcttgcttgaattgtattccaagctcatatcatttcattatttttcttacttcctttctaacatccacaccgtgatttctcttctttatattactgataaaactctaaaatatcaattacacttttatatgaaaacatcaatgtcaagctggttgagttttagttttgtaaatatatgtttagtactcatctttgggctaccagataatgacacaacttttcaatcctaattagtataactctattttcaaaaatttaaatagtacttaaaacaattataccccgcttaaacagaatttaactctattttcataaaaaattagaatttaattccagtacatatttcaaatatagttgatcactagttaacattttacataataatcttttacgtattttgaagatgtataatttcagcaggtttgaagtctttcactcataaaccctacttttcttttaaaaagtattatttcttaaatgcataattagttatgcgttaaaatactaaatttaaaattctggtactattattttaaaattttcgtaagtaaagcttgtgaatataaccgttgtcgagtgaaaataatttgatttttttaatgaaaaaaaaaaaaaaaaaaaaaaaagagggggacaaaattttgacttaactgacataagagatctagaaggtgaaaccacgcgcgtgtggtagtcagaaacgaccaaagaatcaacctcgtccttgataataaaattcttgagattggtcacaccaaaacaaaaaaaaaacgttttatcattgcttcttcaatagtatcaactgacgtaatcatgataagtctacgacaatatccctccaccaaacctaaccgttttggttcaacatttaacaattatgatgagtttaatttttttattggagactgttaccactcttagctttcattatctataacctaagtctggttaattcatgattatgtcaacagtttctttggtcgaattttgatatcgagtttggtttctaggttttagtttccttaaatgtttgtctttacaatgaagtaaagttaaaacaacattgagtgagaaagtggccaactaattctctctgtaccatcaatccaaaattaaattgatttgatttgattaatcaaaaaggtggtcagagaaaaacaaaagaaaaaaaggttttaaatttcttcccgtaccagctagacccagaatcaaagtagcatacttttgctacatattcaaagtaatttaacccccaaaaaccaaaaagaatgtgttagaaaagcaacaagaagaagaagaaagcaaattaatagacaaataatctttcttctctggttgcttctttttatttctttctctggaacagcttttctctgttactttacttctttgagaaactccataatcaaagaggtaagtgattcatgttgcttgtgattatcccaatggttttgttcttttaggttttcggaaataaataattattcttaattaccgagttgtgtataatttgtttttgttagtttctctgatctatcccttgtctaagttatcttttagggtagtttgttttcagggaacaatttttatcagtataatatagggaaaattttccaaacaaaatcgataataatactaatatctgcataaatacaattctagccagtatgtgttatgatcagtttacctaattgggttagaaagatggagttcgatttaagatatcttaaaagttcaaaaaaaaactttcctttttcatgaaaagctcaacaacttcaaaatctttgttttctggctgtttcctcttgtcttcgattgttcttgttctttggatttttttgttttaactttttttttgtctgaaactgctgtttcaatttggaatatgttgcaggagtttttgaggttgaagctgttcctccttggtaaaacagagcaattatgctaacttgcgccgtcttttcaaatcttgaccatcatcaaaatcatcagtaagctataaccatctgtttataaccatttgcttgaatcaagaaaaaaagtttatcttctgtttcttgttatgaacagttgaaaggaatgttcaagaaatggggaagaaaggaagttggttttctgcaatcaaaagggtgttcacaccacattccaaagagaagcagctaagcaacaacaacgtaagaaattcttttaaacactttcattttgttttataaactgaaatgataaattttgagattgaagtgtatatacattttggtgtttggttttgtgttttgaaagcaagaaccagagataaagagtgaaaacaaagaaaagaagaagaaaggttttggaaagaaactaaggaatggagaaaccaattcatttcttcccatttttagacagcctagtagtatcgaaaagatcttgtctgaagccgaacgagagcataaccttgtctttaggccaccaactcccactgatcgagcaaattcatcatcaacctctgttgcatctcctcttgttaggcctgcttctcctaaagtgccttctcaaagatatgtctcttctccaaaacccatttccccaagagttgcttaccctcaagtccattatccgaagcccccttctccaaagccgccttctccaagagcggtttcgcctaggattgtgcagcgacgtgagtttgtgcatagaccagagccaagtctattggtcaaaaatgcttatgcaattaagattcaagcagcttttagaggttacatggtaataatgtaaaacattcttgattctgttttgtcactattaatcaagcagtaaaattcataatttaggagatggaaatttgtttgcaggcaaggaggagtttcagagctttgaaaggtctagtcaggcttcaaggagtggtaagaggacacagcgtgaagcgtcaaacgatgaatgctatgaagtatatgcagcttttagtccgagtccaaacacaagtccagtcacgtcgcatccaaatgctcgaaaaccgagctaggaacgataaagatgacacgaaattagtctctagtcgtatggtaagtgctctcataaaacttagtgagaaaagaagatctctctcagttattcattttgacattaattattgttactttcctgcagtctgacgattgggacgatagcgtgctgacaaaagaagaaaaagatgtgaggcttcataggaagattgatgcaatgatcaaaagagaacggtccatggcctatgcttattctcaccaggtatgcaatcatgactcatctattcttcttcttactcaccataccaatgttatatatgcttgtttcctatgcagttatggaaaaacagtccaaagtctgctcaggacattagaacaagtgggttcccactttggtggaactgggtggaccggcagaagaatcaaaaccaaccgttcaggctaacaccaacacgaccgagcctgagccctcagcctcaatctagcaaccaaaaccatttcaggctcaacaacagtttcgacacgtcaacacccaattcatcaaaatccacattcgttactccatctagacccattcatactccgcaaccatacagtagcagcgtctcaagatactcacgaggaggaggacgagctacacaagattctccttttaaagatgatgatagcctcacaagctgtcctccattctcagctccaagctacatggctccaacagtctcagctaaagcaaaactaagagcaaacagcaatccaaaggagagaatggaccgtacaccggtcagcacaaacgagaagagacgaagttcgttccctcttggttcgttcaaatggaacaaagggtcattgttcatgagcaacaacagtaacaacaagggtccaggttcttcttcttctggtgctgtggtgcttgagaagcacaaaaccctcaaatccgttggaaatttgagtattgattctactgtttcgatgcctgcaacaattgggaggagggcttttaacagatttgcgtgatttgtttttcttctttttttctgtgaaaaaatctgacctttttttcccagttgattcttcattgatttgtttatcttacatcaattttatgagtgctgatgattttgagtgttgtttgtgttcttgattacgaattttacagatgtaacataataagaaaaagtaaacaacaaaaacagaggatttggattgtacagtatgatgttctgtttttctgcttgtaaatcccttatctgtcttttggcccaagtaacaaactttaaccttttcttttgggccagacttcaactataatacgttttgtaggctatattttttcttttaactagattcgaattggatggcttgggtatgcggtatcagtgattacttagctaaattcaaatcatcaagaaatgttcacatgatttcctgcaacatgtcaaaagtcagatcaacttagtttgataagttatgttccacgaaattatgtgaaaattgatttgttttcttctttagtttggtgctttcacactgttaatccacaaagccttgttgtaaatcttgaccaatggcctaaaagtcaaacctttgacttttcagtgtttcttctcaacactcaagagatggatgataatattcacagatgatcaaaatctttcacacaaacctaaaaaacacccaccaatgtctcgtgaacttattattctctgccaaccaattcttgttctgttccttactctgttttacaattctcatggctacttcgtctcacaaggatctgtaggaatcggcttcaacggttacttcactttaaccaacaccacaaaacacacattcggtcaagctttcgaaaacgagcacgttgaaatcaagaactcatcgacaggtgtcatctcatctttctcagtcaacttcttctttgcgatcgtccctgaacataaccagcaaggctcacacggtatgactttcgtcatctctcccacaagaggccttcccggagcttcctccgatcaatacctcggaatctttaacaaaacaaacaacggtaaagcctcgaataacgttatagctatcgagttagatattcataaagacgaagagtttggagatattgatgataatcatgttgggattaatattaacggtttgagatctgttgcctctgcttctgctggttactatgatgataaagatggaagctttaaaaaactttctttgatcagcagagaggtaatgaggctttccatcgtttatagtcaacctgatcaacagctcaatgttactttattccctgctgagatccctgttccgccactaaaaccgctcttgtctttgaaccgagatctctcgccgtatttgcttgagaaaatgtatcttggattcactgcatcgacggggtcagttggagcaattcattacttgatgggttggttagttaatggtgtaatcgagtatccgagattggagcttagtataccagtccttcctccatatccaaagaaaacatctaatagaacgaaaactgttttagccgtctgcttaacggtatctgtgtttgctgcgtttgtcgcttcgtggatcggtttcgtcttctatttgaggcataagaaggttaaagaggttcttgaagaatgggagattcaatatggacctcataggtttgcttataaggagcttttcaatgccacaaagggtttcaaggagaaacaacttcttggtaaaggaggctttggtcaagtctataaaggaacacttccgggttctgatgcagagatcgctgtgaagcggacttctcatgattcaagacaagggatgagcgagtttctagccgagatatcgaccattggtcgtctcagacatccaaatttagtcaggcttttaggatactgtaggcataaagagaatctctacttggtgtatgactatatgcctaatggaagccttgacaagtatctaaaccgtagcgagaatcaagaacggcttacttgggaacaacgtttcaggatcatcaaagatgttgcaactgctctactacacctgcatcaagaatgggtacaagtcatcattcatcgagatatcaaaccagctaatgttttaatcgacaatgaaatgaatgcgaggctcggggatttcggactggcgaaactgtatgatcagggattcgatcctgaaacatctaaagtagcgggaacattcggatatatcgcaccagagtttctaagaacaggaagagcaaccacaagcactgatgtttacgcctttgggttggtaatgcttgaagtagtgtgtggtagaaggataattgagagacgtgcagcagaaaatgaagaatatcttgtggattggatcttagagctttgggaaaatgggaaaattttcgatgcagcagaggaaagtatacgtcaagaacaaaacaggggacaagttgagcttgttttgaagctaggtgtgttgtgttcgcatcaagctgcatcgataagaccggctatgagtgtggtaatgaggattttgaatggagtttcacagctaccagataatcttcttgatgttgtaagggctgagaaatttagagaatggcctgagacatcaatggaattactactacttgatgtgaatacatcgagttcattggagttaaccgactcttcttttgtctcccacggccgctgaaattttaagtttaccactgattctttgtttgctatgaagatgtatcacaactgagattattacacattgtaatacacagccgaatgttttttttcctggtatgtacaagaataagaccacaccgcctcctccaaacatttttttaatccttttgtatttgataacaactcgattattaatcttgaaaatcaattctttttcttagagaccattgtccggtaaatcctatgaaattgaatggttaagaaatcttataatactatactgtttcctctttgatacgccaattcgttaggagtatctgcagaaattatccaaatagaagaacgtgatcaaacaaagctccgattatgtttctatggttcatgaattcaaagaaccctaaacagatgtgatatagatatttaatctactatttcaaaacctttttcgaatccaagttgctgtcaaaagtccaatctactgcctatacttttaacgttgcctgtccatacttatcaccaaagttgcaaaattcaaacctataaaataaacctaaagagatctttgaaacctatgaagacgatgaaaacaatcggaaaactaagaacattaaagatgtggatttgaaaaagaatgtagcgacttgttcgaggccaacaatcaagattagaaaacttgataggcacggagaatcgctatttgttgttgccaaccttcaaggcaacttacgccatttttattttgacgtcattgctctgcaaattggcttttatttaaaaatataattgaaataaattacttagatacacgataaaaaaaacactacaaagccatgaaagacctcctaaagaaaagaaactacgactttgaatcggacttgaagatgattgatagtgtccaagcctttacttatttatataggagaagcagaagcggctgcagaggaagaagaagaaaccctaatttcattgtttttatcaaagccacgaaatcgaaattaatgggccaaaaagcctacttttgattcaaaatgggcccagatccacaaagtagactaacgatgatgtaataaaatatgcgtgcaggtgaagaaagctataatagagtcacaacttggaaataagttttttagactctacgcatatatagaactttccggtagccagcttctccggaggaagcaacaccaacttggctacaatggcagcagcctcatccgccgtgtgagtcccctgaccaccggtcatagacgtacgagtgaaaccagggcataaacaattcacactcagttttttgccgtcgtaacgtcgagccaaaaccctagagtaagcgtttaaggccaactttgagatggcgtagtccggccagttctccggccatccttgcttctcccaagtcccgctcttcacgtcctgcagaaattgagtcaatgtcgcatcgatttgttcattggtaaggtcttcactttctaggattcgtcttatactagggcttctcagtttctgtatgccaagaaaacaaatccaaatgagtcaattatatatatgaagttagtgagtattattgattttgtattcagtataacagataaatatatgaagatctaataactggaacaaattttactaacattttatatatttatatctttgaatatatatatatatatatatatatatatatataaatgctttgacaacaaataaagaagatagatataaaaatgcttatacaactaagatataatgttgtaaaatcattatatcgttttgatattattggatttccgcaatatttgaatatgcaaagataatgtttttaaattaaattgtgtggatggaataaatgtgtgttttgttttctcgtttgccgacagtaggagaaagagattagcgtacatttaatgtgccaagccttgaactcatgttaaggatgcgactaacggagacggaacgccgaaacaacggcaaaagcgcctccgttaaaagcttggcaccgtagaaattggtcttgatgattgtctctggctctttgattaaattctcgcccaccgcgttaaatgaaacggcggcattgttcacctgagcatcacgtacgacgccgtagtaattccataagaaaaagtctcgaattagaaataaatatttgaaaaaaatactgcgtagaatagaatagaatgactttttattttgtctatcaagtatcaactaattcttttatcacaacaatttaaaaggtaatcaaattttctacgatccactggagtttggtcatattttatttagtagttgtggactaattgtctagtatgtacaatgtgtattcattgtaaatattttttaagaacatttatatcagtttgtaattaccagaatgtcgagtattcctaagttgcgaccgaaccaagaggcgaacgcggcgatggaagaaggatcggagatgtcgaggcagcaaaaatgaacgtttccaaagccaatgcggcggagggattcagcggcttggcttccattttcggcgtttcgggcagttaaaactacagttagtccaagctctaataacctcttcaccaccgcaaaacctatacctttgtttgctccggtcacgaccgctgttgtttcttccgaccaccacctccaataatcataacagtaatagaaagttagaaaccaagttaaattatttacaaatttatgtaagaagggagtttgcacacaaaacctatttgttggagaaagaggagggattagatgattcatttttttgtttttttttggaaagcaacaaggtgatgtgatatgtaatgatgctaacgaatacttgatgaggggattatatatatataattacatgatagggttatgtaaatggttctggatctgaacacatgcatattaattgatttataaatacataatatattgatgtgttcgtgtctgacggtgccacaaaacaataagaatataatatccaataactcgtgaataatgccgtaagcgtaaatgatgtaagttatcaaaccatacatcaacgtgacaacgtccatgggttcttataagttacaagttttgcatattcgacttttatttagttttctttctccacgtttaacgttttagaccacaaaaccaaattgatttttcttatagatttctgatattattgtgttttttttctttccttttgatgaaagaagttttggatgaacaaaagtgaaatgttttatgtctgtatatatatattgacccctaatttggtaatactactaggtatagccattcattttattgtatccaatgtcattaaggaatcttgaactaatttttttcccttttatatcgtaaacctttatgcactctcttttacaaatacgtgttattcacttatagtatttggcatttaatgaataacttcgacctataagcaaaagctattgaaacgtttctttggtgttagataattttggattcaaacatgtcccgtacctatcatgttttaataagtgcggatcagatccgaacgaaatatttagagtagttgagttgatatgaatgcatattattgcagtggtctagaagaaaatgggagtagattagtattgactaagagcctttagttaattgtttaatgctttgcatgcttcaattaagaaagcccattcagtttagacataacattatgtctacttggttttgtttaaacaattacttagtttgaaaacttcaaagttctttatgacatactccctccatttctatgtaaatattaaatgtatttaataatttttgatcaatcatataatacattatactccctctgttcctttttgtttgattgtttagaaaaaatacacatattaagaaaacatattaaatgttgattataaatgtattattttcagtgttttacaattttctatacctctaaaccaatgataattaactatttttcttgaaaaattacaattcaccaatactaaccaataaatattacatggaaaacttcaaaaatcaatcttttagaaacaaattttttttctaaacaatcaaacaaaaaggaatagagggagtagtttttattggttgcattcattctatttaatgatatttttataaaaaaagagaaaaattatatatttttttaatctgtttgtaacaactttaaacatcacttaaaaagaaacggaaggaatatatgagagttagtgagatttaggcatgtgcttgcttcatcattgggcttattaatttataaagtttaaatttatcaagcataatataatatgaagtcagctttgccgccacagttgatgcatggcctctaattattggagcattgtacgtgatataggtgttaatggagatggtttgtaggtctttatcaatacggaatctttatcttaccaagtcatttctaagtgttgcatctatgtataaactaatattggagacttcaacaaaaagtagtatatatatacatggtttgcacattgtgctatatatatgtttagatatataactcaaaaacacctttattgcttaacagtctttggtcggaggggggtttggtgaggaagacaatgaaaattattattattaagagaaaagggaatctttctggtttcaacacaaactaatctcccaaaaaaaataaaaaataaagctagcaatatttagaagacctaaaagagttaattagtgactttaatgtgaaactttttcataaaaaatgaatgcagcgatttgttggaggccaggattgcaaattgtttttaaacttcgaaagcaacaaagataaaacatcttagaaccctaaagtaaatccttgacgttagagaaacaagcttacttaaaatctaacttggagatgaaaataaagatttactgatttatgtaggaatacgaaaccctaatttcttgatttaaatcaaaatggaagataaatgtgcatcaaaactctgttttgtgtgtaagattcttcttacaggtttcatcttccatgggatataaaagaatttgtgaacgtcaatgtagcaaatgaattcacatcaagtagtatttccattgatgtctcaggacgtcctttcaatatctcatctcttactacatcaagaagattttctggaagctgcacaacaccattcaatatctgcataaccacactcatatccggtcttattgactcagattgatgtgaacacaacacacctagcttcaaaaccagctcaatctctcccctgttttgttcttgacgtatacattcctctgccgcatcgaaaatgttcccatttacccaaagctctaagatccaatccactagaacttcttcattttccgcttcacgtcgctcaatcaaccttctaccacaaacaacttcaagcataaccaacccaaaggcgaaaacatctgtgcttgtagttgctcttgttgaaagttaaacttgattttgaatcaagtttaattattggatcaattatccaataattaattatggccaaatccaagttctagagttttctctagaaatatcatcatttccacctccttaaaggattctagaaattttctagaatcatcttccacctccttaaacataaaaatctagatactctaatagaataatctagataatttgaataatgtaatctagatcttatgtaagaactctctagacttaagattaaaatattttagatattttgtagtttggaggctataaatacctcctccccctctcaaatgttgtaatgttgtgaagttgtattcaagtttaaagcaaagtaataaaagttctatttcctaaaaaactctctcaaaacacttaaacactttctccattacctctaaaagaattttactctaacaaagtggtatcagagcttgaagatcctaaagatggcgagtaacaatgttcccttccaagtcccggtgctcacaaagagcaactatgataattggagtctacgaatgaaggctatcctaggagcacatgacgtgtgggagatagtcgagaaaggtttcattgaaccggagaatgaaggtagtctttctcaaactcaaaaagatggtttgagagactcaagaaagagagacaagaaagctctctgtctaatctatcaaggattagatgaagatacgttcgagaaggtcgttgaagctacgtcggcgaaagaagcatgggagaagcttcgaacctcttacaaaggtgccgatcaagtcaagaaagtacgtcttcaaactctaagaggagaatttgaagcactacaaatgaaggaaggtgaactcgtctccgattacttctcaagagtgttgacggttactaataaccttaaaagaaacggagagaagctagatgatgtgagaatcatggagaaagttcttagatcattggatctaaaatttgagcatattgtcaccgtcattgaagaaacaaaagatttagaagctatgacaatagagcaacttcttgggtcattacaagcttatgaagaaaagaagaagaagaaagaagatatcgtcgaacaagtcctcaatatgcaaattacaaaagaagaaaacggccaaagttaccaaagaagaggtggtggtcaagttcgaggacgaggtcgtggtggatatggaaatggacgtggttggaggccacatgaagacaacacaaaccaaagaggtgaaaactcatcaagaggtcgtgggaaaggacacccaaaatcaagatacgataaatcaagtgtcaaatgctacaattgcgggaagtttggacattatgcttctgaatgtaaagctcctagcaacaaaaaatttaaggagaaggccaactacgttgaagaaaaaattcaagaagaagacatgttattaatggctagctacaagaaagatgaacaagaagagaatcataagtggtacctcgatagtggtgcaagtaatcacatgtgcgggagaaaaagtatgttcgcggagcttgatgaatcggtgagaggaaatgtggctttaggagatgaatcgaagatggaggtaaaaggtaaaggaaacattctcattcgattgaagaatggagatcatcaatttatttccaacgtttactatattccgagcatgaagacaaacatcttgagccttggacaactcttagagaaaggttatgatattagattaaaagataataacctttcaataagagacaaagaaagcaatctcattaccaaggtgccaatgtcgaaaaatagaatgtttgtcctcaacattcgaaatgacattgcacaatgtcttaagatgtgttacaaagaggagtcttggctatggcatcttcgattcggacatctaaattttggaggattggagttgctttcaaggaaggaaatggtgagagggctaccttgtataaatcatccaaatcaagtgtgtgaaggatgtctacttggaaaccaattcaaaatgagctttccaaaagagtcaagttcaagagcacaaaaaccgttggagctaatacacaccgatgtgtgtggtccgatcaagccgaaatcacttggtaaaagtaattacttccttctctttattgatgatttttcaagaaaaacatgggtatattttttgaaagaaaaatccgaggtgttcgaaattttcaaaaagtttaaagcccatgttgagaaggagagtggtcttgtgatcaaaaccatgagatccgacagtggaggagaatttacatccaaggagtttcttaagtattgtgaagacaacggcattcgaagacaattaacggtgccaagatcccctcaacaaaatggtgtagcggaaagaaagaatagaacaattcttgagatggcaaggagcatgctcaaaagtaagagactaccaaaagagttgtgggcggaagcggtcgcgtgtgcggtttatctattaaatcgatctccaacaaaaagtgtctccggaaaaacaccacaagaagcttggagcggaagaaagcccggtgtttctcatttaagagtctttggaagtattgctcatgctcatgtaccggatgagaagcggaacaaactagatgacaaaagtgagaagtatatcttcattggttatgataacaactccaaaggctacaagctctataatcccgatacgaagaagacaattattagtcgaaatatagtgttcgatgaagaaggagaatgggattggaactcaaatgaagaagattataacttctttccacattttgaagaagataagccggagccaacaagagaggagccaccaagtgaagagcctactacaccaccaacttcaccaacaagttctcaaatagaagaaagttcgagtgaaaggactccgcgttttagaagtatacaagagctctatgaggtaaccgaaaatcaagaaaaccttaccttattttgtttatttgcggagtgcgaacccatggatttccaagaagccattgaaaagaagacttggagaaatgccatggatgaagagatcaaatcaatacaaaagaatgacacatgggagttaacttcacttccaaatggacacaaggcaattggcgtgaagtgggtgtataaagcaaagaaaaactctaaaggagaagtggaaagatacaaagcaagattggttgcaaaaggttatagtcaaagagccggaattgactatgacgagatatttgctcccgttgctcgtctagaaacggttagactaatcatctcactagcggctcaaaacaagtggaagatacatcaaatggatgtcaagtcggccttcttaaatggagatcttgaagaagaagtttacattgagcaaccacaaggctacatagtcaaaggtgaagaagacaaagtcttgaggctaaaaaaggtgctttatggattaaaacaagccccaagagcttggaatactcgaattgacaagtatttcaaggagaaagatttcatcaagtgtccatatgagcatgcactctatatcaaaattcaaaaagaagatatattgatcgcatgcttatatgtagatgatttgatattcacgggtaacaatccaagcatgttcgaagaattcaagaaagagatgacgaaggagttcgagatgacggacattggattgatgtcttactatctcggaattgaagtaaaacaagaagacaatggaatattcataactcaagaaggctatgctaaggaggtacttaagaagttcaagatggatgactcaaatcccgtttgtacaccaatggaatgcggaatcaaactatcaaagaaagaagaaggggaaggagtggatccaactaacctttaagagcttggttggaagcttgagatacttaacatgcacaaggcccgatattttatatgcggtcggagttgttagtcgttacatggagcatccaacaacaactcatttcaaagcggcaaaaaggattcttcgctatatcaaaggtaccgtaaactttggcttacattattcaactactagtgattacaagcttgttgtatgccatgctatttggttaagaaacctcttgaaagagttaagcttaccacaagaggaaccaacgaagatctttgtggacaacaagtcggcaatagctttggcgaagaacccggtcttccatgatcgaagtaaacacattgacacacgctatcactacattagagagtgtgttagcaagaaggacgtgcaattagagtatgtgaagacacatgatcaagtagccgatatttttaccaagcctctcaagcgtgaagactttatcaagatgaggagtttgcttggagtagcaaaatcaagtttaagagggggtgttgaaagttaaacttgattttgaatcaagtttaattattggatcaattatccaataattaattatggccaaatccaagttctagagttttctctagaaatatcatcatttccacctccttaaaggattctagaaattttctagaatcatcttccacctccttaaacataaaaatctagatactctaatagaataatctagataatttgaataatgtaatctagatcttatgtaagaactctctagacttaggattaaaatattttagatattttgtagtttggaggctataaatacctcctccccctctcaaatgttgtaatgttgtgaagttgtattcaagtttaaagcaaagtaataaaagttctatttcctaaaaaactctctcaaaacacttaaacactttctccattacctctaaaagaattttactctaacagctcttcctgttcttagaaactctggtgcgatatacccgaatgttcctgcaactctcgatgtctgaggatcaaatccctgatcatacagcttcgccagtccgaaatccccgagcctcgcattcatgtcgtggtcgattagaacattagccggtttgatatctctatgaatgatgacttgaacccattcttgatgcaggtggagtagagcagatgcaacgtctttgatgatcttgaaacgttgttcccaagtgagccgttcttgattctcattcgtgttgctacggtttaaatacttgtcaaggcttccattaggcataaaatcataaactaagtagagattctctttatgcttacaatatcccaaaagcctgactagatttggatgtctgagacgaccaatggtcgatatctcggctagaaactcgctcatcccctgtcttgaatcatgagaagtccgtttgacagcgatctctgcatcggaacccggaagtgttcctttgtagacttgaccaaagcctcctttcccaagaagttgtttctctttgaaaccctttgtggcattgaaaagctccttataagaaaacctatgaggtccacattgaatctcccattcctcaagaacctccttaaccttcttatgcctcaaatagaagacgaaaccgattcctgaggcgagaaacacagcaaacaaggccagcgttaagcagaccgccaaaaccgtccttaatctgtcagacggtttcttcggatatggaggaagggtggggactcttccgaactccaacggttgatagactgcttcaggatatgtgtacaccagcaccatataatggagcgctctaatggatcccgtagatgctgtgaagccaatatgcatgtgtttcaaaacatactgcgagagatctcggtttaatgacaaaagtggtttgcgtggcggaacaagaaactcagcagggcataaggtaacatcgagctttgtatccggatgactataaacgatcgaaagccgcattaactttccgctgatcaaagaaagatttttgaaacttccatcattatcatcatagtaaccagcagaagcagaggcaacagatctcaagccattaatgttaatcccaacatggttatcatcaatatcttcaaactcttcgtctttatgtatatctaactctatagctatcacgtgattcgaagttttaccgttgtttgttttgttgaataatccgaggtactgatcggaggaagctccgggaaggcctcttgtaggagaaaaagcgaaagtcataccgtgagagccttgctgcttatgctcagggacaatagcgaagaagaagttgatggagaaagactggtccttcatttcaaatgttgtgttgtcaaaagcttgaccgtaggaatgcttcgtggtgttcgttaaaaccaagtaactattttcgttgaaaactgcagatccatccaggatatatgtgccatgggagttgtaagtaaatgaaaacagagtaagccactgaacaagaactatttgtaagactttgacttcactaaacatgttcttgttcgttttttttttttggcttatgggaaggttttgatcgtaatgtgatatttatcagaagaattatgtaagaagatacaacataaaaataagtaaaactgtatgaatatgatcaagccaatataatgtgaacgaaactggtcatgtcataaacatatgtagtttgtatttaattacccacatggcctagatgatcaaaccgcaacacaataaacaaataatcttctgatcatttttcaattaataatagcaattattgtgggattgtcagagtgtagaagcggacccatgttaggtttgcaaacctattttactactgaaattttgctatattggttatgagattatgacatcctatttgctttttgtattttttttcttctttttacaaaacattattgttaattattctcttgaatctcttcttatcgttccattaatgtgttgattagtcttaggacttaaactattgttattgttgctgtttacctattgctgttaattatttatctaatgaatattcatgttatatgcggccaacgaactaagataagtaagcaaacttaagagagaaaaaacacatgtacactatttagtaattacgcactgtgcatggccaagataaagtcgtaaatcaattataagaaaacaaatcttctaattcttgctaagattaaatagcgattatagtggaaagcataataagcaataatcaaaaaaacttttcttctcagatctctaccaaagaaataaaaaggtcaaaaaagcttctcttatcttttctacaacctaatccgtcgaacattacggagcgtagaaatggataaacaatgtaagtttaacaaccaacgtgttgaccataaaatgtaaaaaaaataagttttttgacatgttttaatgtaaagtttaacagattttgtattggtctacagaaaaaaaaaagttaattaagttataagtcattgctcttgaaaatttggttttataaacaaattcgaacaagattactttgaaagcaagaatgaaacaaacatattataaccctaaaagtaaaccctagaaatttagggatgaattggaaggcattcatgattcaaagatacagaaacatgtactcatttatcaaatagacggatacagaagctcccgatggaatataaatgtttgatcaaaactaacttatttttatggtttcagcgtccatgggacacaaaagaattcgtcaacgtcattgtaccaaaagaattcagatcaagaccaagtagtacttccattgatgtctcaggaattcctctcaatctctcagccctaacaacatcaagaagattattgggaagatgcgaaacgccattcaagatctgcaaaaccgcactcatgttcggtctaatcaattcagtgtgatgtgcacacaacagacctagcttcaaaacaagctcaatttctcctctgttttgttcttgacgaatactttcctcagctgcatcgaaaagtttcccactttcccaaagctctaaaatccaatcaacaagaaccgcttcattttctgctgcacgtctctcaatcaatcttctaccacaaacgacttcaagcataaccaacccaaaggcgtaaacatctgtgcttgtggttgctcttcctgttcttaagagctcaggtgcaatataacctaatgttcccgctactctagatgtctgaggatcaaatccctgatcatacagcttcgccaatccgaaatccccgagcctcgcattcatgccgtggtcgagtagaacattagccggttttatatctcgatgaacgatgacttgtacccattcttgatgcaggtgtagtagagcagttgcaacgtctttgatgatcttgaaacgttgttcccaagtaagccgttcttgattttcattcgtgttgctacgggttagacacctgtcaaggcttccattaggcataaagtcataaactaagtagagattctctttatgcttacaatatcccaaaagcctgactagatttggatgtctgagacgaccaatggtcgatatctcggctagaaattcgctcatcccttgtcttgaatcatgagaagtccgttttacagcgatctctgcatcggaacccggaagcattcctttgtagacttgaccaaagcctcctttcccaagaagttgtttctctttgaaaccctttgtggcattgaaaagctccttataagaaaacctatgaggtccattctgaatctcccattcttcaagaacctccttaaccttcttatgcctcacataaaagacaaaacctattccggaagcgactaatgcagtgaacacggccaacgttaagcagaccgctaaaatcctccgtgttctatcatacgacttctttggatatggaggaagggttgggattacgccaaggtcccatgctggatatataactccttcttcataggaaaattgcatcacataatagagtgctccgatcgacccggtcgatgccgtgaaacccaagtacgtctcctccaaaaaatagggcgagagatctcggttcaaagacaagagcgatttttgtggcggaacagagatttcagcaggtaataaagtaacattgagctgtttatcggtgtgactataaacgatggaaagcctcattacctttgtgctgatcaaagaaagctttttgaagtttccatcttcatcatcatagtaaccagcagaagcagaggcaacagatgtcaaaccattaatgttaatcccaacatgattatcatcaatatctccaaactcttcgtcttttcgtatatctaactcgatagctataacgttattcgaggctttaccgttgtttgtctcgttaaagattcccaggtattgatcgggggaagctccgggaaggcctcttgtaggagagaaaacgaaagccataccgtgtgaaccttgctgcttatgttcagggacgatcccgaagatgatgttgaatgagaaagatgagttcttgatgggaacgggagtgttgttgaaagctt

SEQ ID NO: 1094 - DNA, 109155 bp, Arabidopsis thaliana
aagcttgaatctttaggttttagtcacgtttacgaaatatatattagcttattagaagtgtggttttcatcattgggttgatctaatgctctaagctaattttgtttttgttgatgtggaacaggttcttcaaaacgatatcgatctgcttaacccacctgctgagcttgagaagaggaagcacaagctcaagcgtcttgtccagtctcccaattccttcttcatggtaatcaaaattttaaagctttctccttctcttgaaccctttagcaaataagtctctgtgattagaactgtatgttaatttggagtttaatgattttctcataatccctagctttgacagtgtgttatgtgatggcgatttttggatgtaagtttgagaatctatgtaactagtttcgagtttgtgaattgtatgtatgttttgagtttgtgaatttgatttgtatctgattctcatttactcttttatggactctgattgttgtttcttttcttgtatatcttactactgtaggatgtgaagtgccaaggctgcttcaacatgtaagttctgaaaacaatctctttctttttcgacattattacacatatatagaggaacataatcttatcgggttctgttttggtatcgcagcactactgttttcagtcactcgcagactgttgtggtgtgcggaaactgccagacaattctgtgccagcctacaggaggaaaggcaaagctcaccgaaggatgctctttcaggagaaagggtgattgattgaagcaatcatcaaaataatgaaggctgttttctttttcttttttttttgttgttgttggctatgatgttatctctggaattttaaaatgtttggatttttaatataagtaagcagagtttgctcttttacttttgagattatccccaagtctaaaatagtttactgcttgcttgcatctaatccatttggtatctcaaaatactcactttgattggttgtttgtactttatatttcgtcaaaaaaaagtaattaaagaagttaagaactaaatgttggtacgtttgtgtttgaactttgaagcaaccgttatgcaagttttttatcaagctggtcgccaagctcccaatcgttatggatcccaaacgttgttttaaaacactgaagaacgaggttgttgctagaagaccaaagacatatgagagtaaaaaagcctttcatgaacatttcagggctttctttgatcaaattggtaacgaatccatgaaagcaaatccttcagtgtcaactattaatatttgaaacaaccaatggtaaaggaggactgaaaactggttggtattaaaaaagagacaagcttatgatgatatctgattcaatcggtaagcttcctgaaagagcatcctactgtgagcttggccttgcctcctgtaggttggcacagaacgttctgacactttccgcataccacgactgtctgtgagtgactgaaaatagttgtgctgcagtaaaagaacaaagcccataataagttttaagtttcttaatttatcttatgtaacaggaaaatattgatttcaaatcttacatgttgatacagtcagagcacctaacaagctacagtaaaattaaacaaaaatcagagtccacagaaagagtagataaacttcatacaagtaaattagaatccgattaaaaaacttgaagtattacagtttctaaacagagagatttggtttttacaggattctaaataaggagaaaggtttcaaagttttattaccatgaaataggaatttggtgatggaacaagacgcttgagcttatgcttcctcttctcaagctcagccggaggattaagcagatcgatatcgttttgaagaacctgttccatatcaacaaataataacaattaactttgcatctcatcagtactcaaatcaaatgacacaaccacacttctaattagcttacttcccatctcgttaccgtgattaaaacccttataacaaaatcaaatcaggagatgtaaatggagagcatccagtgcaagagatctaaccatcttcgcaagactctcaagagacgacggcgaaagctagcaagcaacggcaacaattcgcgagagaggtttttataattactcactgccggttgtgaacaaacgaggatgggaatatattaggtttacttagttacttggagaccaattaatctgaaaatcttctagaatgggcctagagcatctacatagttaagaaaacacaacaaatttgacctttcagtcaaagtagaggctttatttacattctctttttttttttttttttttttttcttttttttttgaacacgaatttacattctctttttatccataaataaacaaacaaaaaacatcctaaatttgtctagttttttttttttttttttttttaactttttcttatgtaagtcttgtttccaaacatttttcagtatgtagagagaatttcaataatatactaatactacatccataaggcacactgcattaaagcaaccatgaggtgaatctgattctggtagctaagattcataacatcaaaactcctcaattacgaatgatgtggttgcaaatataaactcaaagtaataacaatgagccagagattacaaaggtttgtggaatgttcatcacaagtagttggaaacgatcaaaatgatcaaggctctgctatttcaatattcatccaccgtgcagagtcgaaatgaaaactataacatctttatcttctaatgttgtatcgagctgaccactaagttcccaatcgcagtcattaaccagcacgagaactccaggcctcctgcgtttatgaattccaaaccaccattgttattaaacactaaaaacagagttcttgctggaaatcaaggaaagaaaagagagaagctttacacggtatcgcctttcatgaacatttcaggcctttccttgatcaaattggtacgaacccatgaaagcaaatccttcattgtcaactgtactgaatgaaacaccagtgagaagttttacatgactataataaactcaatggtatttaaaaatcatcaaaagagagaagcttacgatatcagaatcattgagtaagttgatgttaactttatgaatctttacggagtcacagagcaattctaaacctccactgcaggagatcaacaagcacatattttcatgttaataccaatacgaaactctcattcactaccaattgatctgatgatgaccggaatgtaaaaagtctaaagtcatttatgattttcccaatccaaaaatcattactttattagcactgaataagcaaaacaaagataggcttatgctacaaactgtgcattataatatcccaagcaaatagagaaaccataatctaaagcactaagttttcagttttttcccgaccaataaacaggcattgacatttgagagtcaatcaaatgaaatcaaaatataaaccactatgagagtgggcaaatgacacaaacgagtaatagtgtacccgaactcaagagtaaattgcatcttcaatgaagttttgcggtaacaaaacccttcttcttctttttcttcttctccgattctctccgataggatctccgctttgagttcacgcaaaactccatacgacgtcgttttcgttttcttggtttgggcccttaaagttaggcaacatgatcaccaaatatcaaagcccttcttaaaaatacccaaacgcttattgaaacagaatcacaacagtttgttttcttaggcaagaatcaaaacagtagacattctccggcgtgtgacattcaacacgtggagatagcgcacgagaacgagatctttccgcgtcatcatttaaaccgtagatatcacatagaagaataaaagtttccgccacgattccgccgaataaaaaaagaccatataattcgacagttttcaattgtggctatatctcatgtgacattcaacacgtggagatagtacaagaacgagatctttccgcgtcatcatttaaaccgtagatatcacatagaagaatgaaagtttccgccacaaatccgccgaataaaaaaagaccatataattcgacagttttcaattgtggctatatctcatgtgacatttaacacgtggagatagcacgagaacgagatctttccgcgtcatcatttaaaccgtagatatcacatagaagaatgaaaatttccgccacgaatccgccgaataaaaaaagaccatataattcgacagttttcaattaatacccaaagtgtaccgaaaatatttttacccattttgagtgtcagctatttttttgaacattttgtttgtagtttgagtgttttctaacgttcgtttggtgttttttggtcaagattggtgttgactagtttcgactagttgtttggtattttttactcaatcgcaattttgagtttctttcactagcgctcgtttgttatttttgttggttttattcgctttgagtgtttagactagcgattgtttggtattttttaatcaatagaacttttgagtgttttttgactagcgattgtttattgttatttttgtgttttcctctctacgttcactctctgtgcccgtgttcaccctatacatatatgcatatgagacacgttcacgccttgcgtaagcacattcactccctatcatacatctattatggatatatgcatgagacagtcacaccctatcattcatctattatgcatatgagacacattcatgccgcacattcatacatctattatggatttatgcatgagacattcacaccctatacatctatacatccttcataaacaaaaatacacatattgcatatacacagccgtgttaacaacttcaaaaggctggccagtggccaagcgcttcaatggggaaactctcggacacacacagtcacttgtccaccctctgcaaaatcaatagaaatcttcaatacaatttttttctctactagtcaacaatttcggtacatgcataagtacgtttcttacaaaaaaaaaaaagaggaaaattctctcttggttttcacaacaattataaacccattctacgttttcttagacataacatataaacaactcataaaaccatcacacataaaattaatctcacatcaatgaagtcatcaagtcaatatactggatgtacaattaacgaacaaacatatataactaaaaatcagttttattaaagacgtacatatatatatatatatatatctaaaaccagtttacgatcagagacacatcattagagtcaagatataaaagggatttaaaacgtttgttgaactccataatttttttttgaaaattgacgaacaaggttattaacagagactgacaacaatcttttaatagtaaacaaactatagattatttacctgtaagatgttgcctttatgtttgcttgagagactttgagtgacaacacaagtgtgaggacggaacacaagtcggcgaacagaactaagatgataaaaacagagtgtatttaacatttgtaagaaaaagaacaaaagaacgagtaagagaattcagatcatctgtccgaagaaagtagtacttatagagtccattatcttaatttttctattaaaaataataattcaaacagtcataaaatgttaccgtttcacaacgttcgtttattcctaatctcaaggcagactcgtgtaagaataagagtccattatcttaattattttcattaaaaatatctaattcaaacggtcaaattaaaatgtagaaaaagttttcaatttaaaatatttattcaaaaatgttaccgttccgcagcgttgatattttcctactctcatcaagtcaaataaaaaaaaacgtttaaataaattgggaactcgtaaagtaaacagtaaacacatccaagtaaatgtaatttaattaatttttctgctatcaatcttttgaattattcaagtaattatataattattcttcacgactactactgctgctgctactactactactactatttgaaaggcatcatctacttaattatggtcttccactgcattcattgatgatttatgttgtctaaatttccataattcctttttaattcttcgattctttttttattcttctttttatgtttgtgtgtgcttctctgatatgttaataccagtttcaagtctactagtagaaagtaaattcgattgatatcgttcattaacaacaacacatactacactattaccaatatgaaacggttgagttcttttctatttgttctttaggacggttaacaaaaaaatccactaatcgcaaaaaaattagtggtacatacttatcccatatataacctccaaacaataaatcaacgagaactctaacaaataattgaaattaaagaaaagagtatgtcttgtgaaaaaaaaaaagaaaaaaaaaaaaaaaaagagtatgtcccgatagtaaatgacctaaacgcttcgtcgtgactcaatgagtccaaaccaagacaacgaaacccatcattggacaaagttggtctcagcatcacttcttgcattactctttgtcaccgaagatccttcaccttgctcatagtgttgttgaaacctacatatgtatcatattcatattatatatgtatccaataaggccaaatttattcataaaaccatgacttgtatttcatcagtagagaagcaaaaatatcgattattacgtacccaatctgtaaaaaatatccaaggttgcaatccgatatataattttgatgagttgattgcaaggaaaaatcagtggaacaaccggcggtgagcaccgggttaagcagtaggtcttgaaagcctttaaaatcatgatcttctgtctcaagctgattatgaagattatccattttataagatttatgagtagacaatacactaattaactaacacaaaatcatagtaactaagaaagacttgatatataatttggatgtccagttaaaaacattaacctttagcttattgtttatatctccgagctccctctcctgccattccaaatacaaaaatgatatacacatgagtacatttacatacaatgcatgcatatattgtagaacatcatttcgagtacttgcctttctccgaagctcttccatttgttccatcataacctgcgtctatatacatacatgcatataaagatatacatttcaataatgtattttgcaggtctaaatgatgcgcaagaaaaattggtctacgtatgaaatatgtcatgccttttgttttcgggttgcggaaagagctccttcaagctgtctctccagcgtctgcaattcctttatactcatcccttcaagatcttccccaaccaaattcctttttcaacgattcaaaacgattattagtagcagaaattaggaaatgtacaattataggaagtaatggattacgaggagtacgattagttaaacctatgagtgcgaagaagagattcgtatttgcatttgagctttgtcacctcttgacgcaagccctgcaccaaaaagcagaagattaactacaatttatcttagctctatttattttatacatcgttataatataatagttagtttgactatgtatacacttagaatgaacaaaggtcaaatttcgtatatatataaagataaaatgaacatacttaagaaaaaaaatgattgacctgagtatcttcaagcgtatcattgtccaaaagattgtctttacagcgatagtacctctcaatggttctgccaactctacagtttataaaacaaaagaaaccacaagatattttaattaataatctgaatttgcttaaattcaaaaccaaagaacgaaaaccttaagttctgtgttaacttttaatgcatgtctaaaggaaattctaattacacaaaaatctctgggaagatatatctgcgtaatggattatagatctacggctacccatgataaaccctaattaatttctctaattagaattagaaagacatatctatttaaagaggcaaaacgtatatatgaggtttcatggatcttaaggacatacacatatcaaagctggtgataacaattaaaacccaaaataaaacaaagaagttttctttcaaaagatttaccggatctaaaagctaaactgacccatatgtccgatggatcctgagagatcgatggatggtgatcaaccttaactagttagggttagaataaaaagacataacctttttcagatacccacaagacagaatttggtttcttgatcttaagaacagacacaaatcaaacatggatgatcttaatcatattacccatgaaaacctaggttttcatcattaggaaaaccgaattaatgatcttgaatgaatggatatacgtacccgacattgctgaactcgtagagcttgccaccggtggagaagattatgagagaaacctctgcatcacaaagaacagagagttcgtaggctttcttgagcaaaccactttttcttttggagaaggttacttgtctagtgatcttgttctcaattctcttcacttccactttgcctcttcccatctctcactcgctctctctcttctttctacgttgtttcttgtctttaatatctctcaatgttggaagtttacatgtacatatcaatcaaaatgaattactttagttctattgctggatatacgtaaaaaaaaaaagcgtatttattaaccctatagtttctctttttcttatcaacctatttcaaccctacatacatagtggaaccgagttttatctcaataggacaatatctcatcataaattacaaagttctcatttcaattaccatgcaagaagaattcactttccgtttattaattatagctagagtgtaaaatggtaatgatcttactgttgtttgacccaaatgaaaattcttttggtatataaaaaattaattgataggaacaaaacgaaaactttctcctacctagaattagaagtatggaaatacagttggaccactggaaaaatcatcattatttcttttaatatcagtatttgatgacatattgttcaaagttcaaactggcactcaagaaaaattgatattcttttttgatatgcaacagttggaccaaacctttttacttaataaagtttacatctattgtgattcttcaaactaacacttatataaaactgttttttttttgttcaatggctatgatttcgtcaaggttaatttgtacatgtaaacaattaaacgttcatccactaaatgttgttcaacctgaaccgatgtggagtcagtaaaaaacatataagacatcgaccctaatgacaaaaaacagagtgtaactatattacgtgtgtgaagtttattactagttcgggaagttttaattggtcaaaaggcgcaggaaggttcatcatttgttgttgaaaagttgcattccttttcaaaagaaaaaaaagtaaggtttttatgaaaaagcctttcaagagaaaacaaattttggttatatcttatttatatggtttgacaactgaatcaaacatttaccaaggttgtatttgatcattattactaaaaataaaatcagctaaaaaaaaaccattactaggtctagttacagtgttacactgtattgtaaatcatttagtaataaaccaaacaaattactatcatcatttttaatttgtgtagtcattacatacatgcaaaattgtaaattaaattataaaatcatgccatactatactgctagatgaaaattgaattgtcatatcaaattaaaaattaatgtattttcatgaaaactggaaaaaaaaaactattaaattagaaaggcgaaattcaacgtgacgcatctatctatataggcttgggcttataatatatacaaaagcccagttaattattaatgggtcgaagtcgaaacttgaaagcaagcagtgtcatcgttctatttatcatcagcccaaaaaaggaagaaaaaacaaatcaattttatgttcgtttggtataatatcgattttaattttaaccaagtaaaccggataggaggagattcgtaaattgtaatcgataaaagagatctgtgtcaaaagtacgcgtgaggttctctcttctctgcaaacaaaaatcctggcgttgatagcgattggttaattgtcggtgaatcaacgtttttctgttacacatatcaatcaatcatcatcctcttcatactctcttcttcttcttcatcgtaatcattagcttcaattccgagttttctcttcgtcgccgttgtgctagagttttgtcagatctcgccgggaaattagcaatggcgttttagtctgtttacctgtgaagcttttgcgtaaacgctggattcttctcaaatctctctcacctgatctcttattagattccgagtatgatttgtttctctccttcattatattcgggttgcttccacgatttcgttgcttgatttagttttttttttgaatttgatagggatggcgctaaagcgagggctatctggagttaaccggattagaggaagtggtggtggatctcgatctgtgcttgtgcttctcatatttttctgtgtttttgcacctctttgcttctttgttggccgaggagtgtatatcgattcctcaaatggtatgcatatattgcttatctttctatatactaatttgcagattcatgtatagagattcagaaattctattaatgattgagaacattagcatagttttaccactctttagttttcagcctttactatctcaattttaagttacttttagcttgatgtgacactgatgatattcagacaattgctatttttctagactggcaaaattggttctttgctattttactatcgagctttggtttcaaggattagtgtctctcgattttgtgttacatatataatttatctgcgaattgtccatctgatggagcttactttcattactgcagattattcaattgtttctgtgaagcaggtatgtcggcttaaactctatcaaattatctacttgtatgttttgacagaagtaagaatgttgtttgattggactgtttttttttgttttttttggcagaatcttgactggagagaacgtttagcaatgcaatctgttagatctcttttctcgaaagaggtagtttaaatctttgaaactttgcttcgatttattgtctttgtcagtttttctgagactggatagtttcttactaaatttgttgtccagatactagatgttatagcaaccagcacagctgatttgggtcctcttagccttgattcttttaagaaaaacaatttgtctgcatcatggcggggaaccggagtagacccctcctttagacattctgaggtgtggtttaagtgtctcatttcttttctaagcttctattctcaatgatgttttctcatagttttcatcttttgctgtacttgaggcagaatccagcaactcctgatgtcaaatctaataacctgaatgaaaaacgtgacagcatttcaaaaggtagtggcttttaatttaagtggcatctctgatttgacgttttccatctctgattcttctatatattgctgatgcagatagtatccatcagaaagttgagacacctacaaagattcacagaagggtaactattatttattaaagttcaatgtcatgatgcatcaaatactctttagggacttcttgtgtctttagtatttcattatcaacattttttttatccatcttgacatttcagcaactaagagagaaaaggcgtgagatgcgggcaaatgagttagttcagcacaatgatgacacgattttgaaactcgaaaatgctgccattgaacgctctaagtctgttgattctgcagtccttggtaaatacagtatttggagaagagaaaatgagaatgacaactctgattcaaatatacgcttgatgcgggatcaagtaataatggctagagtctatagtgggattgcaaaattgaaaaacaagaacgatttgttacaagaactccaggcccgacttaaggacagccaacgggttttgggggaagcaacatctgatgctgatcttcctcggaggtaaattactccttttggtttctactacttgccttttttcgactgcttgtgtacttcttaaagtaacatgctctctaaattacttttcatatagtgcgcatgagaaactcagagccatgggtcaagtcttggctaaagctaagatgcagttatatgactgcaagctggttactggaaagctgagagcaatgcttcagactgccgacgaacaagtgaggagcttaaagaagcagagtacttttctggctcagttagcagcaaaaaccattccaaatcctatccattgcctatcaatgcgcttgactatcgattactatcttctgtctccggagaaaagaaaattccctcggagtgaaaacctagaaaaccctaatctttatcattatgccctcttttccgacaatgtattagctgcatcagtagttgttaactcaaccatcatgaatgccaaggtaaaatcattagctcttatcacttgattcgtcctaatatctgtatgtttaattttagatacgcattgcagagctgaaattaaaaatgtctttattccctatatgtgcaggatccttctaagcatgtttttcaccttgtcacggataaactcaatttcggagcaatgaacatgtggttcctcctaaacccacccggaaaggcaaccatacatgtggaaaacgtcgatgagtttaagtggctcaattcatcttactgtcctgtccttcgtcagcttgaatctgcagcaatgagagagtactattttaaagcagaccatccaacttcaggctcttcgaatctaaaatacagaaacccaaagtatctatccatgttgaatcacttgagattctacctccctgaggtttatcccaagctgaacaaaatcctcttcctggacgatgacatcattgttcagaaagacttgactccactctgggaagttaacctgaacggcaaagtcaacggtgcagtcgaaacctgtggggaaagtttccacagattcgacaagtatctcaacttttcgaatcctcacattgcgaggaacttcaatccaaatgcttgtggatgggcttatggaatgaacatgttcgacctaaaggaatggaagaagagagacatcactggtatataccacaagtggcaaaacatggtaaataactctttaattctttgcaacaaatagtctaatgatggtttattattttatttattgtggtttgctcattttggcttgtgttgtttagaatgagaacaggacactatggaagctagggacattgccaccaggattaataacattctacggattaacacatcccttaaacaaggcgtggcatgtgctgggacttggatataacccgagtatcgacaagaaggacattgagaatgcagcagtggttcactataacgggaacatgaaaccatggttggagttggcaatgtccaaatatcggccgtattggaccaagtacatcaagtttgatcacccatatcttcgtcgttgcaaccttcatgaataaaatcaaatctttgttagatgatttgaggtaattacttctaatgttctgttgttcccattccattgctctttattccacacattgttaattgtttattcatatcgttttttagtcattcttttcttctcttcttctttcgggttaaaaacacttatgttattttttgagtttttctaatgatagtaatatgtttctggagattctcttgatggtcttgtgaaaaaattgaagaacacatactatctctctatttactatatactgtaagtcaaaataataatccaattttttgttgatgtgtcattaataaataaataactatcattaataattggattggttacacattttaaattttatttatgtttggatatccaatttttttttttccattgctaatttaattgttatcattatgatgttcatattcttttcttgtattggatcatattgtatatctttattttccaattgtaaatattcaaaataatatattttcttggaaaaaaatctattgtggtttctctttttttatataagcaactatttaatggtaatatgacatataataataatttaaaaaattagatagtatttagattttagactattagtggaaaattttacaaaataaataaatcccaactatgatagaaacccaaattgagtgaaaatagaagatgggctttaaatcggaccgacgcttattgcttactaatacaaatcgcccttccttaaggtctgaagacgaaacgaagaacaaacactgaaacaaaagagaaaaatcccaaagctagaaaccctaatcccaaacgaatcaatggagcgagacgaagaagcgagtggaccgatgatggagatgtgcactaacggcggcgaagagacgtctaatcgaagacctatcataagtggcgaaccgctcgacatcgaggcctacgcggctctctacaaaggtcgcacgaagatcatgcggcttctcttcatcgctaaccactgcggaggaaaccacgcgcttcagtttgacgcgttgaggatggcttacgatgagatcaaaaagggtgagaatacgcagttgttcagagaagtggtcaataagattggcaacaggcttggggaaaagtatgggatggatcttgcttggtgtgaggccgtcgatcgtcgtgctgaacagaagaaagtaaagctggagaatgagctcagttcttatcgggtaattacatttttgacctaattttcattatctctattccttgcttattgactctctactaggatttggtgatgctttttctcaagtaggttcttagagaatcaagtatgtagtgttgtttgtgttacttactgtgcgtatagctcgttacactggcttgcttgattctgtaattgcattaatgttgatttatctccttgatatgagtatacagccaaatctgctctattgactctttactgctgattttgatgatgttctttctcaattaattgcttaaagagtgaagtatgtggtgctgtttatgtgttgctcagtgtgtgcttagctcttttctagtttatcacttgcttgaataattgcatcattgttgatgcatcttcttggtatgagtatacgaccaaatctgatcaaggaaagcatcataattggctctcatggttagctgtataatgttaactctctgtttaataattaatttcttagagactgaagtatgtgctgttctttttgtgttgttcagcgtgtgcattatgcatagctctttcatggtaatagcttgcttgattcttaaattgcattaatgttgattcttcttcttgatatgtgtattgatatgtgtatacagacaaatttgatcaaggaaagcatcagaatgggttacaatgactttggagatttctattacgcatgtggtatgctcggagatgctttcaagaactatatccgaacacgcgactactgcactacgacaaagcacatcattcacatgtgtatgaatgcgattcttgtcagcatcgaaatgggtcagtttactcatgttacaagctatgtgaacaaggcagagcagaatcctgaaacccttgaacctatggttaatgcaaaactgcgatgtgcatctggattggctcatttggagttgaagaagtacaagctagctgctcgtaaggtctgttgttttcccatatttgctcatgtgtttatggatcctattcatatcctaactgaaatctaatcattgaacttgaatattgtcttgtgcagttcttagatgttaacccagaacttggaaattcctataatgaagtcattgctcctcaagatattgccacctatggtggactctgtgccctggcaagctttgatcgatcagaattgaaggcatgtatcctatttagcatttcttttaactctgccatttttctccaacacttggtctataacttagtctaattttgcagcaaaaagtcattgacaatatcaacttccggaatttcttggagctagtgcctgatgtgagggaacttatcaacgatttctattcaaggttgcatattcttaccaagactctcgtctatttcttgcatagcaccaaattactaaccttgaactaaggattattagtgtgaatacccactaagaccagatttacccaacgaagtccctcataattattatgtcccttgaatccactatttattctaatcactgactctgataaactgaagtagctgttgtgacgttagactctaatcctgtatcgattatgaaggcttccaatgttgccctccaaattcttatctatgttaacaatgcgtaagacatgcaaactcgacccttttagactgtattctcgttgaatctaattattaagtttgcttgttgcagccgctatgcttcctgcctggaatatcttgcaagtctcaaatcgaatctgctgctggacatccatcttcatgatcacgttgacacactatatgatcagataaggaagaaggcactgatccagtacacattgccatttgtctctgttgatttgagcaggatggccgatgcattcaagactagcgtctctggtctagagaaagaacttgaagccttgatcacagacaaccagattcaggtccgtagtgtttcccgaaataactttgttttatgttactgtcattttaaaaaccttaatagaggcaaaatcttttttccatcccggacaggcaaggattgattcacacaacaaaatcctctatgcaagacacgcggatcagaggaatgcaactttccaaaaggtacttcagatgggaaacgaattcgatagagatgtcagggcgatgctgttaagagccaacctcctgaaacatgagtatcatgccagatcggcaaggaaactttgatgacatctgctttgctaaactgagaggtaatggcctattccaagatcataagatatctgttaaaatttaatttggtttagttactggttagctttctatctgaccttctctgttctctagttatcgctttgttttgtcaacttttagtttaagattctttgaattatctatggactttgaatgaaatcccgagtgtgaatctatagacgcatgaatcacactgaaagtgaaatggtcaaagagtacagacataagtacacacacttggtttcatgggccgatatgatttatgatctttgtatgcatgtgggtggtgggatcaaaaatctcatctcccaactaatatccatttcattttgtcaactaaacgtcgtatattatatgatagtttgtggctttgtgcacagttgtcactctatagttgaagacttttttttttcttatctacaagaaataataatcaaaacggttaggtcttttttttataagtagaatctcgaaaattgcaaaaccaagatttgatgtcggcaaacgcatcatgtagactaagtgtgaacttttgattttcttgtgtcaaagaacttttgatattaatcactcgatagctacgtttcatcattattagtttcttctatagaatttttatcactgaatgggatagttcacattatctggtactattatttttactattgcaagtagttcttttctatgcatttctttgaagttgttctctttgtagtttgaggtatcttatatatatatatttctatatgtttgtgtttgccaggaatattcaagggtgttttttcaagattcgaaccaaacgagaaattgggcaagattacttttttgtaagaaccaagtgtttcaatgagtcgatgacatttagagtaagtaaaggttttattctaagatggacagtccattattaatcaactattgaatgatattgccttttaaatgagtcttaggtagcatcgcaataactccatgtttactcaaaactcacaaaccatgaagttaagaatccgccaaatttggaagatgggccaactctaaatttactcaccccaatactccatttattttgggttgcattgatgaaagtaatttgtataattgataggttgtgtatcaaaaaccggatctcattatttgtgatctttgcattagttatttttggagactaataaccatctttctaaactgtgagtaatacaaatataaacaacttcttgttcgctatggaaaataaaacataactctttaggtacgattcacgatgcaaaaacaatagtcatcgtgaataaacatgtccgaaatacatgaattaacaaatgaaacgctcaacaaatgaattgacaaatgaaacgctcaacaaacgaagaatctcacatcccatgatgaaattgggatttacaaataaaaagtagcacaagaagaagggggtagaacagtaattttaaaagaaagacagcgttgattcaccacttgaagtggacttttatagcaaaaagagttgagtaacgtcaaaagagtcaaacccaacttttcaaaggttgtgtaaggctttccatgactccacatcttcttcttttccctttttatccttttctcttctctctcttttattttttcttttgaagtaaattaatttcacgaaacaaatcagagaaccttttatatcttcctttttcgtcgttactatcgtcctttacctttttcatttactgttctctctctctctctatctctatctctatcttctattcatggacatgcaccgaagcgacaaagcttagggcttttctctcatccatggcggatttcttctatcttcattaaatatttccctctttattaaaatctcatgaatttcaacggttttctcgacgacggtgctggagcctcaaagctactctctgatgctccgtacaacaaccacttctctttctccgccgtagacaccatgctcggaagcgccgccattgctccttctcagtctcttcctttctcttcttcaggcctctctctcggactcgtaagctcactatctcctcttttaatcttcgatttcttcttcttctactacttatgataatctctgtaaatttggcagcaaacaaatggagaaatgagtagaaacggagagattatggagtcaaacgtaagtcgtaagagtagtagaggagaagatgtagaaagcagatctgaaagtgataacgctgaagctgtctccggtgacgatttagatacctccgatagacctttaaagaagaagaaacgttaccatcgtcacactcctaaacaaattcaagacctcgaatcgtaaactcactatacacaaaatctccatttacacttctacgaatcgttttgatttttgattttgatgaatcctccatttttagggtttttaaagagtgtgcacatccagacgagaagcaacgtcttgatcttagccgtcgacttaacttagatcctcgtcaagtcaagttctggttccagaatcgtcgtactcagatgaaggtttttagcttcgaatcgctaatctttgttttctggtttctttgttttgatttttgatttgtttttacagactcaaatcgaacgacatgagaatgctttgttgaggcaagagaacgataagcttcgagctgagaatatgtctgtacgcgaagctatgagaaaccctatgtgtggtaattgcggcggacctgccgttatcggtgagatctcaatggaagagcaacatctgagaattgaaaactctcgtctcaaagatgagttagaccgagtctgtgccttaaccggtaagtttcttggccggtctaatggttcacatcatataccggactcagcacttgttctcggcgttggtgttggttctggtggatgtaatgttggtggtggtttcactctctcttctccgctgttgcctcaagcttctcctagatttgagatttctaatggaaccggttctggtttggtggctacggttaaccgtcaacaaccggttagtgttagtgattttgatcagagatcgaggtatttggatttagctcttgcggctatggatgagcttgtgaagatggctcagacacgtgagccgctctgggttcgaagctcggattctggttttgaagtgctgaaccaggaagagtacgacacaagtttctctcggtgtgttggaccaaaacaagatgggtttgtctcagaagcttctaaagaagctggaactgttatcatcaatagcttagcgctcgttgaaaccttaatggactcggtgagtagttactaaaacacttaattttagtaatgagcttaatccagcaaaagttctagaaagtactaatcttttgatacaatgttttttataggaacggtgggcggaaatgtttcctagtatggtctcaagaacttcaaccacagagattatctctagtggcatgggagggcgaaatggtgcacttcacctggtatgtaattatgcgtttaacatttaattaacacatataaaatcttaattcaacaaatgggtcttttaatgttttgtttttggttaattagatgcacgcagagcttcaactgctgtctccactcgtgccggttagacaagtgtcgttcttgcggttctgtaaacagcacgcggaaggtgtttgggcagtcgtggatgtctcaattgattccattagagaaggttcttcttcgagctgtagaagattaccatccggttgcctcgtacaagacatggccaatggctactcaaaggtaaaattattctttctgggtgatgattatttgtaatagtagtatactgtatagttttaacttttcacctttaggagttaccctagtgttggttggttcacatttctctaggaaccacaggcaagctctttgtttttgtccgagaaattatgataaaggtttcttatgcattgggtttataactttaaattaacttatgcattggagtaggattattttattgatcagaagcatctaaatatctccgagttctgtgcccttggatcgtgcattaatttttatcattacacgttcatagaagtttttctctttgattatcattaattatgtgttaaagctgacattagacctaaaaaaacgattgtgataaacctaacgcaaaatagtttaagaaatttgcaggtaacatggatcgagcacacggagtatgacgaaaaccacatccaccgtttataccgcccattactcaggtgcggtctagcgtttggtgcgcatcgatggatggctgcattacaacgtcaatgcgaatgcctcacgattctcatgtcctccactgtttccacttccactaatccatcccgtaagctccctcaaacgctgcgtttctgatttattttgtagaaatatatatttgtttgttgttgttgacgtgattcatatcttatcctaccagaataaataagatttaataaatagtatgaactgttgactgagtcacaaagaaaaagatgatagctgttgattctgtaattatcaaactatatagtttaattaatctttttttggttatattaatgggcacagctataaactgcaatgggagaaaaagcatgctaaagctagcgaagaggatgactgataatttctgtggaggggtttgtgcttcgtcgttacagaaatggagcaaactcaacgttggcaacgtcgacgaagacgttaggataatgactaggaagagtgtaaacaatcctggcgagccgcctgggataattctaaatgcggcgacgtcagtttggatgccggtatctccgaggcggttgtttgacttccttggaaacgaacggcttagatcggaatgggatatcttatccaacggtggaccaatgaaagagatggcccatatagctaaaggccatgaccgttccaactccgtctccctcctccgtgccagcgtaagcattcatatttattacactttctatttgcatgcgtaagtagctaagctaatctccaaattttagtttaggttttggtgaatttagtattttataaacattagatggttttggaaaacttgaaattttagtcggtttagttttttgtttacggttttcaactttttctgatttttttgggttggttttagataaattaaagttaaaccgacttgtgtggacattgaatatttgatctataaacagtgtatgaaaggactttgttgtgttgtgtgaccccaggatggtgttgtcatatgaatcttgtcgcgtgtgattggaaagtgacaaatctagaatttggaagtattgtgtgataaaagtcaatagtaataagacatttttgacctttttctttcctttttggctccgacgttttgaaaaatcctctgtttttttctctctttatttctgcattattggtgtcttttctccgttgtaccccttgagctttttctggcttgtgacggtgacactgtaaaagtctcctcgttcatcatcttttaatttattgtttccccttttgggatttataattttctcttctaccaccaaagtttccatttatttaattttgttttgattttttcatgcaggcgataaatgcgaatcagagtagtatgctgatattacaagagacaagcatagacgctgcaggagcggttgtcgtgtacgcgcctgttgatatcccagcaatgcaagctgtgatgaacggtggagattctgcttacgtggcactccttccttcaggattcgccattctccctaacggtcaggctggtacgcaacgctgcgccgcagaggaacgtaacagtattggtaacggtgggtgcatggaggaaggagggtcgttactaacggtggcgtttcagatactggtgaatagtttgcctacggctaagctaacggtggaatctgtggagacggttaataatttgatatcgtgcaccgttcagaagattaaagctgctcttcattgtgatagcacctgatcatcgagatcagacgatggaggagattgagtcaagaacgaacctcattttgtgatgaatccgtttttgtgatggttcgggtattgactcgatgaaatttaaaaaaaaaaaaaaaacaaagaatgttgtaatttggatcggttttattttggatcatgtcgatgaaatgtaattgtttcttgtttctcttcttgtaatgactcgataatatcgggacagcattatatgaaacacacaagttttttttaggggagctcaaataattagttataagcaaaaacgtattatcatttttttggttataaatcaaggcaaccagaagcacaatccgtgtttacttttgtggtagtttataatgtgaaaggattggtttggaccgtgtcctttatttaatgttgttccaagtttacagtacttttctcaataagatggaaaaggaacgaacgaagaagagtgaaacacgtgagtgcatgaatttagttgcaatcccttatagttattatatccatgcaatgtagacaactacaacgaaaggctaattgattaggttggtttagagattgtttgataatgctagcctagatccaaaggtcacatcagaagagaccacaggctactaatgggcttttatctaaagcctgtcattaactactctattatggctaccaagtaagtcttctcaaagtgtattgggccaatcattaactaatttattgggctagattttaagtccattggagtatatactattattacaaacgacaataatattattattacaaacgggccgaaagaaaagagtcaaaaggaagagtcaaacttccgaataatccgcgcgcttaacgttcgatcgccaccgttgaatgaacaaacggtcacgatcgtatctaatacagattatttaattccatttttttcttgtggggtgatgatctctgaacagaaattaagggtatgagaatgattgattggtcttggaattgtgtaatagaccaatggcgagaaatgccatctgttcttttttagtttaagctatatccgctccgccgcagagatatatatagatatttctataaatatgtttttgtatatatacacagagagttttgattaaggaagaaaaatccttagatcattttttttttgttatctttgtttcgtttttctggtagaagagagaagaaggagagacgaattggcagctaagcgattctctctctttctctctttctcttctcgtgtaatcttttggtgttcttgaaaccacttttttttttgttaattcctctgtttccttggaattgttttctgcttttttaagaagaaaaaaacgatgaatgtggtgcggagattaacgagtattgcctctggacgtaatttcgtttcttctgataacgtaaagaatattgaaactttttgagttttttttgtttgtttgtatttattttcttgatttggggattgtttaaagttggactcttttgtttttgtaacttgcgtaggtaggagaaactgagacgccgagatcaaagcctaaccagaatcgtgaagaaacagagtctacggaaactacgtcgtacgagaaagattctgtctcttcctcagagaactctgatcatttaccaaaggaaatccgtgaggtgggacttggagatgacaaggtttccatttttgagatttttttagccttttgagtttctgatttgctttgtttctctgatctttgagctaatggttcaaatggatttgataggatatggactgtggaatcatcaagggaaatggaacagaatctggacggattattaccaccaaaaagaagggtttgaatgatcaaaaagacaaggtgacttttcagttttggcttgtgttctttgtaatgacacatttctaaaattgttctccatgaaaatctgtttttttatatattgtttgttattatgcagacaatctcttacagagctgaacatgtaattggcactggctcattcggtgttgtctttcaggtaaataaaatttagactcgagatattttatttagttgttttaaaaatttgattttgaagttgattcctggttttgatgtaggctaagtgcttagagacggaagaaaaagtagcaataaagaaagtgttacaggacaagagatacaaaaacagagaacttcagatcatgcgaatgcttgatcatcctaatgtcgttgagctcaagcattctttcttttccacgactgagaaagacgagctttatcttaaccttgttcttgagtatgtacccgagactatttaccgcgcttccagatcttacaccaagatgaatcagcatatgcctttgatttatattcagctctacacctatcaggtattaagaccgtgtactcttttctgcattcagctctatttttgacttttggggttctgagaaacatttgtttgttgaaaccagatttgccgtgctatgaattatctgcatcaagtggttggagtgtgtcaccgtgacattaagccgcagaatctgttggtaagcacagcattttaagactagttcttgtaaagctagtactacttttcttactcaatttgagaaatgttgatgcattttgcaggtcaataatgttacgcatgaagtaaagatatgcgattttgggagcgccaaaatgctggtatgtttcatagctcttaatgggattttcaggggttgtttgttatatatgaaaacaatgagtagtgatgtcttgttggtttcagattccaggagaaccaaatatatcttacatatgctcaaggtattacagagctcctgaactcatatttggagcaaccgaatacacaagtgcgatcgatatgtggtctgtaggttgtgtcatggctgagctttttcttggacatgtaagaaaaaagtatctggttctgagttttttcaacttttgatttgagacatttgctttgaacctctctcttttgctttaaatgtctacagcctctattccctggagaaaccagtgttgatcaattggtggagatcattaaggtaacaacatattggtttttttattacttttatctgttgtttttttgggggggctcagattcttagagttgttgtataaacagattttagggacaccagcaagagaagagataaagaacatgaatcctcgttacaatgattttaagttccctcagatcaaagctcagccgtggcacaaggtttatacataacaaatttaaccaagtgatttacaaattttgataatatgttgcttacaaatgaatctgcaacttttcacactcaaaatcttccgatgatttttcagattttccggagacaggtatctccagaagcaatggatcttgcctctagattgctccagtattcaccaaacctgagatgcacagcggtaagagaaaaaaaaaacagttgatttctgactattaaaattgctgcttcaattcctttaatttgactctgctttcagcttgaagcatgtgcacacccattcttcgatgatctgagagacccgagagcatccttgcctaatggaagagcacttcctccattgtttgatttcacagctcaaggttttggcaactacactttgcttcttttataacttacctcccaaccggaaaatgcttatctttctcttcttgcagaacttgctggggcatctgttgaactgcgtcatcgcttaatacctgagcatgcaaggaaatgaccatttgggttaatggctgcttctctacgcagatgttgatatataaatctttttttattttgagagtttcttgttcacaagtatagcattgtgctggttatgaaccctcactgacctctgcaaccacatcgactagcagtttgaaagtgtataattgtaagtttgtaactttgtagctttcattgttgcagacagaaatgcagaattttccgagttttccttctattgcaaatgttaccaatagtctccgcaagaacactttccatctctaaagtgatgaaagcagttagaatctcttaagatgatatgccgaagatatactcttgatatatacttcattgcactgtggcaatccccacagacgcgaaggttcttgatgatccggattggagctccagatggtacaacaagtagaccaaacgcaacagctaatttctcactatggtaagccaaacctagctccttcccttccttatctaagtcatggagagcaaaactcatatccgcgaaataaccagcctctttgatcaaaagcatcatttcatcaaccttggaatatatctcaaccattctcggatgtcttctatcttcagacataaagctatgaactttacctttctcttcaacccaactgcaaccaggttctttgcttatattacgagatttcatcaatctacgaacatttgcagcttcgtcttgtcttcccgctgcagaatacatgtttgataactgaacataaggaacagcattgtttggttccaattccataagagttttcgctgctctttccccgttttctatattcccatgcttcctacttgcagccaaaatcgctttccatacagtagcatctggttcaacctccatttgatgcagcaattgctctacttttacgaaatcaccagatctaccaaagagatcaatcatacaggcatagtgttccggtcctggtgtgattccataaactgttctcatcgaatcaaagtagcgttgagcatcttctaagagacctgcatgactgcaagcaaatagtaacccgataaaggtaatgtaatctgggtgttatgccactgcctatcatcaaatcgtatgactgtagtgagtccttggctctaccgttttttgcgtaacccacaataagacaagtccatgttattaaatccctgatttccatagagttgaatataacattcgcgtcttctaagcttccacactttgtgtacattgtcacaagagaattgtttactgacaaagatgaaggaaaaccagatttaatataattcccatgtacctgttgcccaaactccaaaagagttaactccgccgaggcgcttaatacactcgctgtaacaatcttatcaggagtaatgcctccaactctcatgttacagaacaacttcagtgcttcatcataagatccgttatgtgtatttcctgtcacaagagctgtccaagatatcacatctttctcaatcatcccttcaaacactttcaacgctgaatccatgatccctcttttagcatacatatccacaagggcgttattcacaagtttgtaagtcgcatacccggttttcacaatcagacaatgtgcagaagaagctatcttcatttctgtcctagacaaagcaaaacaatttaagatggatgggatcgtgaaatcatctattttcatatctcgctcatgcattcttccaaacatagacagagcttctccaataagaccttgtctaacacaccctacaatcatcgagttccaagataccacatcatcaacctccataccttctaacaaagctcttgcggattccatttctctgcatttagcatacatatcaatcaatgcgctctgaacatagatattggtcttgaaaccactcttaactatgcagcaatgtacctggactcctaccctgcaagcagaaaccgaggcacaagcagttaaaacactaggaaatgtatattgattcgattgatttccttctcttctcaaatccctaaaacactctattgccttgaaagcaaatccattttgagagtaaccagtgagcattgaagtccatgtaacattatttttctcaccttccattgtctcaaagaggtattcagcttcagagatacgcttgcattgtgcatacatagcaagaaggccattcaccacattaacatccaaatcaaacccggtttttattgtatgcccatgaatctgttcacctctcagaagcaaaacaagcgaagtacacatcctaagaacactacccaaagtgtactcgttaggttttattccatcagactgcatttcccaaaacaaattaaaagcttcaactttacttccagacttgcaatacccagagataagagcattccaggagattgtattcttcactgggttgctacgaaaaagcttttctgcatcagaaagtcgccttgaattcgagtaagcaacgatcatcgtgttccatgtaaactcatccctctcaggcattttatcgaacatttggcgggcttcatcgacccgaccagatttagacaaatctcccaaaagcagattcgagtgaagcttcgttctatcagcatagctgtgaatacaactaccaaacggtttcaaaggaaggcgccattttctgtagttcaatctgtgcattacgacagagccaaattatatatactctctctttcactttcacaagacaacaaaataaaacacttgttaaggtttacggatacaagacaaataccaaatttcgaatatgccattgccacggccggcccacagttttgtacaacattaaaataacaaaagtaaattatttaacattagattaagttgattaaaaaaaagtgtgattatatcattaaatctattgcttgctagtaattggtgatatttggatgagtgtcaataaaaaaaaaaaagtaaaaaccttaagactttaatttgattttttttttttgttggatgtattgaatttggagtgatgcatttttcaaagtaaaataacaaacaaacaatagtttctggaaatcgatggacatttaacatgcaattttttacatgcatgtaattaagattagaaaagattgcaagaaacttttgctattttattttattatttattgttgatgatcgtttatatagtagataagaacaaagcaaaacaaaaaaatcatcaagttctgcaaagataattgcagaggcaaataaatcttttgtcaacggttttatagcactggccagttccttgcaactgcttgtcacagagacttgtgcatgtggctccatcacaattgttgtttaacagaatctgatgacatatatgttgtccttgcgtttctttcgccatcatccctaaaacaatatttttaaacatcaaatttcaatatacaaagcataaaaacgtgaaaatttatttgattaatttgttaatggtcatttataatatagttagagaatggaaatgtaaaacaaacctaggaagaagacaatgaagatgacaacattggtgagtttactcatctttttgatgatataataggatttggttggaaaaagaaaaggatttgaagttcttttaatatcttaaacaaaatgagggtatttgtaatatatgtgacatgtaaatatcatctctatatatatactgtatgtgtgaagttgtgtgtctacgtgtctaatatagcaaaaaaagttggacgcatttgatttggaaagcaatcaagtatgataattagaaagaaaataaaaatcaaataaactatacattcataagatggacaagtaaagagaaaatgaatgggaactatggcagtaagtgttttagaaagcaatctgttcaaatataaatagaattgaattcaaaaaccacttttagaatgaaataaacttttgattcaaatgccatctactgtagttcaacaataagatatgatagaaaaccttttttcttttaactcgattttccgtatctgacccaacatcaaaaccattggatttgatttagttaatgaatatgtatatatttttaatataagataaggaataactaagattattcattccgctttcattcatatgtttttaagatttttgtttcaaatttacgaatgttttagttttgtaaaataattgttatatccatgatccatgatccatgatccatccctgtgaggcacatatgctcaagtagtagcttatagttcatgtgaaataagaaaatgaaatcagaatttatataataatataagacattgtgtaagtttagttttaattcatgtcattgtcattatcattatcattatcattatcattatcattatcattatcattattattagttttattatcataattttattactattttaaattagaatttgagtctataaaagttaagttttgcaaggaaatgtgcagagacaactttttctataagtataaacgtttgggaagcacgatccatttcctttccatttttgcttacacagagtatcacaagtgccttcatcacagttcttagctttcattaaaatatcacgacacatttcttgtccttgcgtctctttcgttaccttccctaacaaatattttaaataatctttaaaaaaaaatttataaaaccaaaaaaaatgtattaaatgttttaaagaatggtaaatgtaaggcaaacctagaacgaggacgatcatgaaaatagcgagaatggtggatttagacatctttgattaaaatttcagagtaaaaaaacagaaatgctgatgataatatatatgtgaatattatatatatatatatatataagtaattaaatatatatatatatatatatagtatgatacatgaagaaaaaaaaataaaaaatagacaaattcaataaataaatagttatatagatgatgggaatggaaacaaaatcataaaatatataaacataggaaggatatttacaaaaatcaataaaaattaaataaaataagagagctttatatatatataatttaaattttgtaatatattgaatggtccaaattgcattctcattgatatttatctataaaaaaaggatttgaagttcttttaatatcttaaaccaaatgagggtttttgtaatatatgtgacttgtaaatatcatctttatatatatgtgtgaagttgtgtgtctacgtgtctaatatacaatcaatcctaatagaaaaaaaagttggacgcatttgatttggaaagcattcaagtatattaattagaaagaaaataaaaatccaaataaactgtatattcataagatggacaagtcaagagatagtgagaatggaagtaagtgttttagaaagtaatctgttcaaatataaatagaattgaattcaaataacacttttagaatgagataaacttttgatttaaatgccatctaattcaacaataagatatgaaagaaaacctcttttttgtaactagatttcctgtttcttgcccaacatcaaaaccattggatttgattttgttttttttttggtaggtcagattttatttagttaatgaatatgtatatgtttttaatttagataaggaataactaagattattcattccgctttcattcatgtgtttttaagacttttgtttcaaatataccaatgttttaattttgtaaaataattgttatatccatgatccatccctgtgaagctcatatgctcaagtagtagcttatagttcatgtgaaataagaaaatgaaatcagaatttatataataatataagacattgtgtaagtttaattttatttcatgtcattatcattgtgacattgtcattatcattagttttattatcattattttattactattataaattacaatttgactttgtaagagttcaagttttgcaaggaaatgtgcagaggcagctttttctatatacgtttgggaagcacgatccatttcctttccatttttgcttacacagagtagcacaagtgctatcgtcacagtttttagctctcattaaaagatcacgacacatttcttgtcctttcgtctctttcgttaccatccctaacaaatattaaaacataagctttaaacacaatcttcatagaaccaaaaagatgtattaaatgttttaaagaatggtatatgtaacgcaaacctagaacgaagacgatcatgaaaatagcgaatatggtggatttagccatctttgataaaaattttagagtaaaaaaccagaaatgttgatgataatatagatgtgaatatcattatatatatataaaagaaattaaatatatacatatagtatgtacatgaataaaaaaaagtagacaaaatcaataaataaatagttatttagatggtgggaatggaaacaaaatcataaaatatataaacataggaaggatatttacaaaatcaattaaaataaaattaaataagagagcttctcttatatatacaactaataattttaaaatttgtaatacattgaatggtccaaggtgcattctcatagatttttatctataaaatatatgtaaataaaatccagttaattatcttacaattctgattttcatgtacaataagttggattaatctttaaaaaataagttgtaaggatccatcaaataatccccttctaactataatacgcatatttggagtttaaactctcaaaatttagatattgaattgagccttaaacctcgaaaataaagtatgtctactacaatgatataatttagatataaacttaacataacacaaattgtgggggtacaaaaaatgttagcaaaaatataaaaagtccttttggaaaataaaaagatttgagcaactacattaagtttatgtatttttttagaatttcccggaagaataaaactactgtagtctcatgatatcaaaacgtttattggggacaagacattctcttgtcgttttgtcaattatccattagatagaaactggtcctcgaaacctagaatcatccaccccgcaaagtcgacagatttccagcgaattcaaacccgatccatcgagattctggatcaacccgattacccaagatccaatctttctaattgatgaatcaatcgatcccttctaccgtatcttcttctccgacgactgatacgatggacgcttcgccgcttcttggccggaacagacgtaaccgcccacggtcctctcagccgattcgtggcgcggcgtcgagacttctccgccgtgctagcaaccgccggatgatgctccgtgagccctccgttcgagtccgtgaggtggcggctgagcagcttgaggaacggcagagtcaatgggcttactctaaacccattatagttctcgatatactttggaatttcctatttgtgattgtttcaatcgcgattctagggtttagttctgatgaagatcctgatgttcctcttaggttgtggatcattgggtataatgttcagtgtttgtttcatgttggatgtgtcattgctgagtataaacgtcgccgtgttgctaattctcctcctcctagtggtgaagattcctccaatcacgagtctcttagcggaagtgaagatgaatctgatggctatagcattaacaacactgatgatgatgaccatggaactaggttcaatttctttcttatggctacagcattatactagcttagattcagagcaatgttggttcttgtgatagacttatactagcttagaattcagagccatgttaggttgaaggaaacttttaggattgtatagaaataaagaactgaatgagaactgtttcccattgatctactctcatgtggtttgtttcctattctagtttcactaagcaccttgaatctgcgaataccatgttctcttttgtgtggtggatcatcgggttttactgggtgacggctgataccgaggcactagctcaatcttcgccacaactctactggtttgtttctaacaaaagttggctgttgtgattttgtattctcaagagtttgtttctgtgatttatttaatctttgtttcttgtgtgttttgcaggctctgtgttgcattccttgcgtttgatgttatgtttgttgtcatttgcgtagcggttgctagtcttattggtattgctgtttgttgctgtttaccttgcatcattgcgatcttgtacgcattagcagatcaggtaaagaaacattatgatgatgaagaacaaatgagtctcatgtttcttggtgaatcctattaagcgatttgtaaatttcaggaaggtgcaccggatgaagagatagagaggcttttaaaattcaagtttctcacagtaaagaattctgagaaagtgaatggcgaaatacgggaaactcaaggagggataatgactggattagataccgagtctcaaaccgaacgtatgttattaagcgaagatgctgtaagtaaccataatcaaatctcccattttctatcgaatttggataaagacactgaactgactttagcaaaaccggaaaaaaaaaaccattgcaggaatgcagcatttgtctatgtgcttatgaagatggagtagaactaagggagcttccttgtagacaccattttcacagtttatgtgtagacaaatggctaaggatcaacgctacttgccctctctgcaaattcaatatcctcaaaaatggtgaacctagtggcagtgaacaagtgtgatgaggagaaagattttgctgttcaatctttgtggaatgtgatgagctcatcatcatcatttacttcaaagcctgtttgttcttttgaccattacagaggaaagaacaagaaagaagaccttgagatttgttttgagatgaagctgcacatcttgtctttttggatatgatatttgtaaatgcaataagtatatatagttcggttggaagatgttattcatcgagtcagttgtgattttagccgtttggtgtttttaagcaacggattaattagattaatgtacggtgatgaaccatgcatgtttatattgctgtgacgtcattgtagtgaggtgaaaaagagagagagagatcactatttaatcagaattcacattcaaaaatatatatataaatcactgcaatcaattgtattctaaaaatttattcaacgtagtaagtcaaagattgatgatatagtttgtggataacagaagacaaatcaactggtgcagtcataagtgcagatgcagaccgtgcttgtagtatcaacacacacgccgtttccaccatgctgcatagtacattcatgtgcgcatatcaaaccttcgcagttttcctgcggtgttaaaagataatcataacactgtttttcttctccttgcgtttcctttgtcaccatccctaatacaaaaaaattaaaacatagtctcagtttccttttgatagaaaaataaaaggtgttgttgaagaaaaactagtatgaataataaagacggaacgtggaaaatattaaaatatgtgttatgtataaagcaaacctaaaacgaggacgaccataaagatagcaagagtgatggctttagtcatttttgataatacaacagaaatgaaattatcaaaaataagatgacaatgagtgtaatgatcatctacacgtgaatgtcatatataagatatcacaaaatctctaaaattagttaaaaatcaacaagtaattaagtagatgttgtattcaaacaaagagaaattaacttaaaagtggaaacgtataaaagtggaaaagagaaagagatcatattacgattatctaccatactaatgtggttattctgtaatcgtaagtagcaacaagagagaagcgtgtggaagtagttaaactgttaaaggcttaaagccaatattgccgctattttaaaagtccgacaaaacttccttgtagacaacatttctacagtttatgtgtagacaaatggctaaggatcaacgcgacttgccctctccaaattccatattctcaaaaatggtgaacatagtggcaatgagcaagtgtgaggaggaggaaatttgtgctctcagtctttgtgaatgtgatgagctcatcattaccttaaaacatgtttataattctttgatcattacagaggaaagaacaaagaaagaggacctggagactgcaatattaatttttccaaacccgttgctttgttattactatttgatgatggtttgatacaaaaaaaaaaacaaattttgatgatgatttatggataacagagacaaatcatgttttgcaaataaacatgcagttgcaggtaaactgatcggttttagaacacccgcctactcccttaaaccttgaagcacacatagcatcacacggcgaagctttacagccttcggttggtgttataagattatgatgacacacactttttctccttctgcttgtgtttccttagtcaccatccctaataataataataaaatatataatttcaaaattttaatataaaataaagaagtgatatcaacacactgaactgtgaacaaatgagaaaaaggtgaaaatacatttaatatgttatatgtataaagcaaacctaaacctagaagaggacgactatgaagatagcaataacgatggttttagtcattttagatgatataatagaaatgaaaaactttaaagtaaaacgataatgtacacccaaatatcatatatatatatatatataatcaatcacaaaatctaaaactagttttttttaatataaatcaactagtaattaagtaggtaaacggaaagagatcttttgaaacaaataagaaaaatatctaaaagaataaaataaaatttgaaacaaataagaacttggttaattatacataatagtctatatgatacatgaataaaacaaaaatgaaaagtcaataaataattaaatagattctcgaaaataaagaaaaaaattataagaacaggaaagagatttagaaacttgatatataaatggaaataaacaaaaacttgataaatcatacctagttttgttatatgcaacatcagatgtgtgagaacactcaaagtagcatataatatatgaattagtccgttaggataatcataatttttgattattaaactatgtatctaagaaaactaaaaatattgggtgtatacagttgtcctcctgacatgagtatatgattgtaagtagggataattaatccgaatactggtttggtttggttcaaaaattttggtttttagtggggcgataaagaggaagagtcatataaagattatctaaaataataatgggttttgtgttgtagtcgtaagccgtaactcgtaagtaacgaacgagagagaaacgtgtggatttagtaaaaggcttgaagccagtggccgctattttaaaagtcggccgaaatcagagactaagcccaattgcgccaacaaacttttaccaaaatggttgaaatttctataatcttgtgaagttgttaattagtaaatcaattcaaacaaaaaatcataaacaagaacagacggtcgtagtgaagccaaaataagtccataacaaagtgcccacgtgaggtacatctaacactgcacattttatatccgtggaagtcttatctcttctctaaccagcagagaaactacttttatctagtcttaaagttgtgcggtataaaattgtcacagcataaacatattacaatttcatttcgatttttttgtaaacatgcccataatctatcatagtgaaacaaatataaatatttcaatttgtctctgttttttttttttttttttacttgaggaaaatccttcttcttttgaaggattaaatatcatagattatatgacgtaactttgacaaaaaaaaaaaaagattatatgacgtaacattctcaaaacaatttaaattgattataaacataccactagatatttgtttaatcatatccgcaacaaatcaccacgcaagtaacgttacaataactcacaatcattaaatacaaaccagaacaattgcaagacttttttttttttgttttcttcttccaacaaacacaccatgcacgaactataacaacaagttcttagatatcatcgtcgaacaaatttgacttttctattttcaattttggtttcgtgagtattataacaaaaattaatcacacatctttgttcctcaattccaaattgggaaaatctatggaacaaagacgaagaattaataatatgtgcatccccccccaaaaaaaaaagattttaaaattggcgttgatacagaccccaaaccggaactccggtaacagtccggccaccgtatccatcaatcgatgccgtctctaatctcggcctccacaaaccagtaaccgccgcttgggacgaacacgcgccgtaatctctggtgggatccgatttaaccaaaatcgaaagattgacgatcccacacttatcaccaaactcatctctcaatctatagctcaagaagtttaagtgaccttcaggtgaataccttcccatgaaatcattcgttgggattttagcttctccgatttttttatcatgcccagaacctgttcgataaaatacctcaatgaagataaactgttcattaccattgatgggcatctctgatttatagttccatgtaggattgcttcttctcgattcgtcaagattagattttcgacatttctcgtcgatttttacgacggcgaaagtctttttcttgatgggtctccggtttagcttaagcccttctgctgatctcaaatcaatctccaatgtttttgtcatcattgttgtataatgattgtcgattgatctaccaaaatatatcatttgggtttaatgtttatttgttggtctaatcattaagtagaatgaaagaacaagtttatatatagacaacatcacttaggaaggtgacaaggaagtttggaaagaagtcgctcggagatttcttctctttttcccgccagctcattatcaagatataaagaagtcgaccaaacaaaaaagggcaaagacaacaaaaaaaaaagacaaggaaattacgtttaaattttagattagtattttgttcatttgaattcggttttatatcaaaaaataaaataaaattgtttgaatatattttatgaaaacaataaaactgttttcaaatgaatcattattttttgttttttgataaataatacttaactctttgctgtgttagttcatatataattttgtgcttcagcttaaatattactccttcattttcttctatttagatgaatgtgtaaattatgaaaaggactataaattataagtggtcataaattctcaaatatatttacatttttaaaaacattttttaatataaaataaactaaattctgagtattttattactagtataataataataaaaaaaaaaatttagttttgtgattatatgacatttcgaatctcgcgaatcacgatgttagtttatttacgtaacatcaatctcaagatttctaattaatataaacacaatttgttttttgaataatgttgtctagttaaaagtgtaatacgacaaaaaggaattaaaacaatgtggcataaccgcataagcgagttgaatccagcagcgtgataaacgcggcgagacgcgagaacgttcgttgttataaaaaaatgcgcgtaccagcagctacgatgaaacacgagtataattgtataaaggaaagtactcgtttatttcttccttaagatctacttaattattcgtttttgaaattgactcttttttatctcaactccagctcaagatttcctaaaatccatgtagttttgtcgtataaaataaaatgtggtaatcatgttctaaataatttactaaaattatgaagtgtccatactcgtatcgtattatggtgtaagttttttttttttgttaagtatgctctatatggccttgatatttagttgtcgacagagtcttaattatatttttagatattaattagaacttacatactcaggataataacatcaaaatactttttcttgatgttaaaaaacttaacttgtgagaaaattatgtggaaaattccttcgcaaaacgtttatttgaacggaaactatagttataacttttcaccaaatattgatcaagaattattcaactcatttgaatatattttcgtacgacctcttagtgtaaatggagttaacttttgtttaagaaggttggaatttacttagacattcaaatacgtagactttatcaaacaatcaaaaatactaattatctaatacgtatagattactttcgtctttttctttttttacgagtggaacgaaaactcatggaaaatattgggggagtcgttgactccatgtcctacttgtacggttgtacacttgtaccattccttaattcttggacaggttgtgcaaaaaaataaacttcaatttaaagtgaagatagtaaaacaaatagtaaagaaatttatggtttcttatgatgattatgtgatcatgtttgcacgtaaggtacaattacaattaagtcttcaccacgtaatatatatgccttaaaaaatataatatctatttttgaaaatatgtaccgcatatatatcatcaaaacatcatttgcagaaagaaaaaaaaaacataactttcgaatttctcatgtattggaaacatctgtttgggttaacctgcagttacgaatttcgttggaaccttttttctcttgttgatttccatgaaacgttgtattttgttttctactcgcattgtatatcttttttcaagtattaaaaaaaaaatttggatgtagagcaaaatacattaactcgacagcttcaattttctaatctttgcgtcaagttttcaaaaagtcttctcataatctgaaaagctaacattttacggccattcgatttggaggaagaacaacttaacgtcccacaacactcgagagccgcaaactgatcatagtcgcatatatacgattctatatatactacatatatttttctatgtggaaatgccccttaattatcattttttaataaaagataaatataatagcccttaatgttcaaaaagctaacttgtaatatcaaaccgatttacattgtgtttttaattaacgtatgggtgtgctatatactagtttgtataaatttgagatagattggccatatgtactataaaagggtaatgatcatattgttataacaggaggagttacgttgtctaatcttatactagcatgccttggatttttcatgcatgcatggatcacaatgtgtgacgtcaccatgtgtttgtcagcacactttgtggaattaaaaccccatctgataattttattatagtgcgatctatcaactatagtacttgcgtgtaaaatattctgacactgaataattatagtgttttttcttggtgaaacaatgatatctgatatataatcgattaatcgcattggtagctaggtttgcaaatttatctatttcttcaaattaagggtctaatttgctaccaaagtaattaaatcggcgtgtatcatatagccatcgaaactgaatcaattcgtatatcaaccataagaagttgttttttcttttcttttcttattagttgtgaagtttggaactgaactctaaatacgtctaaattggttagagactaaaacggataacttagtctcctccgaaataatgtttaaatcacagtgtctggaacttcactagatttataaaaccggaaatattgggtaaaaaaacattgccaagtccattgacttcatctaaagactaaagtcaccgatcgaagccactttcaagtgttcctgacaacgaatttaatagtgtttttacatatgcgacaaagggaaatgataggatatgatgtgtatttccattttgataggatatggtggggattttccattttgattccgatcgagccttagaaaaatattacatacatatatttaaaaaaggcagtggctgggaaacctactacagtattcgataaagacagtgaaatcaagacaaaaacctagctgttacattgagaaattttgaacaatttacatttatgttaaaattatgaactcacccatttgccaacatatgtttccatctaattacctaaagatcggtattaggttttatatataccaagttagctaatatttattatcaaaaaataaaattcttaaaaaatattgttttatggttaatttgctaacatatttgctaaatgctaattatttaacagattatatatgatcagcatatccaccaagaaaaaagattatatgtcagcatcattcttcatgtttaagcgtataatttggcttattccccacaaatgatttcaccggttagagcctataaattagtacatcttattgttacctagtcacttcataatcttatcaaattcgaaataaagttaggtgaatgaatttattagtaattattagacgaaaattgtgccttacgttgcatatatatccggaaagctacactaaaagaagttgacctataaatacctatagcaagtctataaaatctaaatttccacgaacttccacatatctactctatcttatgattctcatttgcatctctgtcagataatgcagagtcatgtgcgtgacatgatactcggtgacctcataacacatcttaccaatctttcattaaatgaaaaaatgattagcggtacttaattttttggtccagagctagtaattgtcattggaaattttgaatgcactgatgcagtgtactgtgtatcccagttgacatttaatggtctataatttggaaaaatggaaagaaacaacagttgcatcgtatcacaggataaacttggacatatcatatgatttagtcaatgatgatcatttttgttattaataggaaaaaaattgttctcttttctttcataaaattttggatattagccttgacatgacatataatttatgtcatgtgatttaatcacaaaacgatcaaaaagtgttatatatcgtctataactcgtacatatattcacactatcgaaattaaacatggatacgactaagacaatacgatggtatacaggtcaaggttgactcttggtttgtttgttttttaacaggtcaagacagcaattatgaggaattcaagatgggcttatgaatttccgagttcattacgatgaaatgaaacagaattatgaatatccgcattctcattattacatgtaaaatttgctaaaaccgaaagacacagagatactttttagggttgttgagagatttctagatgaggtatgttcataagcatcattattttaatgtgatttgtgatgatcagtgctctcaaatcacttttgcatttctccatttacatgagctagctcctacttgtggctttatgtaaatcctggtctacacaagctagagattccattgacgagtaccatggtgatgccttttttcaaagcaggtgttcctgaatgctccttcgttagttccatgcctcatacacgaatggtattcagtgcaggatccaattggacttgattccttgacagactttagcttttctttaaaccaaaaaaagaagaatatctctgctagcttctcatagtctgctcattattgggatgcactatcttcgtagagggaatgtagagttgtacatataaagtggttgacttgggacgaaatacccacattactgtaaaattttaaaaatcgtgctcgaatatcaaatttggtggtcatctcaaaacatcccacaagacaatataaggagtgaaaaaaaatggaacctgtcagaccgccgtgcaaccaccccggcaaggtagaaccgagccgagtaacgatcctctacagcaccagatgcgtcctaagacgatcgtagccgtcaatcacgctctgatcgcacggccatggttcatcaaccagggttaagggcctgtctccttagaaatcaaggaaacagaggtacgagcctatagaacagatcctgttcaagtaaggtcgtgaccaacaatgcttcctcacactttatatacaatcaagtgttttttgtcatattagcgatgtgggataatgtgtaggaacttataagaaaagcgtacatgggtagttgggtactgggtagcagtgataaatgggcaaaagcccacttaattatatcaatagcccaattatcttattgctccatttaagctctctaccacacggtatgggatggcaatatggcatggctttctggttcttacagtttcgtaaacccaatttgagcatgttatcaggaactcaatattaaaagatctacatttgtcagtgaattgggtctctgagcattttcttaaccagaaatcttgcgatgaagtgatgatagacgctagtggaagcaggtgaaaacattttgagcagcagcaagtgaccaataaaagaggacctgtatgtgagattgttgtggcacactaccaatttaaacattgattccttttgtacttctctctcacaggctgtgacacatctgatgcaccaccaccattttactaaatatttgaggcccccaatctaattacagctagcttgatagatgggttgatttcgtgtaagaatcatgcaagttaccattttcaggaaatcttacttggtgtccttgatggaaacaccgagaaacgtgatgaggccttttcctaagcaatatacgcctgaggcctaaacctggttcccggatgctcttccatagatctatactttccaacacaaacggcatccattcatgtatctatgtcaaaccactgcacttgattactttagagacttcagagatctcaccttgtcatactctgctaaatggggatgcaaaattcttcgtaggtggatgataatgtagtagtgttgtataaactgattaaagacagtaatatctgtatacagaatcttgttttattgaacagaagaatgtaaatagatcagcaaaagatcactgagcatgtgaaaaagctttaaagcttagagatgggagaatggtaaaaagtagcacgagataggtaagtgactttcatggtctccttgatcttgaactcaacagtcaccaccgacagattcctcccagtcctcaccaccgttccctccaccaacaattcactctgcaaaataaatctcaaacaatataagcttctgtgctttgaagatcagagagagtcttaagagagacgagaatgaatgttaggtggcttaccgaaataggagcagaagagagataagacatactcaattcaccaatgaacagatgtttgtcttcagacacaacagttttcacacaagccatcgctactctctctgcaattgatgccaccgctcctccatgtaaccccttaaagaaattctgttttcacaacgaaaccaatcaattttacaaatcaaagatcgaaactttacgaaacccatttgatctaattagagagaagaagatgattacggatatgcctggcgtgacggtgacggagcacgagacacggccgcgtgcgatggagagagctctggtattgttttgaaataagacggagaaagagtcgaaagaggtgaaatcgttgcaagattcgtctggggaaatagctttgaagaaatcagcaaccattaatacgtaatttggatcgatcactttggacaccgccgtcgtgtcggacgagatcggagtagaagacatgtcggtgtcttctgggctcccagtttcacggaattttgcccaattcatttttaacctactctgatttttttccaaattgattttttttttgtgtaatgttgacttttctctcttttgtaattatttttttcctatttttagacagtaaaaaactgtaagaacttttttaggtgaagtgtacaaaactatagccacaattttttttatgccgatcaattagtttattcactattttaaatttttgaattagatttattaaatagtgttatttgggtaagtgtaactaatgaaaatcaatttgtgaagaaatttatttcagatatgagcatcttgcttatattaaccttttatttatatataacatctttatatttacagtgctataaatatattaattaatatattaatttatacagaaacgaaagttatacaaagtaatgatccgcatttaaatcaaccaggttgctctcaagacctgttaaacataagttttcaatcctaattcgattgatcattgatgacatgcgtgtatgacatatagttaatatatatctcaaaggggaacatatattaattacctaaagtttccctgcaagcataaatgccttgtagtgaacatccttgacttgttcatcatcaccccaagcttccttaaactcatcaatcatataagaagttaaaagatcctctccttgctcctttgctttcactagaggctgccatgattttaagaaccctagaaatccatctagcgaaagcatgtgtgggatgtcaagagctttaggccttccttgagtccccatcctaatgtttttaaaaggaaactctattgttttataaccatcaaacgccaaattcatagtcgggtttctgtaaggtaatgttgaatccacaagacgtttcatgatggaatcaacctttggggtgatgatgagatcgttgtaaacccaaactacgatgataccgccttgtttacgaagaacacgtttcactatggggtagaatctctttaggtcgaagtagtgaagagcttgagcggctattatgatatctatggagttttctccaccgagtagagtcactagatcgtcgtcggacattgatgatggagtgtgatagtaagtgacttttgggtgcttcattgcacgttggagttgtgattcatttatatcagttgccaccactttctggtagtactcagcgacctaattacacaatatatatttgactcacgtacgattagttcatttaggcttcacataaaaattgatcgtggcttgaagtatttttaaggaaatgtatcaaaacttcaaaaggttcaaagtaacactattgttttagaaagaaaacaaaccccaatagcagcctgaccgttgccggtcccaacatcccaagccaccttatggttgctggttcgaccagccaacactttgtaccatattgtaggatatttcggccttgcgttcaagtactcatcagcttgctttcccgacaaagcagccaattgagccatttttttccttgtgttttttccccctctctttctttgcttttggttgatagattacaatttcacttcataatttaatattacttatagtagtcacgaaaatttggaaaagaaaaaactcgaatctcataccttactcaactagattaggtcttaagtctttatattctttgaagataaggatgctagaaaaagatgatgtcgaatttacagaaatataacgtctaacatcgcatttatgccgcaatccactataaaagaacatgttttattgttattcctcaccgaattgaaggaaataacgattatcgcataggttaactacgttacagatttgtccgtaaataataaactccactaaaatcatacatgaaaaactctacgtactaaataaatacagctttttttgaagtaaatttcagttcagattaacaactggaaaaatcttgaagtaactagaaatcgaatagaataataataaaataaagggaatgtgacactatgaggcacttttaagaaatgtttttccgttttagacacttttaagagtttaggcactttatcttgtttttggtgagaaaatagacaaaattacccttgagattttgtctctctctttttcgtatccattctctctctttctctcgctttatcaaaaataaaaaatcaagaaaacaaatcttcaaaatttacattttttttacgccattaaagagagaaaaaagttgttgaacgtttgcaaagaagaaatcatcaacttctttctttcttccttcttcaacaaatcatcagctttctacaaaaagagagattgattgaacaatcagattcaactttatttttccagttaatcggatctcccgatttctccgtgtctgctttgattaaggagaatttttcagatcaccaacttcagaatatgaatctgatttttataagagaggatctgttggatttaaagaactgccatggtaatatcatcacatattcacatcctcttcgtttttctatcgttttctgtttttgctcttaaataatttatttttcgatttcatgaaccaccaggttgtgaataaaccaaattggccaattccagtattgaattttatatccatttgatcagcttgtttggtatcatatgattttggctcgataaattgataatatcgttgaacttctaagttaagagtattttactttgcatacgagaatcaattatttccacatggtcacgtctaagtggacatgttattatcaaagcttccaacacgatttcattatgtagaaactaataatcatataggtctccaaaacacaagaacaatctgtagacattactttcaaacatcaacacgctaaatccaagtagataatgatagtttgtgtccatgataactcatccacttaaacttgaccatatggagtaatggtgaaacatgacaaacacttgaacacaaatgattcatgtttagagctttcatcaattataatttgaatgaataagagtatcattggtgatgcaagaatcacaacttggtcaaaacaaatcataccaacacacaaaagttcatacatcaatgaatatcaccaatttcacgagtagcgtccattttttgttgaccactagttcacttgtttatagacactctcatcgttatgtgggttgatcacttgtttatagacacatatgctgcaaacaaaatacgtggttgtccattacggattgtccaaatgttgtagtccaatagagaacatcaagtactgaatttcaaacaaacggggcagagaagttatctaacattatcatagaattatgaacaagatcaccaaacacttggaagcttttagtaaaccaaaccattaatctttagttttataggagaaataaccacacaaaaatcaagggatgcacttcactcctccatatcaaacctaaagagataaatgtgtctcaatcaaatactatatatgtgtaaattgacgctaatactctccactagcaaaatcaaagtctgaataaatcgttcaaatcaatctaatttcatcataagagttaaggttagtttataccttcaattccaaacaatttcaattccacaatcaatcaaatccacaatctcacaacaatttttcaaatttctgcaacattgaaacttcctgcatctcgtcacatcaaactttccactataccgattctagaaacttccaataacatcaaaaccagactatgacacctcaaaaacacgaagaatcacgaagcaagacaaaagtaaacatgaatggagatgagtaaactcaaatcaccttgagtttatgaacgacgacgacgtcagaagcgccggtgatgttgatcaagcggtcgataacgttctaactcatgtcgccataagaaagaagatatgaagaatcaatttgagcgagaagcttggttcacaacaattgattgattgtgaaattttgtttttggagtgaggaaggagaaaagaaaaaagattttgttttgttgttgtgaaattaccgtgaaccgatggattgaattgggggagatggattgaattggagggggggaagagagagagagatgaattgtatcgagaaagagagagaattataataagaagaattgttagcgtaaatgtaggagagatatagttaaagggcaaatcgagaattttgtctaacaaaagtgtctcataacttaaaaatgcctaaatcgacaaataactttttaaaagtgtctcacaatataatattctctaaaataaattataataacttgtaagtttgtaattaaccatcgcccaaatatgataactatcatcagtaacgttttgttccaaacaaattgcctttattaacgaaaacaaattgcctttattaacgttttgttccaaacaaatataataactttagttatctcaaatatgtgtcaatataatgcaagaaaaagaaaaaaaaactgtaaattatgaaaatcgacgtcacaggtaaatatactaacatgttcaactttaaataatgcaagactaaaacaacggcgtcggattagaagtctaatctcccatgaacatcaatttctgagctacgtggcttcgtttgcctccacatttcttcgtatggtttctgtgcattcactgcatgcgcataagaaaaaaagaaacgccaattattgatattctttgtctaaaacccagaaataaaaaggttcgaaaatggcagaggaaactccaaggtatgtcttaaatcttctcttagttcttgatttagtctgtaatcttagtgagtttggttctgattttctcagattgtttaatggtttttgtagatatgctgtagttactggagcaaacagagggattggatttgagatatgcagacaattagctagtgaagggattagagttgttttgacctctagagacgaaaacagaggacttgaagctgttgagacactgaagaaagagcttgagatttctgatcaaagccttctttttcatcagcttgatgtcgctgatcctgctagtatcacatctcttgctgagtttgtgaaaacccaatttgggaaactcgatatcttggtaggcattattagtaaactctctttgatcagtttactctgaaacaggtcttagactttacagtttcaaacgtggttttgactagaatgattgctttacaggtcaataatgcagggattggtggtataatcactgatgctgaagctttaagagctggggcagggaaagtatgagataatctttgtgattattttgcaagcaattactttcatgatattattagtattgatgatcttctgtgaagtatttaaatgttttcttgttatattcgacatggcaggaaggtttcaagtgggatgaaatcatcacggagacttatgagttaactgaagaatgcatcaagataaactactatggaccaaagagaatgtgtgaggcgtttattcctcttttgaagttatctgattcaccaagaatcgtcaatgtatcatcctccatgggtcaactaaaggtaagtaagaaaagattagatatcaaggaagcttgagagatgtattgttggctaagaaacactatttatgttacaattgattattgtttaccagaatgtactaaacgaatgggcaaaaggaatcctgagcgacgcagagaatctcactgaggaaagaatcgaccaagtgatcaaccaacttctcaatgatttcaaagaaggtacagttaaggaaaaaaactgggctaaatttatgtcggcttatgtggtttcaaaggcaagtttgaatggttacacgagggtcctggcgaagaaacatcccgagtttcgcgtaaacgctgtgtgtcctggatttgttaagacagatatgaacttcaagactggagtcttgtctgtggaagaaggagcttcaagtcctgtgaggttggctttacttccgcatcaagaaactccttctggttgtttctttagtcgcaagcaagtttcagaattctgaatcttcttttgtgtgagaataataagccaaaaatgtagtaatttaatgagaggattatcgtttgaatgtcgaacatatactcttagataaacaaaaacttttatgagatgttttggtaattactcataaacttgaatataattactttacaaacagaataatatatagttccataagaagaaactaaacaaaatttgagtctacttcattgcattagttaagaaattatctctttaacaatttatgattatatatatttcacaaaaggaactcccggatatttcttaggattcatgttcttcagctgctgcatcagaagtttcttcttctgtagggtttgcttcatcttctttgggttcggttttgtcttcctcagccgtcgagcgacggtggttagccgcggcttggaggacatgattgtaattacctttctcaaggaaaagctggctgaagtggaccttacagtaaaggacgccatcgagagcagcatatgaagaatgtgttaatggacaaccactatgtgcacatctgaagcaagtcttgtggtaagattctccttccattgtcatcttctctagaggataaactgttttcttacaagctgcacatttgtcttgtgtgccgctaaagaaggatgataacctgtttggagccttcgtctatgcaaatgatcacaccaagaaatcagattagaaaacaaaaagagaaaacagaggaatgttgatgaattatgtgcttaccgcatcattcgatttctcggtctttccagctgtaaaagaccaagaagagaaagtagcaaagattgttagcttttcaagagaggttaataaaaaacagagcaaagaaaacagaggatttgttagcaacctgtttggaaattcttgctgaaatttccagattctttgaagagctgttcaaaatgggtcttgcaatacaaaactccatccatggatgagtagttacatatctgaaaaggagaagaaagatgttctctttgtgttttttttttcatgagggaacaatggaggaaaaggaagatagatagataccacgagagtgccattgcaatggctgcacctgaagcatgacttgtgataaggcattccttccaaagtcatcaagtccataacgtataccgtcttgtcacacgccttgcatttgtctgttgtccctgtaaacgccgccattggtatctcttcttcttcttctttcaaattacgaaagagttggaagatggatcaaaagttttcttcttctttttgttgttcgtttagacacgaatcaaggtttgttttgccatcatctatgagctctctgcctttttattatatcaaaatcatggattgagatttttaggggtaaaattttcttctgatggttgagattcaaatgaggagagcccttaaaatgttcttctacattctaaatctatttctggctatattttattttatttaacacttatttttgttttgctttctaaattatatcgtgtaaaccaagggattaggtgcaaagtttatatatagttagcctccgattttaagatgttattaattcatatacacaattataaggatctttatacaaaataagtaacacctaatctaacatcacaagactgccttttaagcatagcttttaataatcataagcataatttgttttgttagatatcattaatcaaagggcaaagaatctgggggtctaaaatgacaaaaacaatacaacatggggtgaatacctgaaagaaaagtaaatccgagttatactgtaaataatataaagcttatgggtcatgtatttatttaacgtaaacataaaaggccattttgataaatagtgagagtctgaaaaaaagaaagaggagaaaatccattgacgccctaacaaaagacgccggcgagtgtattcgtcactttctctagtttcctgtaacccaacccactcaaacgaaattttttcttaatctctctttcgttcttcttcttcttcttcttctttagattgttgtaattccaatcggaactctcgattcgctttcttctccgttcttctgtggcggaccggttttgtggttttttatttgaacattcccgatcttgccctgagttccacgatcagtttctttaaaccctaggttttacacaagcattctgtttctccagattatcgcagactctttcgttctattctttgtagttttgtaaaaggtatttcggtagatttagggtttgtctgtgtctagttttcgagatcgagagagatttgtgatgaatactaacagaggaagatatccaccgggtgttggaacgggtcgtggtgcgcctccgaatccagattatcatcagtcgtatcggcagcaacaaccacctcaagatcagcagtatgttcaacgcggttattctcagaaccctcagcagatgcaactccagcaacaacatcaacaacaacagcagcagcaacagtggtcaagacgccctcagcttcctggaaacgctagtaacgctaatgaggtggttcagcagacgacccagcccgaagctagcagcgatgctaagtaagttcttgttcctgaatacgtcttgttgcaaattatgatgctggagtaattattatgaatgattttgtttgcattgagtaatgatttgtgctgttagagatgtatgtgttattttgaggttaagttatatctctttagtgtgctcatggattctctgttactctcagtggtcaagactggaaggctacgttaaggctaccacctcctgatactcgttatcagacagcggtatggctgctttcttctgagtttttctgtgtaggaattatgaatattgaggatattgaataaactcgtgttgagcaatgtcttccatattgtctgcaggatgtgacagctacaaagggaaatgaattcgaagattactttctgaaaagagatctgttaaagggaatatatgagaagggttttgagaagccatctccaattcaagaagagagcattccaattgctttaactggtagtgatattcttgctagagctaaaaacggtacaggaaagactggtgccttctgcattccagtcctcgagaaaattgacccaaataacaatgttattcaaggtatacttctttttccctgttgagttgataagtgatcagttgactgtttgtgtttgtccttgaaccacttgttctattttttatatgcagccatgattctagttccaacgcgagagctggcccttcagacatcacaagtttgcaaggagctttccaaatatttgaatatccaggttatggtcaccactggcggtaccagtctgagagatgatattatgcgattacatcaacctgtgcatctgctggttggaactcctggaagaatattggatcttacaaaaaagggtgtctgtgttttgaaagactgtgcgatgcttgtaatggatgaggtgagctcctgattgctttcctaatatctagatcttaagtatatcttcgttttgtggtatggctcctgcagtgtatgttcctcatgtctttattgctaaaaattgatgatgaacaaactgtaggattactgctagaaggaatttttcttaatttattctttagttttctctgtcaaagactcaaaatttgactttatcatcctctatacatatgcatagttatacttactactgttaacagtcatttaccccttactttggtgaattttgaagatctttcttgtgtgttgttatattcacctgagtttattttgttttattgtgtcataagcttcaaagtttctgactccttaaaaatgatttctccaggccgacaagcttttgtctgcagaattccaaccttctctagaggaattgatacagtttctaccccaaaatcgtcagtttttgatgttttccgccacattccctgtcactgttaaggcttttaaggatcgacatctccggaagccctatgttatcaatctcatggatcaactcacgcttatgggtgtcacgcaatattatgcttttgtcgaagaaagacagaaggttcactgcctcaacacacttttctctaaggtcagatgtctagatttatccctgtaactacagaattatgaggggcttgatttagatgttctaaagtggttatggtttttcaatcccagctgcaaataaatcaatcgataatcttttgcaactctgtcaatcgcgtggagctgttggctaagaaaatcacagaacttggttattcatgcttctacattcatgcaaagatggttcaagaccacaggaacagagtattccacgagttccgcaatggtgcttgcaggaatctcgtttgcactggtaagctttgtgttttttagcatgtactttgaacattgaccaagtgtagattatgatgatgatgatctggcttattggaaaatgactgcagatctgtttactcgaggaattgacattcaagctgtgaatgtcgtgatcaactttgattttcctaggacttctgagtcatatctacacagggttagtcgaaacaaaactggtttgtgatctagtttcttacatgttcattttaactcatgttgcgaaatgttcaggtgggtcgatcaggacggtttggacaccttggattggctgtgaatttggtaacttatgaggaccgtttcaaaatgtatgtcgttccttcttttcaatgttctaaccggtttttctattctgttaaagttttcttagtcatttatcatgttttgaaaacaggtatcagactgagcaagaacttgggaccgaaatcaaaccaattccttctaatatcgatcaagcaatctactgtcagtaaacttgtaactgtgcatgaaacgtgtctccacccaatgagaggtacaagatggttaaaatggtaagagtaagacgaatcctctctcttaggcttaacttgtcaaaacaacatttaaaatcaaaaagctatattgcatgtttaagaccagtgtgcccaatatttcaggtgtttctcaagctcgaggggaggagatgaggcaactagtacttggcggttcatgtaaagactcgttactcagtggtttggttcctaatctctcttaaagacacttgttatctggttctatggaaacctctttacgctgcacttattatgagactccctttgacttggttagtaataaagatagaacgtatgactctcctcttttttattttcgtgttgggctctgtttggaattatgggctttatcctatttaggatctatttatcatgaaagttgcacttcttaatttttgcttccacggaattattttgatttttccaaaatattttcttccacatgcttattattctagtttggtattaagctattttcgtcaaaatgtttgaaccgtaaccaatcttgttttatagtgttatatccattgagaaattatagttttcacgtgtttatttatttatttgggttattaaacataaatcatgtaaatctgaatcctgtggagatctctccctagttgatgaatagatatgatgaatttaattctttcatgaaataaaaatatatgaaacatatgtagcagaaaaagaagcatatctatgaaacaacaaacattcaaaaaaaaaaggaaaacggaaaattattaatatgaaaactacggctttgacttgtagctgactacatttacgacatatatatataaatggaccccactgagtgtctgcaaggtctttacacaacagtatcttcttctgtttctttgactctttgtgatccctaagcctacccataatacgtgtctacattttattggattgtttcgtgactctgtaatcttttttataagaaaacaagtaatagtgaaattgaagtaaatagctcagcacagaaacttcgacaaaaataactcacagattagaaaagaaaatatatgcataaatagccatggttcatttatgaacaatttattcgtttttttagtttataatttcattaaaacatgtttgtcacatcacatttcatgtccttcggctcctactacaacaacaagtcactgtcatctccattacttccacttctgctcctttctttattaacttgttcaaaaacaattctaagataaataacaataaatgttggtctctctttattatttcccggctaaagaaggaggatgtctcgtattatccgccatcaatgctcttttgtttcctgtttcttgcaatttgaatccctgagaatcctagcccacttatttactactttgccttagctgttttcgacatcaaaattttggtcatatgactcatatcaatcttcaaatttgataaaatatgttcccaattcacaaaaacaaaaaagttttcgaaagctcaaaaacctttaccatttcaatagtagataggattcttttagatttgcatttcacgaaaagagaagaaaaaaaatcgaaaaatatttgcaatcatgattttttgtttctgaaggagacctgtagttgctgtcatgaacattaaatacaaatctaataaatgttgtacgaattttgcgtgtaataaatggtcagggccggctcgaagctcgctgatcgtccttttttcgtgtctctatagcaacacacaatcgtatttatttcaaactttttttactttgtttcccatccatcaaatataagtataaaaatgtaaagaatcatcatatatagatcgtaaattcattgcttcctttggctttttatttcatctagacgacgttaaaaccagaccagaccaaatacatttatcatttttcccttttttctaaaattctctctttgattcctatcttcttctctttattttcactttgtgctttctctgtctctcctattatgagtctaaaagtctactagctgttcaatagttttgtctttctgtgtttcttcttcttcaaaaccgaaagaaattcaaaaagagtctttcgctgcttgttagtggggtgaggaacaaatgggaagaacaccttgttgtgacaagattggtttgaagaaaggtccttggacgcctgaagaagatgaggttcttgttgcgcatatcaagaaaaatggacatggaagctggagaacacttcctaaacttgctggtaaacttcatattcttcttcctctttcgtttttgttagattcttgaggagatttcggggaaagttttcatctttacatcaacatttttactagaaactccataactatggttctttgacttgttggagaaggaaagttatctcatttattaaggttttgttccctttggagaaaattccattaactggggttcttcagagattacatagagaaaagctttaatctttataactttcttgtcggtcatggtgaaacaggtttacttcgctgtgggaagagttgcaggctgagatggacaaactatctgagaccagacataaagagaggtcctttcactgctgatgaagagaaacttgttatccagcttcatgccattctcggcaacaggtcttttactttgcttctccaccttccttctctactctagctatcttcttcttcattgtctgaattctgcttttttttgtttcctcaggtgggctgctattgcagcacagcttccaggaagaacagacaacgagatcaagaacttatggaacactcatttgaagaaacgtcttttatctatgggtcttgatcccagaactcatgagccattaccttcatatgggttagctaaacaagctccatcttcaccaacaactcgccacatggctcaatgggaaagtgctagggttgaagctgaggcaaggctttctagagaatcaatgctctttagcccttctttttactctggtgtagtaaaaactgaatgtgatcacttcttacgcatttggaattccgagattggtgaagctttcaggaatctcgctccattagatgaatcaactattactagtcaaagcccttgctcgagggcaacatcgacctcatctgcacttctgaagagctcaacaaattcttggggagggaaagaggttactgtggcgattcatggctcagattattctccatattcaaatgatcttgaagatgattcaacagactctgctcttcaacttctgcttgatttccctataagcgatgatgatatgagcttcttggaagagaacattgacagctactcacaggctcctcctattggtcttgtttccatggtttccaaattctagtcttatgagagcctaatatctaagaaaaagattcaaactttgcttccttttggtttttagtgatgataagtagggatatagtatctatgtaaatcagcattagttagttgaagtacttaatcaaccctttcttttatgatttgatcatgtttgagaaaattgcagaacattaaacaattaaccattcattctcatgttttcacacacagaatcaatatacaatcaacattacatgagaataaagaaatttgcatattgaagactagaaacatccacaagttgcctttggaacaattccaatggctctgtatttagcagacgtttctttcgctataagaatgcttgagaaaattgtagatcaagaacaaaaacttcgaatgaatcctaacattttgtgagaattgaatgagaagctaggttataaaaacatttatagacttatgttttgtacgccttataaaaagaacatgatcaaaccctaacactctactacaaagaaacaaagttagaaccacagtcaaatcctttagatagggaaactagaattctaattaatggcgaatggaggagactacgtgacgattacgtaactaaaattaaacagactctgctcttcaacttctgcttaattttccgataagcgatgatgatatgagcttattggaagagaagagctacacacagactcatgttggtcatgtctcaatatatggtttcttaattcttatcttatgaaagcctaatatctaagagaaaatattcaaattttgcttctttttgggtcttctgattttttagtgaacagaggttacgtgaccgttaagtaactaaattaaattaatttttgatggtttagtaattgccaaataaaccgagaagtgaaaaaaggaaattaacaacataagagtttttgaaaaaaggaaaaacagaaagtaaaaaaggaaacttgaatccctaacggctaacacattagagaacatattcttttattaaccagaccagaaaagagaagagcgtcgtgatggaagatgatacatattcttcttcgtttagaatcattccagatattaacgccaacgctcagtggtgatttctgattcggctctgttcacatagccgttagtacgcgacgaattaagaagatcaagtctggtcagacatttcagaagcatcacgtcttgataaatctaccggagattttgagaggaatttgcagtataaacggcaactgacgacggagatggcgatagaggcggtgaattttgatcggggattataggatttgttttcagtcacggtggcggagaaactaacggttggattgcaatcttcaaaaccatacgaagcccaacaataagaaaaggaaattcagcccatgatagtccatcagattattagtcaggtcaatttctatcccatcttaattttcatttttaaatattcactttttatattttaattcaaagttttttttactatacacactagttcttttagtaaaaaaaaaagtttttaaagatatattttttatattactataaaaactttaaggtttttagtttgaataagtgttaaatttttaaactttgtgtaaactaattggatacaatatccaaaccccttaggttcaatatggtttacacattatttagatttttaacacttgtttttttttcttaaacaatattttttatattactattaaaattaagattttgtttttttggataagtgttaaatttttaaattttatgtaaactaattggatacaacattcaaacccctaaatggtgttctaggttcattatggtttacacattatttagatttttaacactagttgtttttaaaaaatgttgttaaacttacattttttatattactattaaaactttatggttttctttttctgaataaatgttaaatttttaaattttgtgtaaactaattggatacaacatccaaacccctaagcggtgttttaggtttaatatatttgataaattatttcctttttaacacttgtttttcttttattaattattttaaaactaatattttttaaattactatttaatttttaaattttggatatgtattaaatttttaaattttgtgtaaactaatttagttacgtaaaagaaccggatttagcattccgtctttttttgtttgtaagtattgtgatttcattaaatttaacacgttttcacatattcaaaatttaacacttaaggtttttcacaagtaatattattagtaaattgttttcatttttaactcaaagttttttactattaaaactgtttttattttgaaatatgttttagacataagtgttaatttaaagatgtaaaaataaaactgatttagcatcatgtccttttagtctgtaagttttgtgttattagttcaacattttttcatgtattgtaaatctcacatttcgttagcttttaatgtttttcacaaataattttcgaagaaaattgttataatttaaacgaaattaaatttaagtgttacattcaaaaatacgttataaacaaactgaacttaggatcccgtccttcgaatttcttttggtccattagctactgttattagttgaagaactttagaaaatctcctcatattcttaatgacttgagtcatcaatcttctctccatgatgtgatgtgacaatgcttgagaaaattgcggaaagaaaacaatgaaacatatttttcactctgattgtcacacacaaaatcaatatacaaacaacattacaagccattaaagagaacagagaaatttgattacactttacagttacgaagtcttgaaactttgattcgcaaattcaagattagaaacatccacaagttgcctttggaacaattccagtggctctgtatttagcagccgtttcttctgctttaagaacgtcttctccacgcttagcttcaatcattgctcttctctcttctgcttccttgtgaatcgctgcaaccttattcttcatcctctctgcatactctgctttcttcttctctagttgctcctgcattgagaaaaaactcacaaattaacacttcacttctcaatcacattaaaaccgtttcacctctctattgctaagtttattatacctcgattttcttgagttgcgcttcgacagctgctttcttgctgttttcccaagcatgaacatctgcaatcttcttctcagctctgtttcatgtcaatagtcagcaaaatcaggcaaagaacataaaaaagccaaaacctaaaaccagtgacgataaaataaaatgtcttacttgttctctgctttgctcttttcgctttcttcccacgctctgacgaaagacaatctcttttcctttgacaaatcagctagcttaacatctacaaaccaaacaatggaactcagaaactttaacaaacattacatccagaaagaagtcacacaattttgtttaagctcacctctatcgagcgatgcagacgcaggtttcgccggtgcaggctcttctacaggttctgtaaaaaaattcattccgttaaaatttcaaacataaccagcaaaattgccacagaagagagtcacaagcaaacacatacaaaacatatgcatggttatgaacataaagctacaatttttgggtgcttaatgaccatatacattgaattatacatcacaacaaaactaaatttaccaatctcgagactttaaatcgaaacgaattcgaatttaactgtgcactctaatcgtatttcaatgacaaattctatctctggagcaacccaatcctaataaccaataaaacctaatttttaaaatacagaaccaagttaaccccaaaaccaatatttcctcgtcaaagcagaagattatcagagaacagaatccataattacatgcgttaagagaaattaacttactctcaacaacagtaagggctttggagtcatcgaaaatttgctccggaggtgggttttgaattttctcctctgcaacgtctttcgtgacatcagccggagtcggagctggagctggagccggaatctctgccggagctggagccggtgtatctgctggagcaggagtcgtaaccttcgccggagattctgattctaacgctatcttctgttcctccgccatagtcgccgcctctcagccgaagaaatagagaggaaaaaagaaaaccaaattaaaaacgaaatatgaaaaattgaagatattatttccaagcaacagaaagatgtttatacgtattagccgcgtttttttggggttaaaaataccttattttattatccgttgatatataaaggcatcagatcctacggttataaatccatttgttgtgtatccacgtgaactgcgatgcagccgaacacaaaaattcagcttgccgacagacaggtaatgcggttaaacatatgccacgtaagcaaatgtcaatttgttttcattagtaaattgtttttctgtttaaataataatatgtcggacgaaagcgtgacgtggaggaagacacgctggagacagataagatactgagttgttgtgaccccacgcactctattggcgcgtggatattatccatgtttgtaggagcgcgtgtataagacgtgccgtataagatgggcctaatttattgggctcgattcatattctttatttagaggtttttaggaaagatccaaaagctatctgacaggatttgttttccaaaaagactaaactgatccaaactactccgagattcgctccgtaaatacacatttgttttctatcattctatatgatgcggaagcgttagtacaactgtacagatatcatagtttaagttccattactaaactaagtcactactcactagacatcaagcatagaagttagtaacttttaatgaagctcttttgattttacaaaaaaattaggggagatgttaacacttaacacaacacctacctataaccaacactgatatgatatcttccaaaatccaaaccatggacgtaaaccgatcttaaccaactgtttccatctgaatagggatgaaggtaaaattgttatgtctaagtgggaaaagcatgacttcagaaaaggcctaatcacattcacagcgtcagttattaatatatcgcataccttataaaactttgatttgtgtgtttaactagtgtttgctatctttaaagaagtcaataaaaacaatttaaaatggcttatatggacaaagataagagttagtgactggaatgtgcctaattatcaagtgcatcttacattattgatcttgttgtacttactaaaactaaaagtgcaatttggcacgtccactctcgtagttggaggtagttagaaaatattgacttcttagaccgtgccatgttaataccatttaatgttactggaaacaaatactaataaataatacgtcacttaaaacaaaatgtctatacaaatactattaacataaaacaaaatctctagacctgtattacatcacatgcatctcttacttataaacaataaacttctttattgtatgttttagggaataaatatatgagtttgatgtcatatcatgtttttttttttgttatcttcatacttttgtgttgcgtttctgttgattctccttttatgtatcctctcggctctctcgttaatcttttattacataaactcgtgcatcaacataaacacaaaacagaagcatgaagatgaataacaacgacggccaacataataaaacggtgacatttcctcgaaaaagcatcgtgaaggctactgttttcatcgtcgttctattcatttcagctgctatcttagacttactgggctatctcgatttcgtgggttttaatatcaccttacattcttggtttatctttaatataaatcgcagtagttaacgttaatcataatcataatttgtcttattgttttgttttatagaatgcttttgcaggtttaaagctaacaacaaagacaaaagaaccaaatccttacggatgcgacttcgtacagaaccaatcaagtcaaactcctatctcacaaaaccgcaaatcgagattaaaccccaacaacagttcaaaatcatccacgtgtccttcttatttccgttggatccatgaagatctacggccatggaaacaaacggggataactagagggatgatcgaagaagcgagtagaacggcgcattttagattggtgatccgtaacgggaaggcgtacgttaagagatataagaagtcaatacaaacaagagatgaatttactctgtggggaatcttacagttgttacggtggtaccctggtaaattacctgatctcgagctaatgttcgacgctgatgatcgtcccgtcgtccgatcagttgactttattggtcaacagaaggaaccacctccagttttccgttactgttcagatgacgcaagcttggacattgtcttccctgattggtccttttggggctggtaagcagcccaataagatgataaaaggcttattgttgttactgatttgttaatatttgggcttctaatgagccagggctgaagtgaacgtaaaaccatgggggaaatcgttggaggcaataaaagaagggaacagtatgacgcaatggaaggaccgcgtggcgtacgcttattggagaggtaatccttatgttgatcctggaagaggagatcttctcaagtgtaatgctacagaacatgaagagtggaatactcgtctctatattcaggtttctcccaaatttcactttccaaaagattatgatataaatataagttttgtgatagattatctgaatttgaataatgttgcttttaaaggattgggataaagaaacaaaagaaggattcaagaactcaaatctagagaaccagtgcactcataggtaaaaagaaagaaagtattactatactttttattttatttttaattactataagtcttcgattcttcttttatggaattaaaacagatacaagatatatatagaaggatgggcatggtcggttagcgagaaatacataatggcatgtgactcaatgacattatatgtaaaaccaagattctacgatttctacatacgaggaatgatgccattacaacattattggccaatcagagacgattccaagtgtacttctctcaaattcgccgtacattggggcaatacacacgaggacaaggtccatatatctaactaaagatttcttacatctttaatctttacgtctgatttgtatcaatttaaccctgtgtttgttgttgtgtataggctcgtgagataggagaggtaggaagtagatttataagagaggaggtgaatatgcagtatgtgtatgactatatgtttcatttactcaaagagtatgcaacactcttgaaatttaagccggagattccgttagatgcagaggagatcacgccggatagtatggggtgtcccgcgacggaaaggtggagagattttaaggcggagtcaatgattatatctcctagtgaagagtctccttgtgagatgcttcctccttatgatcctctagctttaaaagaggttcttgagagaaaagctaatttaactcgtcaggttgagttgtgggaaaaccaatactttcaaaatcttaccaacaaaccttaaattgttttgttttttccttcttcgttgacgagatcaaccgcaaccaaatagttcagtcgtgggaggatcaatactctcttgatttgacttataaaccttgatttttttttctatcatcattaaccatttgtcgaatatacttttcaaagtatactttgtttatggtcttgttatatgctcatctcattgatccttttaaattagattatcagaagagatatgtaagtctttcgaatacatctacattctagctcgtatataaataagaagaagtgaaaaaaatttaaacgatttttggcatgaagtgattttgttgtcaaagtgaattaaatacagaaatttggagggcactattgttatattaagataaggtgggaactagtcctaaacttggcctatcatggcaaacctttttttctaatatcctgccaatctttttgaccaattgaatattctttttctttcttagaaatttcttaatcattcatctcatctcaactagaaagttttttttttcaaaagtaacttataatttctttcattgttggtaattttgtgagatcactcgggctccataagtctgtttcattgacaaaaagaaacaactgtaagaatattttctcccaaaattaataaattaattaacatggaatatatatacgtaggtgggttgacttgacttagttaggctttggctatggttctccttaaagcctttataaaataagccagcactaattaaatatcagtcatgatctttttaaaacacatgctgaaaattgtttttttttaaaaatcaaacatataattgtactaatttagacctccaaacccttaaatcaacccattttctacctcataaaagagatccatgataagtgagctctgcttcatctctttctagttcttgtgttcttgttgtgttttgtccgatgagagagaacacacaagtggctcaattcacagaagatcatcaccagagacatcaaaccccaataacttgtttaagctctaaactagcaaagatatggacattgttcaccaccaaaatcttcatcttcgtcctcttcatcatcctccttagtgcttctgtctcttggatgtatgcggtatatatttttctctttctcttgatccaccagtcatatctatatataaacctctttcttttggcttgatgataaattatacatataacaatatctcatacgacacgttaaagagaattatatattgtaaccagtgtgtgtttgtttgttttctctactctttaacccatttaaataatttcatattttgctacttatatacttgtattccgaagttggatcttaaattattttacgtggtgtcgttaaaaagtttgttttaggtgagaataaattccaagtgacatcaatattcacaagaaacaccaaaaaaagcactcccacaaaaacaacaacaactacagatatccccaagatcgccatcaagatcccattaaactgcacatcactcaacagcaacacaacacaaacatgtccttcaaattacccaaccaagttcgaaccagcgatctcttcctcggagacatgtcctgactacttcaagtggatccaccgagacttaaaggtatggcaaaagacagggatcacaagggaaacactagagagagcaagaccaaatgctcacttcaggatagtgataaagtcagggagattgtacgttcatcaatacgagaaagcatttcagacaagagatgtgttcacaatctggggaatacttcagcttctaaggatgtatcctggtcaaatccctgaccttgagcttctcttcctctgccatgatagacccgccatttggaaaagagacttgaagaaaaaacgaaaggatacgtggcctcctccgccgttgtttcactactgtggtcaccgtgatgcatacgacatagttttccctgattggagcttctggggatggtatgacttttcatcaacattatcacaataatatctctaaaatctggtcaagaacgtatatgggcccgtattaacaaacaaatgacataaacattgactattcttttctttaggcctgagctgaatataaaggagtggaataaattatctgtggcactaaaagaagggaacaaaaaggtgaaatgggaagatagagttccgtacgcttattggaaaggaaaccctcatgtttctcctataagaggagatcttatgagatgtaacttctccgacaagtatgatcctatggttcgtctctatgtccaggtattacatatatgtctcctatatatacatgtttcaatgtgtatgtaagtttgaaaccaaataattaatgaaacttgaaattaatgacgtcacccgcattctcaaataataaaacatgtactatagtgatcttgtccaggtattctcaaacatgtactaaagtgatttaaatttttcattgattcatcatttcattgtgaccttgtctcatatgttgtctaggattggaggagtgagatagaggcagggttcagaggatcgaacctagaagatcaatgtactcataggtatatgtgcaggatacattcactagatcacgtatatcttattaatattaggtttgtttttaatatattagtaaacattttggatttgaacttggacatttagatataagatctacatagaaggaaacgcatggtcggtgagcgaaaagtatatactttcgtgtgatagtatgactctgttggttaaaccagagtactacgactttttcttccgaagtatggtcccaatgaagcatttttggcctattagacaaaacaacaaatgtggtgacctcaaatttgcagtcgaatggggcaacaacaacaccgaaaaggtaaccaaaaatatctaatatctatattgaaattttcaataattttaaattctagtgactagtttctaatttctgatcagtgataacctgtcatcacccatgattctttttgtgattgtcttaaattcattatatatatataggcacaaatcatagggagacaaggaagtgagtacatgatgaagaacctaaagatgaagtatgtgtatgattacatgttgtatgtgttacaaggctatgggaaattgatgaagttggatgtgacagtgcctgaaaatgccacggaggtttgttcagagacgatggcttgttcgattactgatggtggacggatcaggcagtgcatggacgactcgttggttatgtctccgagtgtcaaggcggcttgtgatttgccaccttcttatggagactatgagctcaagaagtttcgtaagaaacaagaaagtgcggagagaaaggttgagcagtggaccaataagtattggaacttgagagatccaaaataagataatttcgtccatggtgaaagtgtaattgtaagtaggagtctggtttaatttgtatgaaaataaatagaatccaattttgccagtctggttaatttttgtatttgaattgactaatagagaccctataattaatgcatgtcatattttttctcatacaatctaatttgatttataatcaagagattctaatcggtgttaaaaacaaaatgaaatcctacttgatacattagaatctatcttacttaaattttgcagacctaatatacatgcatctagtagagaataatataaattaagtagaaataaataatatgttgctaaaaaaaaaaagtagaaataaataatataaaacagcaattaagttatttggtcacatatatttcctgtattgccaataatttaagatatttattacttcttttctaaagcctaatatagtaatttaatgttcattatatcagattacaataaataattgaatcttcttaccaaaaaaataaaaataaataattgaatctctcttataagtaggggttttttttctgagaaattaaacgaggtaatctaaatcgaaacctgcaactatgaagatgaacaacagaggttttaatcagaagccacgtggaatttatcatcaaaatctgagttccaattctaaattagccatcattctctgcatcatcatcttcattctaatctgcagtgcttggatggatttggtactaaaattctttctcattttctaatcattttatacatacatacaactataaaattttgacttttcatatagtttgtaataggtaggatccaaatgatgactacatcaatattgacaacgacaaacacaatcatcaaaatccctttaaagtgcaacgcaacacaaacatgtccttcaacttatccaagcagattggaaccaatgatctcttccttggaaacttgtcctgactacttcagatggatccaacaagacctaaaagtatgggaagagacagggatcacaagggaaacactagagagagcaaaaccaaaggctcatttcaggctagtgataaagtcagggagattgtacgttcatcagtacgacaaggcttatgagtcaagagatgtgctcacaatctgggggatacttcaacttttaagaatgtatcctggtcaagtccctgatcttgagcttctcttcttctgtcatgatataccagctatttggaaacgagactttaggcaaccggaaccaaatgccacgtggcctcctccgccgttgtttcagtactgtggtcaccgtgaagcctacggcatcgttttccctgattggagcttctggggctggtacgtattatagtaagtgtttaatttatttatttttcacatatatttattttcattaaaaatttctaaattatgatttaggtattaggtttatatgtttctaactactttaaaataaacaatattttcggatggcattttcagggaaaaaaaaataaaaatcattactaaccaatagcaattaggaatttgaaatcagtgttttttttggataatgatttttaagcggtacaacatgaaaataccaacgtttgaagaagtttttttttttatagcgaaactaattaacaacgttttatatccataatggaaccaattgacaaaacaaatgaattaaccaaactggtattattaacaaaatcctacaagcagccagtgtcgaccatttacatcattaaccgaattaaaacgttacaagacatctaatagtgaaattggtcaagacgaaaaccagagccaaaaggccaaaacctattacaagactaaaaacaaaaacaaaattggtcagaaatgtaaatgtcccatagcataacattttttttttttttaacgtaaaatacaatgctaacttgctaatagaccgtgagactgagacatatagaaaaccggatattcttaccacctaatagtgaaagaactttttttgtaactattattttgttgttgtgatataggccggaggtgaatataaaggagtggacaaaattatctgtggcgattagagaagccaacaaaagggttaaatggaacgatagagttccatatgcttactggaaagggaactctggggttcatcgcgaaagaggaaaccttatgaaatgtaacttctccgataagtatgatcccatggttcgtctctatgagcaggtatatttgtccatccctttccagcatccagtttaagtgaaatttttgtggaggtctatctcagagcattacagtactagctcacgaatttatagaaaataaatctgatacgtaatagtaatggcgatttcaggattgggggaaggagagggagatagggtttaaaagttcaaacctagaagaccaatgcacccataggtttatatgcaatgaatagctatctcatactattcatgtttaaacttttttggattttgttaaatctttgttgatttggggatttggaattggacattaaggtacaagatctacatagaaggtcgagcatggtcggtgagcaaaaaatacatactagcatgcgacagtatgactctactgatcaaagccgagtacttcgatttcttcggaagaagtttggttccgttagaacattactggcccattaaatctcacgagaaatgtggtgatctcaagttcgccgtggaatggggtaacaacaacactaagaaggtaagcaacatctatataattatatatatagtatccaagatcttatatctatttcaatcatcgataatcgtttgaaatctatatatataggcgcaagttatagggagacagggaagtgattacattatgaagaacctagagatgaagtatgtgtatgattacatgttgtatgtgttgcaagggtacgggaaactaatgaagttggatgtgactgtgcctgaaaatgcaaccgaagtgtgttcggagacgatggcttgtccgatcactgacggtggcctgatcaggcagtgcatggacgactcattggttatgtctccaagcgttaaatcggcttgtgatttgccgcggccttatagagatgatgagctgaagaggtttcttgagaaacaagaaagtgcggagagaaaggttgagaagtggaccaatgagtattgggaggcccaaaacaagacatttcaacaaagaaagtaagtacaattcacccgggagtaatgcaagtggtataacaatattaaatgtttaaaactttatgtcagtcgtcatataagcaccaactttgtttgtttttttaacaaatgaatatgatatcattaattcttttctgttaactatcattattggttagacgtccgattttcacataaatattatcaatttatcatttaaacaatgcagggaaaataattggaaccttggttcgttggtgctaatgtaaatgaaataaattagttacaagttaaagaagcattgcataattgaccccaaaaattacgagtttacattgtaaaattaggcatttgcccaaaatatatatatatatatatatatatatatatttacagtaaatagccaatttgtggaaggtattcaatttatttatctgcaaaataattttcgatagatagttgtgagaaaaaacctaccaagcgaattcgatagatagattttttttgcttgaggttttaacaaatttcatgtctttttttttttctgataacatacatgacattttctgaaaaccctaccacgcaattttactaattttggatttaaatacgacaatgtacctaataagcccttgcattatccccaatcttacttgttgacaaataatgtttttatttaatatcatataaattcataatcaaaagaattctgatgattggcgtcacgattaataacagataagcgcgttgcgtgaccctaattaaatacggtcaacgtttaattacattacaaaattcccccaaaaaaacatttgcctagttgtcttgtaagacaagtctccacgatctcataagtgtagaagaaactttcaaaaacctctgctctgttttcttcagaaattttttaagtaaaaatgatgagtaatctgaaacttggcgttgaagtcataagcgcaaggctcaaacctagagaggactatggcggtgttaacgcttacgtcgagctacgatttgacgatcagaaagtcataactatgactaagatcgatgactctagtccggtgtggaacgagaagttcttcttcaacatctctgatacagaggatttatcaaatcaatttcttgacgcttacgtttacaataaaaccagcagcataacaaaatcttgtctaggtaagattcgaatattgggaactgcgtttctcccgtactcagaagctgttggattgccttatcctctagagaaagagaaatggagcatgttctcttccgctgccgccaatggaggtgagctcgctctcaaagttttcctcactgataacccctctcccaaggtaccgaatctaatctctacaaagaagattccttctaaatcaaggcacaaatttcacaacatccccacaaatgagagtaaccatagcccacgagggaatcagcaatcgtttcaaccgcaaccgcctccgcctcaatcgcaaacggctctaccgccaccgatgatggagtcttctctctatcaagcaccgaggtttggtactccgatacctacaactatggggtttaatccgaatccaccggattattctatcaaagagacgaaaccgattctcggaggaggcaaacgagcaagatcaagtgatcatgatctcgtcgagccaatggagtttctcttcatcaaaatcgtgaaagctagaaatcttccatccatggacttaaccggaagtctagatccatacatcgaagtcaaactcggaaactataccggcaaaaccaaacattttgagaagaatcaaaacccggtttggaacgaagtcttcgctttctccaaatccaatcaacaatcaaacgttcttgaagtcatcgtcatggacaaagacatggtcaaagacgatttcgtcggtttaatccggttcgatctcaatcagattccgacacgtgtcgcaccagacagtcctttagctccagaatggtacagagtcaacaacgagaaaggaggcgagattatgttggctgtttggttcggtactcaagccgacgaagcgttctcagacgcgacatactcagacgctttaaacgctgttaacaaatcgagtttgcgttctaaagtctatcattctccaaggctttggtacctccgggttaatgtcatcgaggcacaagacttagttattgtaccagaccggactcgattgccaaatccatatgtaaaaatccggttgaataaccaagtggttcgaaccaaaccgagtcactcgctgaatccaagatggaacgaagagttcactctcgtcgcggctgaaccgtttgaagatctgatcatctcgattgaagaccgagtcgcacctaaccgagaggaaacgctgggagaggtacatataccgattggtacaattgataaacggattgacgataaccggacagtgcctaaccgttggtttagtcttaaaactgagaaccagagaagagtcagattcgcgacgacgagacttcatctaaacgtttgtctagaaggaggctaccacgttcttgatgaatctacttactacagcagcgatttcagaccgtcgatgaaagagttgttgagtcataaacaaccgtcttttggtgttcttgaattaggaatcttgagaattgaaggtttgaatttgagccaagaagggaagaaggagacggtggatgcttattgtgtagctaagtatggaaccaaatgggtcaggactcgaaccgttacgaactgtttaaacccgcggttcaatgagcagtacacatgggaggtttatgagccagcaactgtaataacaatcggtgttttcgataacaatcagatcaatagtggtaatggtaacaaaggagatgggaaaattgggaaaatcagagttagaatctcgactctcgaagccggaaggatctacagtcactcgtatccgcttcttgttcttcgaccttcaggtttaaagaaaatgggggagttgcatttagcgattaggttttcctgctcatcgatgtttcagatgctaatgcagtactggaaaccgcttcttcccaagatgcattacgcaagaccgttgaaagtagtgcagcaggagattcttaggcagcatgcggttaacttagtggcagctcggttaagtagagccgagccgccacttagaaaagaagtagttgaatacatttcggattcaaattcgcatttatggagcatgaggaagagccgtgcaaatctcttcagattgagttctgttttctctggtttactaggaaccggagaatggtttcaagatatctgcaggtggaagaaaccggtagaaactacagctattcatataatcttcttggtgttagtgtgttcgccggagatgattcttccagtgatgtctctttgcttgttcatgcttggggtatggaactacaggctccgtccaagacaacctccacacatggacacaagactatcatttgcagacaatatccacccggaagagcttaacgaagagttcgataccttccctttttcgtctcaagacccggggattgtaaaaatgcggtacgagcggttaaggagtatcgctagtagagctcaaacggttgtgggagatatagcaggtcaaggagaacgagttcaggctctgttaagctggagagatccaagagcaacttcgatcttcatggtgctttgtttggtttctactgtcgttttgtatgttgtgccgtttaaggtttttgttcttctcgccggactatacatcatgagacctccaagattcaggggtaagacacctcctggacctattaatttcttccgacgacttcctgctaaaacagattgtatgctgtagaatgctaaaacgtataagaaacaagcaattttttttcccattcataacaagtcaagagaccaaatcaactaactgaaagctcgaaaacacgcagaaattcctaaacttactaattgtctttttctttcctaaacaataccaatagactactttgtttcagggaggttagctcaagtttcttcttcttctcctagattcaatgcttatatatacatgaatcatccacgcattagatcaatgtccatatgggggtgatgcatatccattgaccttgaaccagttgaccaaatgcctacaggagtctgaacaatgttctgactttgctgaggaacaggaggtgacgttgctgctgtgttatcgttgttgttttccaaagcatcagtatcttggacatcttcagaagtttcttcacgttttttaatcttccctttcggaattgcccaaatgaagctgccaacaatgaccttttaaggaggcaaacacacatagttaagcataagaaatctaaattcatctaaggaatttgataacaagcgtaagctcacctggacttggcttgctgctattagaggacctccaattccaccaccaatgacacgaccatcggggctagcaagtgagaccgctagacttccagtgcggtttgggtagtcattgtcagttgtgttcagataagaagttgagagagatatgagctcgaatagaccctataagtttcaaagtatacaccaaaataagtaatgtttttgtcttctaaaagataataaaatgtgagtgatgattcaataaaacctcgtatataatagttccatgagaaggtgctggctgaagaagagttgcagtagagacagcaccacttgcggataagacacatatcgctcgtggaccttgatgcgagaacgatataacctttgaagcaatgtcctgaaagcaacaccgagagtatggttatctcaagaactagaggcaagattacaaagaaaaaaaagaacagatttattcaagaggagacagaagaaacatacttcaccaatggaaactacgattacatgcggtgtgaagctcatcccagttgatgaaggcatcatttcaccttacaaaaaagaatcaaatgtcttcagaaaaatcacagctaattgtaatcagggagaaacagagcaataacaaagtttaagagaaaggccaaggaataataaaagaataaatattgaattcaacaatttgacattataaaattccacagctttaattaatccttaacagttcgaattagcttataataaacttcccaccaatgtcctcatttgaaaaactatatcatcaattaagctcaaaacttcccaccatattcagagccaatgtccttgtcggaaaataaaactcataagttagagattagggatattaccaatggaagatagccgttgcttcttgccggagccaggaggtcttccacggccacgtttgttagagttcggggaaacgttggagatagaaggagacaatgccaacgaaacagaaccaccatcttgtccatattttctaggccgtcctctcttccgcttcacagacgtgtcacctgaaggaggagcaaccaaagctcccgccgccgccgctgacgaatcagccggagaagagtcaacgggtaaaggaggagacacgaatccagtagagacacctccagggtttggatttgggtttgggtttgacccaaaaggagagatggaattggtgaaatgatgaaatccttgtgatccgtgaaacgttggttgagtttgaggaggaggaggaccagaaccggggattcctctttggatatagtaagaacccgacccggataacgccattgcgtctcttcgatccatagcttaaccaaaaagactctgactttaacttagtaaaattcgatggggaccctaaatggctaacttataggaggagggataagaagagaacaaaatcagaatctaaaagggttcgatagacttcaagagcaagataacaacatgcaaccgaaaatctctgaaaacttatcaaaacacacaaactttcatttcacctaattgttttttatgtagctttagtatcaagctatgagaaaatctcaagatgaaattagatccaaaagagaaaaggaaagaactttaattttcttcatctcttcttctctgtttcattctctcaccaaaagcaaagaaatgaagtgtgaataagctttctcatccatcaatcaacaatggtgaagaaaaaaaaaagttttctagggttctctctctttctttcttcagagtgtatgtgatgttgctttttttcttttactgggtgacagagggaaaacagaaacaaacaaaaaaagatcctttctccaagcatttactgtggattacaatacaatgggatgatgaggcaggatttcaaaattcgaaattaaatttgaagtctctgacttttgactgtgatataagctctctctctatctctctaatagacttctttctagcatctagcaatttgtaggagggatccatccatccatcatcatcatcatctttgtgtggctcattctcaacgctatagattaggtgcgtgtatcaaacgaagcattgggaatgagagagtgaatctcacgcttctgatgtcgagagtgagagaatagtgatgtgatctagtcaagactttctttgttcctcactggcttccacttcatcataagctttcaaaatttatgaatcccccaatctatctttagactctattttaccataaatacttgagactaatgattatatattggcattaagagacatataacatgaatataaattcccattttgtggagtaaatattgttcttgtctctgttctgttcactttaaatcttcatttttctctacaaacaataatcattaggacccaagagtttatcaacaatacagaatctgaacgtttagtactcatgtcatgtgaagtgaagtgaagaagatcaacaagaacattaattgtttgctataatcttctatgggccggataggaataattaggcccagtatctaacacatcaaacaaaaacacatcgaagtcgaatcgtcggtgggataattaggcccagtatattcaaacaaaataacatttaacagatccaagtccaatgttgtcgtggaacgaacgtcgtttagaataattaagcccagtatttaacatatcaaagcccaatgttgtcctaaaacgacgacgtttgaatgtggaacgtaaacaatcctggaacaaccgtttcaactacctttttcctatcacttgttttttcacctctcgaagtcctccgatttgctacccttacgcagcctcatgtgtcaaccaccatttctcttcttcatcttcgtctctatcaaaccctaaacctaaaaccccttattttcccgccaatgtatcaatccatgaatctatcagtttcttccaatttcactcaccgatcactcctcgaatcacgatttcctatattctccaccggattccgcaaatccgtcaatctcaaacctccccgtgtctcatctggtcctgaatccaacgattcaggtcacgaaaccttaaccgataagcttatccatctcctcagagctgttccagattgggcagacgagattaaagagcgtgggatgcagcagaaacgctctctctacacacacgagaaatgggttgaacatagaagctctcttcgccatgtgcgtcatctactctcgagcttttcttcacgagttatactctccctgattccacctgttttcttcttcacaagcgtcgcggttgtgatcgctagctacaactccgccgtggctttggattggcttcctggtatttttccaattcttcgatcctcgtcgttgccgtatcagctcacagctccggctttggctcttcttctggtctttcgtacggaggcttcgtattctaggtatgaagaaggaaggaaagcttgggttgggattattgctggaactaatgatttagctaggcaagttatttgttccgttgatagctccggtgatgaattgatcatcaaagatttgcttcttcgttacattgcagctttccctgttgctcttaaggtaaaaaatattcatctcttgcttgactctattgttggtttctgatgctttaatttcatttgcagtgtcatgtgatttatggttcagatatagcaagagatctccggaacttgatagaagcagatgacttatctctgattcttcaagcaaagcatcgtccgcgttgtgtaatcgagttcatttctcagagcattcagttgctaaaactagacgatgcaaagagagatttgttggtagcattcttgaatccttgaactctctattaaaattctttgctatgaacacttgacaccaatatatgttctttgcgtcattgcaggaatcaaagatgctgcatttacatgaaggaattggagtttgtgaacaactcatgggcattccgattcctctctcttacacacgcttaacctcgaggtttttagtcttttggcatctaactctcccaatcattctctgggatgaatgccattggattgttgttcctgctactttcattagtgctgcctctctgttctgcatagaagaagtactttgtcctcctcctcctccatacttaccctcttttgcttgaatccttaaccattaaaccttctttttggattggaaactctgcaggtgggtgttcttatagaagaaccatttcctatgttggccttagatgagctttgcgatcttgtgcatagtaacatccaagaagctgttaaatctgagaaagtcatacgtaaccgcatcattgcaaagataaagctccatgaattcaagcactcatcaaatggtcgccatagatcttgattaccggttggtgtgagtgatgtaggttgtcttcccgagggagctaagaacatgtgatggcttaggttagctttgatatatacgtatcgtatgttagagtaaaattcttttagaggtaatggagaaagtgtttaagtgttttgagagagttttttaggaaatagaacttttattactttgctttaaacttgaatacaacttcacaacattgcaacatttgagagggggaggaggtatttatagcctccaaactacaaaatatctaaaatattttaatcctaagtctagagagttcttacataagatctagattacattattcaaattatctagattattctattagagtatctagatttttatgtttaaggaggtggaagatgattctagaaaatttctagaatcttttaaggaggtggaaatgatgatatttctagagaaaactctagaacttggatttggccataattaattattggataattgatccaataattaaacttgattcaaaatcaagtttaactttcaacaccccctcttaaacttgattttgctactccaagcaaactcctcatcttgataaagttttcacgcttgagaggcttggtaaaaaaatcggctacttgatcatgtgtcttcacatactccaattgcacgtccttcttgctaacacactctctaatgtagtgatagcgtgtgtcaatgtgtttacttcgatcatggaagaccgggttcttcgccaaagctattgccgacttgttgtccacaaagatcttcgttggttcctcttgtggtaagcttaactccttcaagaggtttcttaaccaaatagcatggcatacacatgacgtagccgctacatactccgcttcacaagtggatagagtgacaattggttgtttcttcgacatccatgtgaaagccgtgtctccaatgtaaaacacaaaaccacttgtactctttcggtcatctacgtctccaccccaatcgctatcgctatatccaacaagcttgtaatcactagtagttgaataatgtaagccaaagtttacagtacctttgatatagcgaagaatcctttttgccgctttgaaatgagttgttgttggatgctccatgtaacgactaacaactccgaccgcatataaaatatcgggccttgtgcatgttaagtatctcaagcttccaaccaagctcttaaaggttgttggatccactccttccccttcttctttctttgatagtttgattccgcattccattggtgtacaaacgggatttgagtcatctatcttgaacttcttaagtacctccttagcatagccttcttgagttatgaatattccattgtcttcttgttttacttcaattccgagatagtaagacatcaatccaatgtccgtcatctcgaactccttcgtcatctctttcttgaattcttcgaatatgcttggattgttacccgtgaatatcaagtcatctacatataagcatgcgatcaatatatcttctttttgaattttgatatagagtgcatgctcatatggacacttgatgaaatctttctccttgaaatacttgtcaattcgagtattccaagctcttggggcttgttttaatccataaagcaccttttttagcctcaagactttgtcttcttcacctttgactatgtagccttgtggttgctcaatgtaaacttcttcttcaagatctccatttaagaaggccgacttgacatccatttgatgtatcttccacttgttttgagccgctagtgagatgattagtctaaccgtttctagacgagcaacgggagcaaatacctcgtcatagtcaattccgactctttgactataaccttttgcaaccaatcttgctttgtatctttccacttctcctttagagtttttctttgctttatacacccacttcacgccaattgccttgtgtccatttggaagtgaagttaactcccatgtgtcattcttttgtattgatttgatctcttcatccatggcatttctccaagtcttcttttcaatggctttttggaaatccatgggttcgcactccgcaaataaacaaaataaggtaaggttttcttgattttcggttacctcatagagctcttgtatacttctaaaacgcggagtcctttcactcgaactttcttctatttgagaacttgttggtgaagttggtggtgtagtaggctcttcacttggtggctcctctcttgttggctccggctcatcttcttcaaaatgtggaaagaagttataatcttcttcatttgagttccaatcccattctccttcttcatcgaacactatatttcgactaataattgtcttcttcgtatcgggattatagagcttgtagcctttggagttgttatcataaccaatgaagatatacttctcacttttgtcatctagtttgctccgcttctcatccggtacatgagcatgagcaatacttccaaagactcttaaatgagaaacaccgggctttcttccgctccaagcttcttgtggtgtttttccggagacactttttgttggagatcgatttaatagataaaccgcacacgcgaccgcttccgcccacaactcttttggtagtctcttacttttgagcatgctccttgccatctcaagaattgttctattctttctttccactacaccattttgttgaggggatcttggcaccgttaattgtcttcgaatgccgttgtcttcacaatacttaagaaactccttggatgtaaattctcctccacggtcggatctcatggttttgatcacaagaccactctccttctcaacatgggctttaaactttttgaaaatttcgaacacctcggatttttctttcaaaaaatatacccatgtttttcttgaaaaatcatcaataaagagaaggaagtaattacttttaccaagtgatttcggcttgatcggaccacacacatcggtgtgtattagctccaacggtttttgtgctcttgaacttgactcctttggaaagctcattttgaattgctttccaagtagacatccttcacacacttgatttggatgatttatacaaggtagccctctcaccatttccttccttgaaagcaactccaatcctccaaaatttagatgtccgaatcgaagatgccatagccaagactcctctttgtaacacatcttaagacattgtgcaatgtcatttcgaatgttgaggacaaacattctatttttcgacattggcaccttggtaatgagattgctttcttggtctcttattgaaaggttattatcttttaatctaatatcataacctttctctaagagttgtccaaggctcaagatgtttgtcttcatgctcggaatatagtaaacgttggaaataaattgatgatctccattcttcaatcgaatgagaatgtttcctttaccttttacctccatcttcgattcatctcctaaagccacatttcctctcaccgattcatcaagctccgcgaacatactttttctcccgcacatgtgattacttgcaccactatcgaggtaccacttatgattctctttttgttcatctttcttgtagctagccattaataacatgtcttcttcttgaattttttcttcaacgtagtgggccttctcctcaaattttttgttgctaggagctttacattcagaagcataatgtccaaacttcccacaattgtagcatttgacacttgatttatcgtatcttgattttgggtgtcctttcccacgacctcttgatgagttttcacctctttggtttgtgttgtcttcatgtggcctccaaccacgtccatttccatatccaccacgacctcgtcctcgtacttgaccaccacctcttctttggtaactttggccgttttcttcttttgtaatttgcatattgaggacttgttcggcgatatcttctttcttcttcttcttttcttcataagcttgtaatgacccaagaagttgctctattgtcatagcttctaaatcttttgtttcttcaatgacggtgacaatatgctcaaattttagatccaatgatctaagaactttctccatgattctcacatcatctagcttctctccgtttcttttaaggttattagtaaccgtcaacactcttgagaagtaatcggagacgagttcaccttccttcatttgtagtgcttcaaattctcctcttagagtttgaagacgtactttcttgacttgatcggcacctttgtaagaggttcgaagcttctcccatgcttctttcgccgacgtagcttcaacgaccttctcgaacgtatcttcatctaatccttgatagattagacagagagctttcttgtctctctttcttgagtctctcaaaccatctttttgagtttgagaaagactaccttcattctccggttcaatgaaacctttctcaactatctcccacacgtcatgtgctcctaggatagccttcattcgtagactccaattatcatagttgctctttgtgagcaccgggacttggaagggaacattgttactcgccatctttaggatcttcaagctctgataccactttgttagagtaaaattcttttagaggtaatggagaaagtgtttaagtgttttgagagagttttttaggaaatagaacttttattactttgctttaaacttgaatacaacttcacaacattgcaacatttgagagggggaggaggtatttatagcctccaaactacaaaatatctaaaatattttaatcctaagtctagagagttcttacataagatctagattacattattcaaattatctagattattctattagagtatctagatttttatgtttaaggaggtggaagatgattctagaaaatttctagaatcttttaaggaggtggaaatgatgatatttctagagaaaactctagaacttggatttggccataattaattattggataattgatccaataattaaacttgattcaaaatcaagtttaactttcaacatcgtatagaagatacaacactttataccagttgataggtaaacgtttgtatatcttccttttgtatatgtttatgttgtatatataatatgcagattcaactttttacacttttacataagtcatagtttgggtcaggaagccagttataccatatttgctttatttagaatccatttactatctcttgaaactaattctttagccttgttgtaatgttgttattgcacctaaatgaataagaatatgaaactcatctaagataattggcaaaactgctcatgaaaagaagagttttaaaaagctacaaaacttgagccaaaagcaaccatgactcagaagtgtatgtctattattcatctacaatctcggaaactaaaaattaccaaaaatcttatatagaactcatattaccaaaaattaaaaaggatataaataaactagggttttgaggggtggtacaaattcgttagctctattgtagtttgcttattaaatatcagacacaattcccaaagtctgattgctcgtgaaattttataaatagcaaagtatttgagcttaaaacaaccatgtcttacaagtgtatgaaataaaagacgaataccatcactagaacataaaagtaatctgagaaaataataaacgggctatgttatacgagcccaaaatcctgaaaactttgacacaagcttcacatcctccaaatgggtacaaggttaacatcctctaaatggtcaagaaaggtgtaagctttgtgactctgaaaagtttccattcctttgattttaactatagtgatagtgttcctatcgggattgtaatagagaaggtagaaaaagtcggatatagtgtttggggacaacacaatttcacctttacgagtcgttccaacgaaacataacttggtctcttcatatacattcctccacggaggaggcaaaacgtagatatgacttgaccattcgtgtttctccgcgtcttcaagaacccatagttgaataccggtgcatacgttgttaggcatgttgggctgaagcttagctaatttacccttgtagtttactagaattgaattcagccgccttcccaagtacaatatttccatgtcatgaccagcaactttcttgatatatttgaatttgtcagatccaaactcaaagcatactacatcaggatacctgtcgtcagaaacaccatggacaatggctaagtaatacaaaacaccattgatgcataccccatcatattgagaaaagccattagtatgctccacaggaacaggataatgtagtatgtcacattcgatcattttccttgacggtttcttcccggtttctaacgtgtgaacttgatgctcttcagaatcagctcgtcctatacatgaacgcgtcatgcataatactttgaaatttttgtcgatcggatcaaaccccaaaaagcttatcactcctttcctccttgttttcactttacgtaagaccacggattcccctgtgctagggttacatatcaatggctcagtaaccgtcgttccctttgtagttcgttgatgtaaaccacataaccagccacgaacaggacgacaaatattagagggacagctaatcgggaaactcatatgcaaatttgcggctataggagacagatcttgaggatgtggtgatgagaagaagaacgtttcgcagtcttttaggcatgtaaacaagatcttcggacgagacgaagatatggtcaagtaggactcggtgaaatgctgacctcgcaatgtggactgccatagcttcgatacgtaacgaaatctagctatagacttgacaggcaatctcaagagtatctcgattacgagatcgaacgggatccgttcggatttctcttcttctttcttttgattcgaacaagatcgtttcttgcgccgtgtcatcatggtggaggcggcttctcttaaaaccctaatgactttttttctcccttccgtctgattaaacctaataataatcataacgcttaaaacgtgtctctcaagatcctgggtctttctgatttaaatgagaatataaatgcctacatgtataaaattaatagtatgagggtatggctgcaaaataattaaaaaatgagctgacgattcaaaacgatgccgttgtggtttcttagaagaaagtgatcgtcttcttcttcgccgggaagctcacaaacggaatatactctactgttccttgcgacgtgccctgaaggtaacttcttctagattcctctcaatttctcatcttatttcttactttttcctcagtctcgtttcttctgagacgatttaagatctgtttcgattctgattttatttatttatttattgctggagttgtagatctgattgtatgtgtagtggatttgatgtaattgctgacgggtttgatcagtggactgtgagagttaaataatttggtttgacattggatctgtacttgttggaattcgatctgtttcttcatctttgaatgtttgatttgttgttatggcaatgctcttgtttatcttcaaatatcttgattaatgctgctcttgatcacaaaggccacttatgtgaattgctactttaagttagtatagggattagccatatctgagccagtgtttgtctctcttttggtcatgaacaggattttgtagaatcaattcacaatggcgtgtatagtagaggatccacaacgtgcaggtcaatcaaatgagacacaaattgcacttataagcggagttcctgatgatatctcaaaatcctgcttagctagagttccaagagaatatcacatggcaatgaaatgtgtttcaaggagatggagagattttgtgtgcagtgatgaaatgtgcgactatcgaaacgagtttaacttggctgaatcttggatttacgcgttgtgccgcgacatatctggcggtgtcttcttacacatgctgaatccgttctcgtccagaaggtcatggaaaagaatcaatgattatccatatatcccaatgagagaaggcatgggttttgcagtattgggtaagagactgtttgtgttgggtggatgtggttggttagaagatgctactgatgagatttattgctatgatgctgctatgaacacttggtttgacgtagtacctcctctttcaactaaaaggtactaatatttctcaggattcttaatcttgccattagcagcaaccagctcgatattgttctttccagcccttgatatttcgattgcatatgcagatgctactttgcttgtgaaacgctggatggaaaaattattgcaattggtgggttaggattgaatccaaacgctaaacgaacttgggacatctatgatcctttgaccagaacctgcaaatcttgttctgatgtgaatattgtccctgaaatggaagattcatttgtaatggatggaaggatttatattcggggtggtgttggaggatcttccactgcagtctatagtgcatctagcgggatttgggaacgtatggatgatgatatggcatcaggatggcgaggtccagcagttgttgtggcaggtgatctctatgttttggatcagacttttggagctaagctaacaatgtggtgcaaggatacgagaatgtggattcatatcgggaagctatctcaattggtgatgaagcagccttgtcggcttgtatctattgggaatagtatctttgtgattggtaaggattgctctactgtggtaattgatgttgagaatgtgaggaagaataagatgaatggagtaatggtgtgttcttctataccaaagacttgggatgatgatatagatgttattagctgtaaatctgtagccatataatgtctagctctctctacttttctcttggctcaaaattcttcgtccttgtaaacaacatatgctgtttctgttgttcatgtaaattcacaagcttgtctgaatcacacaaattattgtcttcctgattcataaacaacaacccccaattcaaaatctcaaaattgggtgataaaaagagttatacgaatgaacatactaatctcacaatgtggttggtctgcagacaagagtgattacactacagtgaagctacttctacattagctgtatttcaggaggaggcaaaaagctatgcagtttttgtatctcctccttgagttcttctagtttcttcaactcgttgttgcttgataatgaggtctctaacatccgatagactggttcgctcacacaccttcctctctctactgtttgccatgagcactcaaatgcatcattggctcttcttcgagcacacaaagcagtggtaaggagttccaatgcgtggccatgagggcaataccctttctccaacatatacttccacaggtctaatcctaaatttacttcaccgttgtgacagaacagcttcatcagcatcactatagttggtgttttcggaaccagagatctttccttcattttctggtaatactcacataccccattgaatccaaactcttttgatttcatcattccgataaacatcgagtggaaagttacactgtcaggctcaattcctttctcttccatctccttcatcaccttaattgcaccactcacatctccacacttcattagactactcatcaaagcattataagctccgcaatcaggtgttaaacctctcttggaaatttcatcgaacagttggcgtgctttgatcttgttcctagctacaccagacccatggatcaatgtagtgagtatctgtaccgtgatatcaaaatctagacgatccatatcttcaaagagcctcaaagcttccccaaagtttcgttttttgcagaacccatcaattctgataccgtaagtgacggaatttggtttaaatcctcgtttcaccatttcatgataaaacagctccgtggccgtaacatcaccagcttccttaaaccctagaagtaaaatgttcatcgtcttcacatctgggttaaaccgagaatgcaatttttcgaaaattgatctcgcttccttcatctctcgctctgtgcaaaacgctcgtagaagaatattgaactcatcgacaccaaatttctttctgaatatctctttctccatcttcacgaaagcttctagagtttcttcataagacccaaatttagcgattttgcagagaagtatgctcatggacttgaaactcaacaaattagggtagtcttttcgcacttccgccattaaagcccaagcttgatcgaaataacgcatccgtgcgagaatgtgaagtgttttctcgaaggaatcagaggtgggagaagatttagagcttttaagtgaatacttgaagaattcgagagctttaaggccattggaatgagcagcgaagagacgaccgagaacttctgatacaaattccggtgacagagaagataaagggatgtgtttggcgagaatgggttgaatcggatgatttgggaatggatgaccattgatgattattgtaatacgttcgatctctgttctgtttatcgatgtagatgataaagatgaagatgatgatagtactggagcaagaagacgacgatacgaatcggaggagatcttctgaagcatttttctctctaccagaaaattagattccgagaagaaatagaaaccttaaagagcccatttcagttaaccgaagcgaaccgaaccgaaattatgccgaaggaactgaaatcgaacatcggtttattttggttattaaaacttgttggacggctccgcgagcttattcatcggcatctgtagagaaggaaggagttcgtttggcagcgacgcaaatttcatgttttgaactggtaatttctcattaatccacgcaaagatatgtgagttcttgttcgtgtatgaatttacttgcggttctctagctcaaagtttggttcactttgtatatgcacggaaggtgtttgttgatttgtctgtgaaaatctaatgattccatttgtgatgaaattgtgtcacatagtgtctgtggggagagttttagtgggtttttatctttaaatgtttttacttgtattctcgcgttagatattaggtttagcctaaacctgcagctgcacgaagcccgcatcctcaaactggtaaatttcaacctcaaggcaattttctctgttttgtttctggggttttgagatttttgctttatgtgtgcttttatctgtgatttaagcattgttgtttcatagattagttgtttggttctaacctgatttaggaatagctagagaattagaatcttaagtatctgagacacgtttcgagattattactttgactggaatatgtgaatgtgacgagaagtgtagttaatgaaaattgagctcgtttcatgtgtgtgcttgttctctccttgatatcagagaatagcttcttgttttaggcttaactaggatgcaaactagggcaattcaggaccaccaagattcttaaggtctgtgaaaattctcatcttttgatttatacagagtgtagatgtctatctttgcagagtcagctttgaatcagtctatatgtcaagactctatattgctgaccttatgcgtatatcttgtgctcacattgcttataggtcacagaatatagttcccacaagtcacttctaagactattgttgaaaaatctaattgatccttattctcatcatttgattgaccgcagagagtagatgtctatctttcattggttctggggtcaagttgcatgattgattagttaaaaggttagacttctccgtggtaacataagtgttacaattcatattattattataaggtttaagttgattgtgattgtgaatgaagtcatgcagtttttttttatatatacatagatctaaaacacttaataactaatcaccgttggaacattatataacatacataagagactgactaactgagtaatttaaggtgcagtctatgaactaacttgttaggaatgcttgaaaggatgttagttttgatgtgctttaacaagtctcttaccttgttctgaatgcattgatgattgctaattagcctaaaccgtttagggaccaattcgaaaggtttggtgaaagagaactccttaggttaacttgttgcattcaactagtgattggccaatgtgactaagatttaacaagagcttaccgaaaaaatcgcttgtgaacttgtcttactgcagtaaagtgaagtaagcatatcacttctgggactataggaagttgggaggtggtgatactctagtagcaatgacaacggaaacggcaaagaagaagggaactccacagatttttaaaacagataaggcacaaaaacttgtaagattttttcctcattgaagcacaaaaatccttgaatcaaatctagatatttcttgctttcatataatttggtttcaatctcaccgctttgagtttttgcggtttgcaggctgagaagtgggttgccagtatgacgaggcccacagaggatgatcctattgagactgcacaagaagaacgaccacacaggtgaacgcaaatatctttttacatgtaaatttgcatttcgtttgagaaaatgaagctaaatataagtatcgttgtaacccctgtgttaggcttggacttggtgctcaagtgtcacgacaaacaaagcgtagaccttcagacgaccctctcgatcagaaactagaagccaagtttgctgcagtgaaaagaaaaaatgcaagattggttgcagaagctgctggttctagtaagaatgccggtgatgacagtgaggatgatgatgaatcagaaagcaaaagccaagcatttggtaagaaaaagaaaaatacaagtactcctcattagagtttgtgatgtactatagtaaaaagtcatggccttgtatttgttttgattgttggataagagctaaaacgcataattgtagttctattggaacatggtgcttggtaaaaaaacatcatctttgtcttatttaagttcaagcctcatgttataccactctatagttataactcatgcacaactctcttggccgagtaaaactacagatgccactggaaagcaaaaacagagtatggaagtgaaagaaacaatataagagattctgaagtctttgtttatgttaaaaaagctgtggttgtgccactgcacaagaatgtcaagagatttgaccatggcagtggcaatgaaactgtacaggatagacaaaaggttaaaacaaagagcctcatcacaggttgtcgctgctgggttcctgcatcggttcaacttgaaccatgtctctgcagctcatgatgatctcttctactaactcatcaaggatcatttcacttgtataggaacctagacaaccgatctcaaaccggagatccatccagcttccagttctagccatgtctttttttactatctgatctaaagtgtgagggaaaggcaaaggttggagatgccagtaaactccttcttgtgctactttagctgcgatttccatgtctgagatcaactggacctcaggtttcacgaatgaaatccaaggcccgggattgaattcattccaacagaagtccataagaacttcattgatacagtcgtaaaggagattcttatcgtcgcagagctgtgtagaagaaaaaactatgccatctgttagttctagctcaagaagctgttccgagtaaaagggccttgttaaaagctcttcccagctcaaggctgcagatttcacaacggcttcaatgtatgcaagtgtcaattccttgtcatctatggttgcttcgacattgttgtccttctctggttttggagaatcaacttcatcgaatcttatacagagtggttgcatccgcattccagctaaatgagaattaagaaacagtagtaagaaaccaagttctgatgaatcaaccttgagctgatttttaaagttcttaaatacctgaactgaaacttgtgcttgttgttgggctactgtcatcatctgtgaacaaagtctcgagcacagacactggacttaactttccctgcgcatcagtggcagtttctttgcattcagtcaaccttactgaacaagttgttggagattctagaggagaagccggcgaatgcgcttggtggttcaacatttcctggaacaagataaaccatgaaatctaaaatttcattcaagaaaaacagagaatgtattcacttatcacatacacaagttgtctaaccttttctacatcttcatcaacattttcgacttctcgggaaacggaagagctacaagtttcagataatggatctatctcactctcctcatcattgtctatattctcagtttcattcccatagtctgaaaccatttagtaacattttgtcagaacaatattaagatctgctggggatagaaagaaacatctcaaaaagagaagaagaaacaaatcacctctaggaacagagacatcaatggtaaataatgtatcgtcgtctttatccgaatcttcatcaatcagatcatttgtagctgaactggtttctggtgtttgtagaatctctggttgctcagttgtctgacttagagtactaaccaaatcatgtgccgggatcaatctaggactgtctgctggtgaacagaactcagggagagaaagaatcttccccaggattcttggcacttccttgtctggtaaattcacatctatatctccatttgcaagcatttcagacaagtgtttcttggctgcaatatataagccagacattatcttctttgaatcttcgcttgagtagatagtctcctctttaccatcctcggtcgttctttcgtcacagaacggttcttctttatccgaaacatcatgcttctcctctgatttactctgtatctcttcttgcgtagaacagttttggctcctcttatcaacagaaacatcacatgacttctttccaacagcagattgtagtcttctcttgactaaaccgataaggaagcgagaaaatgttctcccggttttggacttgttggcagtagaatgcagtccagttgaagaatcaacatccaaagtatttggaccaggtttcaaaaccacaattgtttttgcaacttgagatctgtttctcctctcttctgatttccatttcctgctgaaaaagttagctttcctcttcggtatcaccaccgcctcttgcttcgatactacttcaggcttttcttcttctactctcttagaatctcccaaggtttgagcatcttcatttgaaagcttcttcttgaggaatgattcttcttcttcagaacccaaaacatgaaaagcctccaataagtctttacaggtttggatctctccttctttctgagctatcaaccgtttgataatctctttgaatttctcttcagattcatcaactagactcttacaaacctcagtctctacatgttcatcaccggcgaccgaaacatggatatcttcctcatcaacactctcatgagagctctcacaagaacatgtaatctgcttcatttcattacctgcataaatgagtaatatataggatcagaagactgattataacaagaatctttgttagacttagacacataatgttaaacgaaacaaaaacctgaaactcgtttgcttccacgtttgttatccatcaagagacgtttctggttagatccaaagagactaatgaacacccacacacatcctataccattgataccttctctttcaagatttctccgacaatttctctccatttaacagttgacacttaaatagagaagtggtaaggaaactgttaatacaagcaaagaataaacttatgtctgaatataataaaaaaaaaaaagattcatcatgcaaatgatctgttaaaactctgttttcatgattttttctcatcagtcacacaaacgcattgtgatcattactgttcataattcgatacctttcctttacaagcaagagaaccttttttttttgggatcattgtgaagaagaagaagaaaaagaggtataaagattaaagacaataccttttagaatctgatccgatacttgggaaaatctgataatgcagctggagagagtgattaataagaaactttcttttcaactttttagctgttttccacgaaaacaaaaagaagaagaagaagaagaaagctttcaccggattttcccggaaaacgttcgctgaatttgcggctttaatattttataaaacgaaataacgaagctcgaaacacgagggcaaatgttgaacacagtagtgtctcaatttagatgaagaagacccatatttctctcaccagaatatgaaaaccactgtgaagattaaaatagaaaagagtgagagaaaatcaatatagatttataaaatggagaattaggcataaagtcacacgagttgaataaattactagaaaaaggaccaacctagattatgagtaaatgtgctgattgtatcaagtttcatcatttacacatctacgaagccaataaagagtaaagatttttcttttctttttttgttggggttaatattgacgtggttcacttgaaagtgcagcagccattggaaacctcgcccataactctatatacattatatatacaaatcattgtcattgtatatacatgtgtattagtgtcttcacgagactgtaatgaatgtgtatagatatatatgtatttatacgtatatggacagagaaggtttggtgatgcaggtaggtaggtaatggtcctctagaaggagtcgtcgcatgcagcgagtagtaccgtacataactaatgtgtcgggaggggtattatggtgatttcgttcaacagaaattgcaaagtcaaaatagtttatatcaaagaaaatcaaaataaaaaaagggagagagaaattagaataaatgaagaaaaagtcaaaaatgacattagagtctcttccactatggacaaatttttctttgttaataatgacacacatatacacgaacacgacatttcgattctgagcataacatttttaaaaagttatgtgtctattaagaaattaattatgctgaagcatgaagttgatggtttaatggctaattctcctatgtcaccaacctagtttgttagtttttctggtcacacggaagataaaacgtatggtttataatccataaaaaaaagtctattttatatgttctgctatagaatgcgactaaatagggatgtgaaaaagagtccgttacgatgttaccatccaacgattaaaccaatatatagctctcttttgactaatggcgattaacgtttgataactaagagattacatattgtaggttatcatttaaaaacaaattcggagttatcattttgttacatttctatttttgacgtaatatcattttgttataatgttatttgtagttcatcttctgtcgttacatatacgtttgtagtttgtagaaacatgtttgcagacttgcagtatactaaactaatatagtaatatattatataaagaaatgataatgacaaattgacaataataatatttctcagagtcatactaaaatattaaaataacttaatttttaagagtttcgttcatgcatggcttttttgctcagtcttgttcatgttcatgttccaaattaagataccaaaaaaaaatacacttgattttataatccttaatttttatttactgccccgaggtttgcctaccctctaattacaccacacacatttagatcagactctaattaagaaaaccaatagaatagcacttaccaaactttctttatgatatgactctgacatatactataattagcataatgcaatatacaacgattttcatctttgtttagcccactagctaatcacctactcattaatttttgttttttctgtatgcagatatatatgtatatagttttgttttgtacttatatgcactagtagttataatgtccatttacgtaatgtagtaatctattgaaattaatatttgccgacagttttatacaaaacacacacaccctgaaagttctataatataatgaacatctacatctttgaaattgagctaagaaggtttattttgtattagcgatcgatgattaagaaatatgcgttgagatacttgaagataatgaacgacgacgtttgtctttgcatctgtacgtacccaacaattaatattagaaaacaaagtatcactacaaagctgtgtaatagtaaagagataccaatcattttatttttcataggattctcctccaaacccataaccttttcagtttgtcttaaaggtgcattagaaggataaattaaaggtttcattttctttttatagagcaaactatgtctagttcaaaaagagagactaaaatgtgtctgttaatctttctgtacttttttgtagattgatgacatatatatacataaacgaaatcatccctaggtttatatatgtattaagtacatcaaataaaatttattgttttcatttaatttacataaatgaaatttattgtttggtggctgtaaatcaaataaaatcatcacaacaatttttgcatcgcacgaaaagttatctagtgcgacataataaagctaattattggggttttaaactattttgcatgataaattattggagtacatgtttatatataacactgaagctcgtcttcgtttttttgggtcaatatttccaaatcttcgaaaaatactaaaaactttgatatcctaaataagtttatctatctatctatctatctatctatctatatatatatattattctataagtttataattacttttgataaaacagttctaacataacgttttaaaccctatacatacaattttgtagaagaaaaagtcgtaatacatatatttcaatttccaaagtcgtcatattttaccaaaatttcgataaaataataattaagtactttaatttatatgtcattactaaactgaaatccatcagcatgcaatgatacaatcacacaaccgatgtgggaacgtaacattctggaaatgttaaaaatgcgtaagatttttctgttgaaactaaaacatcactagtgggcggtttcatattattagcactattaattatcactttatacaaattttgttttttaatgctttattcggtccacgaaaattggctgtttgcgaagtaaacacaccaataaattaacgccatctccttatatatcagataatgtgattgatcaataggtacttaacaactaactcaccccaaattgtatatcaattaattagttgtacataattatttcaaattaatatagctatatattatattcatgttgttcataacaagcttaaaagattatggaaaaactgtacattgattgagttaggttcgtgcgatgtatgtctcttactaaaagaagtattaagcgttgtatatcatatcgatatatccacaaaacattattaatatcatgattaaagaaattatcatatcgattaatatctaataagcattaaaatatatgtgtctgtgtgtctagaatgattaggaatttatgatattttaaacccataaacaagacaaaaactaagaaatggacgaagagagtcatcatagtctcaccaactatatatgatccaaccatatatgttttaaactttaatctttaacctaaatatatttactgggtgacagaaagcaagattatgtgtattggacacgtttttatattttatctttgcttaacacaaaattatcacgcttagatacaacaaagttgaatacaaaccggaaacaccaagggattgtttataaaatttcgcagaagaaatatctcttttttggatgaatggctcataaaattatttatgggtagttttatacttctattatattttgaaaaaggatcttggaaaaacattagctcaaatgattcctttgaaaatagaaggtcttgggccgcacattttaatgctactactggcctatcccagacggcccaaaattataatgggcctaaaataaacaaaattctcttctggcccattgaccacattcgaaccccaaaagttaaaatcacaaagcaaaaggggctgacgttaaaactcaaaagttaaggggctaaacttaaaataaaaagctaatggactaattttaaatctcaacgatacagaacatgactaaaaatcaaaaccacaaagttcaggaactaaagctaaaatcacaagtttagggactaaaattattatctaatgtgatataccttggttgactttaaattggtgatctcagtgatgatgtatttgcttgaatactttatatgtattagaatttagagtgtaaataactgaaactaaaataaatttctctgtagatgaactaaacttgtggacgttagctttgtttgctcaatgaacttgaattaaacgaaactcttaaagcttatcacgcgggaaaggagacgaggtcgttaaaaaaagcggttgactgttagacataaccgtcaaaacatactaaaagttgacgacatcaaacctgaagaaagaacgcctgaaatttatctttagttacatctgaaatttcgatctcactttcgtaatgttgacatttctcttgacaatgacagagaccatcactttgagattctttggtcggctctcaatattgaaagtcagaggcttatccattattatctgattatgcttctgcggtaaggcttttaaggaacacggtttcgtgattagatacgtgtttgtcttataattgaaaccttttcctcttatccctatatatactatatacttggctcatcaaatactctgttagatcaaatcttaatttatcgcaaaaagtattctgttcttttttatatggaccggagtcacaatgacattaaagattccgatccaagagatggtgaaaatggttggctctttaagatctcatggcatcgatatccctgaatcaatggaaatcaacaaaaaagagaagatctatgtagcagtgacagagaaagatctagaaagcaagtctagtctcgtttgggcgatacagaacagtggaggcaaagagttttgcatcgtccatgttcatcaacctatccgtaagtaattaaacatccacaagaatctttttatgcagaggttaaggattatttggttaaatttggagtatcttgtgttcttgatttcaagcgggggagatgtttcacgagcagaaattgcgtctctacagaaaagagaaggacaaagcacataagaattcggagaagtaccttcaaatatgcaggcaaatgcaggtatctatatccttacttcttatccatgtgttttgatggtagaagagatgtttggttttaaatttccagtcaaattgtgaattaggtcactgcagagatcatatatattgaaacggattcggtagagaaaggtatcctccaattgatatctcagcgcggagtcaccaaactcgttatgggagcagcagctgatagacactattcaatgtaagtggctaattagtgtagactactaagactttttgtgatctaatatatagattaaaaaacgttgattttgcaggagaatgagagacttaaagtccaagaaagctatttacattcacagagaagcgcctgccacttgtcttatatggtttacgtgcaacggttacctaatttgttcaaggtttggctaattaagtcaattcttcatcttcttttgtgttagctgaacatactagtcactgttaaggactggtctttgagttttacttgtctcacaagtcacactacaatgcagggaagctagaagagcaaataacttgtatctagaatgtgcatcgtcaaattctttgagtcaatccgacataactagaggaactgaaagtatagttaaagatgatgatcatctgatcaaattagctgtcacagaagctgaggcttcgaaaaggaaagcacgctttgaggcatgtaagcgcgaagaagctgaaaaaactgcagttgatgcactcaaaaaggtatgtaagttccttttaacatgtttttttagcttagaagtatcaaacttttctaactcttatctataacaaaaacaattgtaggctaaacaatgggaaaatgtgtattttgaggagttgaagcagaggaaagaaacagagaaggcactgaggaaaagaaatgacgaacttgaaaagatgagatcagaatccgagacccaaataaccgaatcttatactgtgattagaaagcttcaagaaaagaacaacttatcaatggaaacgtttagaggaatcagagaagaacaagaagagttgaagataaagcttagagaagtatcaaagctgaagggtaagcgcgaggaagaggaagcttctacctctaaccaccgtgaaccgccacaatactttatttgtcccattacacacgtgaggaaacgttacaagatcaatgaaaactaaatgatcaaaatgttataattttaagaaaagaaaaaaaagaccaacagttttgttatttgtaggatataatggaggatccacatgtagcagctgatggatttacatatgaaggagaagccataagccgttggtttgagagaggacatgagacttctccaatgataaacaaaaggcttcctcacacgagcttggttccaaatcttgctcttcgatccgcaattcaagaatggcttcaacttcgtgaattattgaacagaccctctgcttgcagagagatataagtgattcgccttaatcagagtgacaaatttatcataaatcaaaacattttcaaattttgtcaattcaactttctctaattaatgtttatattattatatcaatgcacagtgcgttacaacacatatgcttcttagttaataggagttgttactctatcactagtattattggtttggtcactcttttttggggtggttacgcacgtatatactaaatatagactatgatctacttagattttaatatttgtgatgaattgtgaactataagaatatagtggttatgactgaattttttcatagatttaataaatcttccctcatggcataatattagttagttaatatatagtggtatagtggtcactattttatttgttaaatttggtttgatgcattggtggtcattataacaagcataaaaaaacactaaagctagtattggattcatccacgtttttgtaattttgttatttgatggaataataataataaatttagcctgaatcttgcatagatttagttctcttaattaatcttccctcatgacgtttaatataacggaaatatggtggtttggttgcccactacacactatatattcctttgatgccgtgatagtcattataacaagcacaaggaaaaacactaaatcgtagaagaagaaaagaaaaacaaacaagcaatggattcaacagccaccgttgcaagtgatcgtcttagtcaactaaactctttcgaggagactatgacaggcgtgaaaggccttgttgattccggaatcaaagaggttccagctatgttccgtgagcctccagctattttagcaagccgaaaaccaccactagctttgcagttcacgatcccaaccatcgatctgaacggaggagtagtgtactacaagaatcaagattcagttacacggagaagcatggttgagaagataggagatgcagcggagaaatggggtttcttccaggtggttaaccacgggatcccgctcgacgtgctggagaaggtgaaagaagggattcgcgcgtttcacgagcaggatgctgaattgaagaaacggttctactctcgtgatcacactcgaaaaatggtttactatagtaacttggatctcttcaccgctatgaaagcgagttggagagataccatgtgtgcctatatggccccggatcctcccacatcggaggacttgcccgaggtttgtgggtaaggtttccatatatatatgagcttaattatttatagctaataacatttttagaaaggtttttaaaaaaaattttgtattattttttaaaaagtgaattatagaatttttaaagtaaatccatttgtatttttcatgaatctgaattgatgttttgatatgtggcagggagattatgatggagtatgcaaaggaaataatgaatttaggtgaattgatctttgagcttctatcagaggctctagggttgaataattctaatcacctcaaagacatggattgcagcaagtctttggtcttgttcggccagtactatccaccttgtccgcagcctgaccatactttaggcttaagcaagcacaccgatttttcttttctcaccattgttcttcaggggaatctcggtgggcttcaagttctccatgataaacaatattggatcgatattcctcccgtccctggggctcttgtcgttaacctcggagatcttctccaggttaaagaagtgactttttagctttgtaacattttagctctatctttgttaggaatatcatatatgaaataatatggaatttaaagtagtaagtaaaagatataggctagttatgatttgaatggagatgtgagttgattttttatttgaatttgtgcagcttataagcaatggcaagttcataagcgtggagcacagggtgatagcaaatagagcggctgaaccgcggatttcagtgccatgtttcttcagcaccgtgatgagggagagccatcgagtatatggacccataaaagagcttctgtcagaacaaaaccctcccaagtatagggacaccaccatctccgagttcgcaagcatgtacgcgtctaaagagatcaatacctctgcgttactccgtttagagatctgatacatcgaccaaagaaaatgtctttgtattaaataatgttcgtatgcgtttactcaatttcaagatttgagacatcgagcaaataaactgtacctttgtaacgtaatgtgtgtatgtgtgtcactccatgcacggatatgtcgacgtaaaacatccgtaaaatgtacccttgtaacataatgtatgtatgtgtgtcactctatgttaggatatgagacattgaccaaataaaatgtctttgaaaacacacaccgtttggcccattgacccactcttcttttttgtttttacatcaagtagtcattttttgtttatatggtgctagttataataacccattgctacctaatcttttaatacacacgcacatttgttttaagtatattttaatgatataatcgacattgattacttccttgagtttgattaggtcgttgacactcaaagggcttaaaagtaaaaccgcacaagaaaataatacatatacatgacattccagaacgaatattcgaaagaacagagtaacacaagaaagggatgacacatgccttaatcggatcttttctttcttaattccatattattaaaaacattttccggagaagaagacaaaaccaaagctt

SEQ ID NO: 1095 - DNA, 95993 bp, Arabidopsis thaliana
gaattcgagagctttaaggccattggaatgagcagcgaagagacgaccgagaacttctgatacaaattccggtgacagagaagataaagggatgtgtttggcgagaatgggttgaatcggatgatttgggaatggatgaccattgatgattattgtaatacgttcgatctctgttctgtttatcgatgtagatgataaagatgaagatgatgatagtactggagcaagaagacgacgatacgaatcggaggagatcttctgaagcatttttctctctaccagaaaattagattccgagaagaaatagaaaccttaaagagcccatttcagttaaccgaagcgaaccgaaccgaaattatgccgaaggaactgaaatcgaacatcggtttattttggttattaaaacttgttggacggctccgcgagcttattcatcggcatctgtagagaaggaaggagttcgtttggcagcgacgcaaatttcatgttttgaactggtaatttctcattaatccacgcaaagatatgtgagttcttgttcgtgtatgaatttacttgcggttctctagctcaaagtttggttcactttgtatatgcacggaaggtgtttgttgatttgtctgtgaaaatctaatgattccatttgtgatgaaattgtgtcacatagtgtctgtggggagagttttagtgggtttttatctttaaatgtttttacttgtattctcgcgttagatattaggtttagcctaaacctgcagctgcacgaagcccgcatcctcaaactggtaaatttcaacctcaaggcaattttctctgttttgtttctggggttttgagatttttgctttatgtgtgcttttatctgtgatttaagcattgttgtttcatagattagttgtttggttctaacctgatttaggaatagctagagaattagaatcttaagtatctgagacacgtttcgagattattactttgactggaatatgtgaatgtgacgagaagtgtagttaatgaaaattgagctcgtttcatgtgtgtgcttgttctctccttgatatcagagaatagcttcttgttttaggcttaactaggatgcaaactagggcaattcaggaccaccaagattcttaaggtctgtgaaaattctcatcttttgatttatacagagtgtagatgtctatctttgcagagtcagctttgaatcagtctatatgtcaagactctatattgctgaccttatgcgtatatcttgtgctcacattgcttataggtcacagaatatagttcccacaagtcacttctaagactattgttgaaaaatctaattgatccttattctcatcatttgattgaccgcagagagtagatgtctatctttcattggttctggggtcaagttgcatgattgattagttaaaaggttagacttctccgtggtaacataagtgttacaattcatattattattataaggtttaagttgattgtgattgtgaatgaagtcatgcagtttttttttatatatacatagatctaaaacacttaataactaatcaccgttggaacattatataacatacataagagactgactaactgagtaatttaaggtgcagtctatgaactaacttgttaggaatgcttgaaaggatgttagttttgatgtgctttaacaagtctcttaccttgttctgaatgcattgatgattgctaattagcctaaaccgtttagggaccaattcgaaaggtttggtgaaagagaactccttaggttaacttgttgcattcaactagtgattggccaatgtgactaagatttaacaagagcttaccgaaaaaatcgcttgtgaacttgtcttactgcagtaaagtgaagtaagcatatcacttctgggactataggaagttgggaggtggtgatactctagtagcaatgacaacggaaacggcaaagaagaagggaactccacagatttttaaaacagataaggcacaaaaacttgtaagattttttcctcattgaagcacaaaaatccttgaatcaaatctagatatttcttgctttcatataatttggtttcaatctcaccgctttgagtttttgcggtttgcaggctgagaagtgggttgccagtatgacgaggcccacagaggatgatcctattgagactgcacaagaagaacgaccacacaggtgaacgcaaatatctttttacatgtaaatttgcatttcgtttgagaaaatgaagctaaatataagtatcgttgtaacccctgtgttaggcttggacttggtgctcaagtgtcacgacaaacaaagcgtagaccttcagacgaccctctcgatcagaaactagaagccaagtttgctgcagtgaaaagaaaaaatgcaagattggttgcagaagctgctggttctagtaagaatgccggtgatgacagtgaggatgatgatgaatcagaaagcaaaagccaagcatttggtaagaaaaagaaaaatacaagtactcctcattagagtttgtgatgtactatagtaaaaagtcatggccttgtatttgttttgattgttggataagagctaaaacgcataattgtagttctattggaacatggtgcttggtaaaaaaacatcatctttgtcttatttaagttcaagcctcatgttataccactctatagttataactcatgcacaactctcttggccgagtaaaactacagatgccactggaaagcaaaaacagagtatggaagtgaaagaaacaatataagagattctgaagtctttgtttatgttaaaaaagctgtggttgtgccactgcacaagaatgtcaagagatttgaccatggcagtggcaatgaaactgtacaggatagacaaaaggttaaaacaaagagcctcatcacaggttgtcgctgctgggttcctgcatcggttcaacttgaaccatgtctctgcagctcatgatgatctcttctactaactcatcaaggatcatttcacttgtataggaacctagacaaccgatctcaaaccggagatccatccagcttccagttctagccatgtctttttttactatctgatctaaagtgtgagggaaaggcaaaggttggagatgccagtaaactccttcttgtgctactttagctgcgatttccatgtctgagatcaactggacctcaggtttcacgaatgaaatccaaggcccgggattgaattcattccaacagaagtccataagaacttcattgatacagtcgtaaaggagattcttatcgtcgcagagctgtgtagaagaaaaaactatgccatctgttagttctagctcaagaagctgttccgagtaaaagggccttgttaaaagctcttcccagctcaaggctgcagatttcacaacggcttcaatgtatgcaagtgtcaattccttgtcatctatggttgcttcgacattgttgtccttctctggttttggagaatcaacttcatcgaatcttatacagagtggttgcatccgcattccagctaaatgagaattaagaaacagtagtaagaaaccaagttctgatgaatcaaccttgagctgatttttaaagttcttaaatacctgaactgaaacttgtgcttgttgttgggctactgtcatcatctgtgaacaaagtctcgagcacagacactggacttaactttccctgcgcatcagtggcagtttctttgcattcagtcaaccttactgaacaagttgttggagattctagaggagaagccggcgaatgcgcttggtggttcaacatttcctggaacaagataaaccatgaaatctaaaatttcattcaagaaaaacagagaatgtattcacttatcacatacacaagttgtctaaccttttctacatcttcatcaacattttcgacttctcgggaaacggaagagctacaagtttcagataatggatctatctcactctcctcatcattgtctatattctcagtttcattcccatagtctgaaaccatttagtaacattttgtcagaacaatattaagatctgctggggatagaaagaaacatctcaaaaagagaagaagaaacaaatcacctctaggaacagagacatcaatggtaaataatgtatcgtcgtctttatccgaatcttcatcaatcagatcatttgtagctgaactggtttctggtgtttgtagaatctctggttgctcagttgtctgacttagagtactaaccaaatcatgtgccgggatcaatctaggactgtctgctggtgaacagaactcagggagagaaagaatcttccccaggattcttggcacttccttgtctggtaaattcacatctatatctccatttgcaagcatttcagacaagtgtttcttggctgcaatatataagccagacattatcttctttgaatcttcgcttgagtagatagtctcctctttaccatcctcggtcgttctttcgtcacagaacggttcttctttatccgaaacatcatgcttctcctctgatttactctgtatctcttcttgcgtagaacagttttggctcctcttatcaacagaaacatcacatgacttctttccaacagcagattgtagtcttctcttgactaaaccgataaggaagcgagaaaatgttctcccggttttggacttgttggcagtagaatgcagtccagttgaagaatcaacatccaaagtatttggaccaggtttcaaaaccacaattgtttttgcaacttgagatctgtttctcctctcttctgatttccatttcctgctgaaaaagttagctttcctcttcggtatcaccaccgcctcttgcttcgatactacttcaggcttttcttcttctactctcttagaatctcccaaggtttgagcatcttcatttgaaagcttcttcttgaggaatgattcttcttcttcagaacccaaaacatgaaaagcctccaataagtctttacaggtttggatctctccttctttctgagctatcaaccgtttgataatctctttgaatttctcttcagattcatcaactagactcttacaaacctcagtctctacatgttcatcaccggcgaccgaaacatggatatcttcctcatcaacactctcatgagagctctcacaagaacatgtaatctgcttcatttcattacctgcataaatgagtaatatataggatcagaagactgattataacaagaatctttgttagacttagacacataatgttaaacgaaacaaaaacctgaaactcgtttgcttccacgtttgttatccatcaagagacgtttctggttagatccaaagagactaatgaacacccacacacatcctataccattgataccttctctttcaagatttctccgacaatttctctccatttaacagttgacacttaaatagagaagtggtaaggaaactgttaatacaagcaaagaataaacttatgtctgaatataataaaaaaaaaaaagattcatcatgcaaatgatctgttaaaactctgttttcatgattttttctcatcagtcacacaaacgcattgtgatcattactgttcataattcgatacctttcctttacaagcaagagaaccttttttttttgggatcattgtgaagaagaagaagaaaaagaggtataaagattaaagacaataccttttagaatctgatccgatacttgggaaaatctgataatgcagctggagagagtgattaataagaaactttcttttcaactttttagctgttttccacgaaaacaaaaagaagaagaagaagaagaaagctttcaccggattttcccggaaaacgttcgctgaatttgcggctttaatattttataaaacgaaataacgaagctcgaaacacgagggcaaatgttgaacacagtagtgtctcaatttagatgaagaagacccatatttctctcaccagaatatgaaaaccactgtgaagattaaaatagaaaagagtgagagaaaatcaatatagatttataaaatggagaattaggcataaagtcacacgagttgaataaattactagaaaaaggaccaacctagattatgagtaaatgtgctgattgtatcaagtttcatcatttacacatctacgaagccaataaagagtaaagatttttcttttctttttttgttggggttaatattgacgtggttcacttgaaagtgcagcagccattggaaacctcgcccataactctatatacattatatatacaaatcattgtcattgtatatacatgtgtattagtgtcttcacgagactgtaatgaatgtgtatagatatatatgtatttatacgtatatggacagagaaggtttggtgatgcaggtaggtaggtaatggtcctctagaaggagtcgtcgcatgcagcgagtagtaccgtacataactaatgtgtcgggaggggtattatggtgatttcgttcaacagaaattgcaaagtcaaaatagtttatatcaaagaaaatcaaaataaaaaaagggagagagaaattagaataaatgaagaaaaagtcaaaaatgacattagagtctcttccactatggacaaatttttctttgttaataatgacacacatatacacgaacacgacatttcgattctgagcataacatttttaaaaagttatgtgtctattaagaaattaattatgctgaagcatgaagttgatggtttaatggctaattctcctatgtcaccaacctagtttgttagtttttctggtcacacggaagataaaacgtatggtttataatccataaaaaaaagtctattttatatgttctgctatagaatgcgactaaatagggatgtgaaaaagagtccgttacgatgttaccatccaacgattaaaccaatatatagctctcttttgactaatggcgattaacgtttgataactaagagattacatattgtaggttatcatttaaaaacaaattcggagttatcattttgttacatttctatttttgacgtaatatcattttgttataatgttatttgtagttcatcttctgtcgttacatatacgtttgtagtttgtagaaacatgtttgcagacttgcagtatactaaactaatatagtaatatattatataaagaaatgataatgacaaattgacaataataatatttctcagagtcatactaaaatattaaaataacttaatttttaagagtttcgttcatgcatggcttttttgctcagtcttgttcatgttcatgttccaaattaagataccaaaaaaaaatacacttgattttataatccttaatttttatttactgccccgaggtttgcctaccctctaattacaccacacacatttagatcagactctaattaagaaaaccaatagaatagcacttaccaaactttctttatgatatgactctgacatatactataattagcataatgcaatatacaacgattttcatctttgtttagcccactagctaatcacctactcattaatttttgttttttctgtatgcagatatatatgtatatagttttgttttgtacttatatgcactagtagttataatgtccatttacgtaatgtagtaatctattgaaattaatatttgccgacagttttatacaaaacacacacaccctgaaagttctataatataatgaacatctacatctttgaaattgagctaagaaggtttattttgtattagcgatcgatgattaagaaatatgcgttgagatacttgaagataatgaacgacgacgtttgtctttgcatctgtacgtacccaacaattaatattagaaaacaaagtatcactacaaagctgtgtaatagtaaagagataccaatcattttatttttcataggattctcctccaaacccataaccttttcagtttgtcttaaaggtgcattagaaggataaattaaaggtttcattttctttttatagagcaaactatgtctagttcaaaaagagagactaaaatgtgtctgttaatctttctgtacttttttgtagattgatgacatatatatacataaacgaaatcatccctaggtttatatatgtattaagtacatcaaataaaatttattgttttcatttaatttacataaatgaaatttattgtttggtggctgtaaatcaaataaaatcatcacaacaatttttgcatcgcacgaaaagttatctagtgcgacataataaagctaattattggggttttaaactattttgcatgataaattattggagtacatgtttatatataacactgaagctcgtcttcgtttttttgggtcaatatttccaaatcttcgaaaaatactaaaaactttgatatcctaaataagtttatctatctatctatctatctatctatctatatatatatattattctataagtttataattacttttgataaaacagttctaacataacgttttaaaccctatacatacaattttgtagaagaaaaagtcgtaatacatatatttcaatttccaaagtcgtcatattttaccaaaatttcgataaaataataattaagtactttaatttatatgtcattactaaactgaaatccatcagcatgcaatgatacaatcacacaaccgatgtgggaacgtaacattctggaaatgttaaaaatgcgtaagatttttctgttgaaactaaaacatcactagtgggcggtttcatattattagcactattaattatcactttatacaaattttgttttttaatgctttattcggtccacgaaaattggctgtttgcgaagtaaacacaccaataaattaacgccatctccttatatatcagataatgtgattgatcaataggtacttaacaactaactcaccccaaattgtatatcaattaattagttgtacataattatttcaaattaatatagctatatattatattcatgttgttcataacaagcttaaaagattatggaaaaactgtacattgattgagttaggttcgtgcgatgtatgtctcttactaaaagaagtattaagcgttgtatatcatatcgatatatccacaaaacattattaatatcatgattaaagaaattatcatatcgattaatatctaataagcattaaaatatatgtgtctgtgtgtctagaatgattaggaatttatgatattttaaacccataaacaagacaaaaactaagaaatggacgaagagagtcatcatagtctcaccaactatatatgatccaaccatatatgttttaaactttaatctttaacctaaatatatttactgggtgacagaaagcaagattatgtgtattggacacgtttttatattttatctttgcttaacacaaaattatcacgcttagatacaacaaagttgaatacaaaccggaaacaccaagggattgtttataaaatttcgcagaagaaatatctcttttttggatgaatggctcataaaattatttatgggtagttttatacttctattatattttgaaaaaggatcttggaaaaacattagctcaaatgattcctttgaaaatagaaggtcttgggccgcacattttaatgctactactggcctatcccagacggcccaaaattataatgggcctaaaataaacaaaattctcttctggcccattgaccacattcgaaccccaaaagttaaaatcacaaagcaaaaggggctgacgttaaaactcaaaagttaaggggctaaacttaaaataaaaagctaatggactaattttaaatctcaacgatacagaacatgactaaaaatcaaaaccacaaagttcaggaactaaagctaaaatcacaagtttagggactaaaattattatctaatgtgatataccttggttgactttaaattggtgatctcagtgatgatgtatttgcttgaatactttatatgtattagaatttagagtgtaaataactgaaactaaaataaatttctctgtagatgaactaaacttgtggacgttagctttgtttgctcaatgaacttgaattaaacgaaactcttaaagcttatcacgcgggaaaggagacgaggtcgttaaaaaaagcggttgactgttagacataaccgtcaaaacatactaaaagttgacgacatcaaacctgaagaaagaacgcctgaaatttatctttagttacatctgaaatttcgatctcactttcgtaatgttgacatttctcttgacaatgacagagaccatcactttgagattctttggtcggctctcaatattgaaagtcagaggcttatccattattatctgattatgcttctgcggtaaggcttttaaggaacacggtttcgtgattagatacgtgtttgtcttataattgaaaccttttcctcttatccctatatatactatatacttggctcatcaaatactctgttagatcaaatcttaatttatcgcaaaaagtattctgttcttttttatatggaccggagtcacaatgacattaaagattccgatccaagagatggtgaaaatggttggctctttaagatctcatggcatcgatatccctgaatcaatggaaatcaacaaaaaagagaagatctatgtagcagtgacagagaaagatctagaaagcaagtctagtctcgtttgggcgatacagaacagtggaggcaaagagttttgcatcgtccatgttcatcaacctatccgtaagtaattaaacatccacaagaatctttttatgcagaggttaaggattatttggttaaatttggagtatcttgtgttcttgatttcaagcgggggagatgtttcacgagcagaaattgcgtctctacagaaaagagaaggacaaagcacataagaattcggagaagtaccttcaaatatgcaggcaaatgcaggtatctatatccttacttcttatccatgtgttttgatggtagaagagatgtttggttttaaatttccagtcaaattgtgaattaggtcactgcagagatcatatatattgaaacggattcggtagagaaaggtatcctccaattgatatctcagcgcggagtcaccaaactcgttatgggagcagcagctgatagacactattcaatgtaagtggctaattagtgtagactactaagactttttgtgatctaatatatagattaaaaaacgttgattttgcaggagaatgagagacttaaagtccaagaaagctatttacattcacagagaagcgcctgccacttgtcttatatggtttacgtgcaacggttacctaatttgttcaaggtttggctaattaagtcaattcttcatcttcttttgtgttagctgaacatactagtcactgttaaggactggtctttgagttttacttgtctcacaagtcacactacaatgcagggaagctagaagagcaaataacttgtatctagaatgtgcatcgtcaaattctttgagtcaatccgacataactagaggaactgaaagtatagttaaagatgatgatcatctgatcaaattagctgtcacagaagctgaggcttcgaaaaggaaagcacgctttgaggcatgtaagcgcgaagaagctgaaaaaactgcagttgatgcactcaaaaaggtatgtaagttccttttaacatgtttttttagcttagaagtatcaaacttttctaactcttatctataacaaaaacaattgtaggctaaacaatgggaaaatgtgtattttgaggagttgaagcagaggaaagaaacagagaaggcactgaggaaaagaaatgacgaacttgaaaagatgagatcagaatccgagacccaaataaccgaatcttatactgtgattagaaagcttcaagaaaagaacaacttatcaatggaaacgtttagaggaatcagagaagaacaagaagagttgaagataaagcttagagaagtatcaaagctgaagggtaagcgcgaggaagaggaagcttctacctctaaccaccgtgaaccgccacaatactttatttgtcccattacacacgtgaggaaacgttacaagatcaatgaaaactaaatgatcaaaatgttataattttaagaaaagaaaaaaaagaccaacagttttgttatttgtaggatataatggaggatccacatgtagcagctgatggatttacatatgaaggagaagccataagccgttggtttgagagaggacatgagacttctccaatgataaacaaaaggcttcctcacacgagcttggttccaaatcttgctcttcgatccgcaattcaagaatggcttcaacttcgtgaattattgaacagaccctctgcttgcagagagatataagtgattcgccttaatcagagtgacaaatttatcataaatcaaaacattttcaaattttgtcaattcaactttctctaattaatgtttatattattatatcaatgcacagtgcgttacaacacatatgcttcttagttaataggagttgttactctatcactagtattattggtttggtcactcttttttggggtggttacgcacgtatatactaaatatagactatgatctacttagattttaatatttgtgatgaattgtgaactataagaatatagtggttatgactgaattttttcatagatttaataaatcttccctcatggcataatattagttagttaatatatagtggtatagtggtcactattttatttgttaaatttggtttgatgcattggtggtcattataacaagcataaaaaaacactaaagctagtattggattcatccacgtttttgtaattttgttatttgatggaataataataataaatttagcctgaatcttgcatagatttagttctcttaattaatcttccctcatgacgtttaatataacggaaatatggtggtttggttgcccactacacactatatattcctttgatgccgtgatagtcattataacaagcacaaggaaaaacactaaatcgtagaagaagaaaagaaaaacaaacaagcaatggattcaacagccaccgttgcaagtgatcgtcttagtcaactaaactctttcgaggagactatgacaggcgtgaaaggccttgttgattccggaatcaaagaggttccagctatgttccgtgagcctccagctattttagcaagccgaaaaccaccactagctttgcagttcacgatcccaaccatcgatctgaacggaggagtagtgtactacaagaatcaagattcagttacacggagaagcatggttgagaagataggagatgcagcggagaaatggggtttcttccaggtggttaaccacgggatcccgctcgacgtgctggagaaggtgaaagaagggattcgcgcgtttcacgagcaggatgctgaattgaagaaacggttctactctcgtgatcacactcgaaaaatggtttactatagtaacttggatctcttcaccgctatgaaagcgagttggagagataccatgtgtgcctatatggccccggatcctcccacatcggaggacttgcccgaggtttgtgggtaaggtttccatatatatatgagcttaattatttatagctaataacatttttagaaaggtttttaaaaaaaattttgtattattttttaaaaagtgaattatagaatttttaaagtaaatccatttgtatttttcatgaatctgaattgatgttttgatatgtggcagggagattatgatggagtatgcaaaggaaataatgaatttaggtgaattgatctttgagcttctatcagaggctctagggttgaataattctaatcacctcaaagacatggattgcagcaagtctttggtcttgttcggccagtactatccaccttgtccgcagcctgaccatactttaggcttaagcaagcacaccgatttttcttttctcaccattgttcttcaggggaatctcggtgggcttcaagttctccatgataaacaatattggatcgatattcctcccgtccctggggctcttgtcgttaacctcggagatcttctccaggttaaagaagtgactttttagctttgtaacattttagctctatctttgttaggaatatcatatatgaaataatatggaatttaaagtagtaagtaaaagatataggctagttatgatttgaatggagatgtgagttgattttttatttgaatttgtgcagcttataagcaatggcaagttcataagcgtggagcacagggtgatagcaaatagagcggctgaaccgcggatttcagtgccatgtttcttcagcaccgtgatgagggagagccatcgagtatatggacccataaaagagcttctgtcagaacaaaaccctcccaagtatagggacaccaccatctccgagttcgcaagcatgtacgcgtctaaagagatcaatacctctgcgttactccgtttagagatctgatacatcgaccaaagaaaatgtctttgtattaaataatgttcgtatgcgtttactcaatttcaagatttgagacatcgagcaaataaactgtacctttgtaacgtaatgtgtgtatgtgtgtcactccatgcacggatatgtcgacgtaaaacatccgtaaaatgtacccttgtaacataatgtatgtatgtgtgtcactctatgttaggatatgagacattgaccaaataaaatgtctttgaaaacacacaccgtttggcccattgacccactcttcttttttgtttttacatcaagtagtcattttttgtttatatggtgctagttataataacccattgctacctaatcttttaatacacacgcacatttgttttaagtatattttaatgatataatcgacattgattacttccttgagtttgattaggtcgttgacactcaaagggcttaaaagtaaaaccgcacaagaaaataatacatatacatgacattccagaacgaatattcgaaagaacagagtaacacaagaaagggatgacacatgccttaatcggatcttttctttcttaattccatattattaaaaacattttccggagaagaagacaaaaccaaagcttcttgtctgaaacgaaccagccattctaaagatttttacaaacaactttttcccgagaaaatctcaagtttgaggaagcgagaaagagcaacatggaagaaaaagaagaagcaggagtgatggatgagagaatatatgttgcactagggagagaaatagccaataacaagtcaaatctggcatgggtattagataactgtcaagggaacaagatctgtatcgttcttgttcaccgacctcctcaaatgattcctgtctgtaagttcccccaacaactcctatattgtcatctttcgaacggctttatacacgaaacagagctcttaaagagtttgactttcaatgatctttctcttactttcacagtgggtaccaagttcgatgctgcaacggtagatgaagaattagtgagagcatacagagagaaacaaaaggcgaaaacagacaagattcttgatgagtaccttagaatttgcttgcggaaaggggtatgtatatttttatacatatacataagggatatgaagtttaggccattcctaaggagattggtattgtaggtccaagcagagaagctgtgcgttgagatgaactcgatcgagaaaggaattgtgcagatgatttctgagaacaaagtcaggaagttcatcatgggagcagcttcagacaaacatttttcaacgtattgtgtttttaggcttcacgcttgtgtttctgcttcacatgcttctttaacaggtatagaatttgacatttgaggtgatcaatttgcaggaaaatggaggatttgagatcaaagaaagccatcttcgtctgccaacaagcttctgctacttgtcatatacggtttacctgcaaaggatatctcatccatacaaggttcaagccagaagcctcttttctttatctgtatacaaacagcagatgatgctttaacgttgatatctgtgcaatcaatgtagggaagctagaatggatgaagtccgagctctctcagctctactatctgactttcaacggcttgtcacctcacaaagtagcgccaatttagatcaagacagtggaggttcaaagaggaaaagtgagcatgaagagggggaggaggaggagagaacatcacgaaccagctcttctcggtctgctagtacattgtcatactttggaggatctgaggcttcctcaagtgtaagtgtaatggaagagatatcaaaccgttcatctccaccatctttaccggtaagtcctgcgatcctgaataagagagaatcctttctttttgtttctttcctttgcatttcacctggctcatgaaatgcctaacggtgctgatccaccagtgcagcggaatgggactgggcatgataaccttcctgattaactccaccaaactctggcaaaggcttgcaattcaaaaccataagcattgtgaatgaccccaccattacctgaaaagctacataaagaagacgaggacaagaacataaagctacaaagatcttgatcacatctgtaaatacaatgtagctcatatttgtaaacccaattgtgaggagaagctgctttgagtcctccactctccttatcttgtgaatgtgaggctttgtaaattatcttctttatattattcttgcgttaaaattcaaagaacaaaaaacagaaagataaccaacaaatgagcccaccaactaaatgctttaattaaaagttgtatacaaaaggttgatcactaaaaaggagtaaaataaaaagaaaacaaaactgcatcctacctctcggattaactgagaagaaagagagaaagcagattgtggaaagaaagaaaaattacaggatgacacacatcaaccgccggtgaccggaacaccactttctctctaattgcttacattctagtggggatctcaccaaaactgttccagccattgggctagcgttttcagcttcacttgtgtcctgcagctggaccttcaaagttcaaaacgcatgcaaaccaaaccatctatcatcagtcatctaaagctgtgttgaagactcaagtgtgtcctatttctaaaaccgataggtagttcagttcaacagcaccttgtgctacactattaccataaatgtaaagattaaccaggaaaaagggatagcatgtacctgtcaatcgtcttgaagttccgttgccatttatggaaaagttcacaggctgcctttcttgtcctatcgatagaacccaactagagttcaatctccgagcaaaatcctctacctctctgtattaacatattaacataaggttcaataatttaatttagtttcacttaatggccgcacaattcgatgtagatcttcatatttagtctagaagccgaggtttgtagaaggtatatttggagaggtgactgctatcaattattatttcagcccaaaacgaatacttcaggtagaaaaagaaccacttacctatcaagcagttccttcaaagctggatcaatttcatcatctatataaccatcttcaaactcagtctttggcgtaaaaatgtcatcttccatactaggtaagttagacacatctcccaagcaggacgcagtattgtcaacaatctcagcactttgtgatttggaatcaagattatgtaaatcctaagaagaaggaacggactcagtaaattgattactaccaaccagaagcaatcagagagaaactagtttaaaccttttccaaagcttcacatgttccatttgaagaaccattcttctgttccttccttttcttgttcttctttttgctcttggaagtctttaccaccttgggatctgtgaacataattatccttctctagagtgagagttttaaaaggaagtagaaaagagaagaccaagaaggaacgctaacttaaaactcacgcatcatatatctcaatcaaggatacccaagatatcaaccaggatttgagcatcaaatcatctaataactcggccataaatgcataagcaagagtatactgataatgaaaatgaccaataaaaagcccaaaaaattgaagcacaagacggtgaaaatctcatatcaggcactcacttagcaactagaaatgagtcttacaaaaattaatagttgaacgtgagcatcaaaatagactccagagtccagacatgaaccaatatgtggtaccatcaacatgaatttagacaactcggagcagaaaaagaaaaaaggatcatgacatacagagagatatgaagttaagaaaagtacctctgccattaataaatgataacaggtcatccactgaacgctcatcgacatgttcttcgacctcgacactctaggacatggaaatagccataatatataaactagtgcaatagttcattcttacaaaccaattcctgacttaatattaagtaaaatgctcaacacacctttagtttctctctttctttcaattcttttcttttctttgcatacaatctattcaacaatcgaatccgtggatcatccattgtgttctttagaggctctaatttctcctcctgataaatcgtaacaaaaagctaaaatatagaagcagatgggaatgacgcctcctaaaaagagatgatttgggcacaacatacctcagtaaggtcatcaggcaaatgaaatatttcgcgtatctcctcaggggtttttccctcaataattcgtgcaagggcacgactagtaagatcaaccaacggcttcaactgcaaactgtcagcggctgaggtcaactcacagagcctctttgtatccatccggatgaatttttcatcataaactttacgttcctaaaaagtaacaaagagctctatgaaaaaaaggcataggataatcgacatgtcattaattgtttcaaatttaataacctcaagtaaaccttatttgaacgtccaggtacttgatgaaatctgcagtaatcaaaaatcaggcttaacatggctggattgactcgctgtggaagagatattgcgtagttcttagaagacccaacacccttctgtattacttcttgacatatcatgggacagaacattgcaacctcttgttccacttgttggattgagccatcagcagtttcaagccatatataggatttcatcatctatgttgataccacaaaaaaagtaattagtcttggtgcaaggtaaaagctcaactaatcattcaaaaactccatacataaagaagataacacttaaaataaaacactattactatgaaaagaatctatgatgtaacgagtaggtcatgtaaacgcatatgataagaactactagagactaattaatcacgattaatataaaacattgacgcaaatggttgctaacttgttatgtatccaaaatctaaccttgctagtacatttgagcaaaatatctaacaatactaaccctcactctttatgataactaacataggtccttgttgccataataagtaaacgaaatacatgtgagttagttagctatacgccaacaaaatccacattagttaaagtatcagagcttacctctggtttaatgatggccatttcaccttctgacattgatttatagacccagtcttcgggtataacgcttgtagagtatatatcttattacactgtcaagctctccaatatattggacagcgcccactataaaaagttgttatttttaagtcttcaaggttccaaatactgcacagaaggaggattatttcaggtctatgagcatcgagacatcaatctcaatcaatttccggaaacttaacactaaactgggtacaagagaagaaacaatgtattgatcataaatttgaaatcaaacttggtaaacactcagaaagctcgagattgaatctggcatctaatcaaaaatgcatcaaccaggtccacacaaactaagagagtctagattagtaagttcagaatcgattcaactttttctctttttgatggaaagtaagtttctctcgaatgtgaagaggcacctcaatcatgaattcgtaaaaccctaagcccagaaatgaagagagaggtgctaaataccaaaaatgaaacaaaagacagaggtgccgaaacttaaattgatacaatggagactgaaattaaaagaggaatagagtgaataccaacagcgagagagagagacatagataacattcaaatgatcaaacgatacaatcgaacaagtagcacacgcatagagagatacatataatggagaaacacgacgatgagaaagcaatagataagaagaatacaagcgtgtcgtaccttacgaccggaggagaagcaatgagtgacgatggtggaagaaagatttgaatctggcgggggataacggcgacggcggcggcagaaacagaccaagagagagagagagacaggagcggataagagagagaaagaagggcttaataatattttgggatttctttttaataattaagtttttctcgcgcaaaaaaaaaaaaaagacaagagagaaaatggagtgggttataattgccacgtgtacgagccgcgatggctcatggctcgagatgatgaaaatagaatctcagggttcgttggtggctgatgaagtcggtgaggctcttctagatggctatttctgtgaacctttctgtcttcactttctttctttcttattctcatttttcatttttttatttttttttaggttaggttaatttaatttctataaggtttttttatggtaaacaaatttattacaaacattctcaaaacaaatgctaggttaattaaacccgaatacccctatacacttcccatcgtcttctctatatattatccaatttctcaattatcactatgctcttacaaaactaaacaaattcattagcaacatatctaacctttaactaaacaatagtattagcatcatcgatttctgtttatgagagtttaatgaccgattcagtgactacatagctcaagcaacattcttaaccaaaccccgctaatgcttctcaatcaagttcttaaccaactgttttgccacccaaaaaaaaaacaattggggtattgagaggttccttgtagcacaagcaacattcttggccaaatcccgctaatgatgcttctcactcaagttctttaagaatcttatctattacactacaaaatctaaatgttcagtccaatgtttaattttttgtcgaaggaaatctctttctttccaagtacaaaacgttctctatgtaatcttagcggttcttctctgcaagtccgattcgtagtgttggaacgcagcatcaagagcctggtggagaaaacgggttaatatcactcagatttcaattcataaactggattacaacgcaatgtctggttttgctggttaaattggatcgatacaatgcgagtggaaaaaataagacttcaccaagacatgatgtaataaaactatctatgaattggaaggaagctaacctgttgcattggacgaactagtaaggaaacttgatgccggagatcagactgcaccgactgtttcattgcctggtttacattcggtataatattacggaaaccataaacactagaccatatgctgtaagtttcgactacaactctgcacctattcattttacccaaatttcatgtttgtgtaaatgcattcgtatgaagatataatgaactacttttctaacgcattactccgagaaaaagatttgaagaagaattccatagcttacatcgagtagtgaataagtattggacattgcatccttcagtttaccaacctgcatgataaaatataacatcctagtataagaatttcctctcagtgtaaataaatttcaatttgatcctgaagaatctatgtacatagcaaactctatgattggaagaatgtgaagtggcaacaacattaccttggtactaagatatgtcgttgttattgggtaagatgaccaaaaatgtctcactaattcttgtattgatgtccagtgctgtatatgagagaaaaaaggaaaaagtattgatgcatttgaggggacaacaatatccataggcattattaaccaaattacagtaatcagtatatattgagctgcttgttacttgggacattggaggatgtcagacttacatgtataacttcatccttagtggactttggtaatctgtccagaaagctctcttgcgggttcttcccgagaatatttttggcagttgagatagttcgggtcaacgaactgaaaacctggatagggtttagcaatatttagctcagggaacaaagcaataagccatggtttctttaggcagcatgcattttatattgagatagaatagcacctcaaaggaaacttcaggtttaatcaacggatcacttaatcccgtcattctaatcaccaaaatggattcttttagtaatccataagcttcatggacatttctttttgacgcctttgctcctctgggttcactgaggatgtttccttgttgagattcaaagtaatcacgagggtcctgattccaaacaagagaaggtacgaggatttacgcaccatctttcatcatcaacagtgtaaacctatttatcacaaaaagccaagaccttgatagagagtggtgctaatgggaagttttgtggtgcttgaagatcctccatttctgttgcacgggacattctctccaacctctcctgattagcgtccttggtgatttcaccatcagctttgcttactaccaggggtaatagacatggatacctaggtcagatgaatatgaattgcagcattggccattgatcagcatagaaaaagaaaaagataagtagagcatatcataatgaaacagcaaaccttgtttcgcccgtgtgagagcctctgcaacaattctcgtatcttcagactgaacatctactttccagtataaaagaataagtgagtatcattgtatactttaccaccaagaactaaaagcagagggccaaaatacatgtttatccctcatcaactatctgttgggaagtcatttgatggctattttttatactgttacacaaaacaccagatgaaacaatcagagttgaaagtgtttactgatgcatcttccttccaatacaacagcagcatgacgattaagatcttgtaaaagtgacctcttaagctggtcattctgtggttcaataatgtcattggtgccatcgcgctggatcccgtggtcctgagtgacaggaaatttaattaagcacaaaataaaatatgatccagcagaaaatgtgaataacctttcaaccaacatatagaaagagcaaaatgtaagttataagatcactgttttctggatactagcgttaggctaatataaagtaatggacctgagtgggagataaagcactaaatgaaattcaatttctaagcaagaaatagatcacataattcaaatatagtttacacagtccataatttacatttgtgagaacataaattttcttgattgaataacttataaaaggattgatgaaattctagaaaacaaaacatttgacacactgttacaagttgatgcttatcaccgtcagtattagtatcatctatggagcacaatgcttctcatgctactactacttctagggtgagacaatatgtaaacaccaacactgaaaaagccgatgagagacctattttatctgtggaaatttctacactgttaacttgaaattatcgtttcaataaaccttgatgcagaatgagttgatagttggcttaccataagatgggtgtagtcatctccctcgtcagcgtccatgtcaagagttggatcaacccgtctcatctacaaacatgacatttaaaataaatggttattggttagaccacaatcattatccttttaagcaaatgacatggaaataattaattataaaaaagaaatgaccttttgacgagcttcctgagccaatatctcgtcaggcttcagaaagacagcgagttcctcatcctcagcagcttctgctgcagctactgctgtattttttgtgctgtaaagatattctgctctaaaatattttgtccaaaagtccttttctgtcatctggcgtagaaaaataactacgaaaggcagttatgaatcattgtatttgatgattaaaccaataaacaaagatggtcagagtgctgaagtctttgttacctttttcggaacataatttatgaatgcctggcgaacagccggcttctcagcaaaaatctgaaagagttatgaagatatcatatgtgagaaaaggacagtagtatgaatgaagcagcatttagttaaaaatgtttttacttttcaattctagtttcccactggaatttgtaagttcaagcacatgatgcaacccgaacatctagtaatgaatttatgactcaatatatcaccaattgcaacttcaaccccattggccatataaacttatcccgaccctggaggatcgcgcttggattcaaattcagaaacttatatagcccttacatcaatgagaaagatagtgaaccagatagctaacctgaaaaattatctcagacgttaagttaaacgtcaccctattagtctgaaagatcaaaaattgaagagaggttaaaccagatgaaatgtcatataaaatttatcagcaaatggatgtattataccatacccggccatcagtagacggtttgatgcctgaaaccatcatgcttttgagccccatctgttgttttgactttctaatggaatctttaccaagtaatttctgcgatcagaacacagttgataactattacgattgagacttacgagaagagcaaaactgaaacatcaaggaaacaaacaaagaaccaaccttcctcgtagaccagaattcgtcttccgtcaggactttactttccacaaattgcttatgcaatttctgcaactcacttcattatcataatatcagaaacttttacccaaaaagaaagcaacttttataagtgattacacacctattttctcgaagaagcttgaagcgtagctcaaattctgccatactaagttgttcagcaggtgtcaagacaactagtttattaggctcctcttcacatttagcaagggccttagctgttcatagcacaattggttacagcaacaacaccacgaaagaaacacagaaaaaatacttaaaatgaatcaataacaccaaatcatggcacgtggagcttactgatgaaatcacgacaagcatgcatgtcaggataattttcaaactcaaagatatgactccttccctgtaataatcaaagacgaggaaacttcagtgatacacctatcaatattttttagccttgagcaaaaagggccgaggaaaaacaacctgcttgctggtcagattgagccaaggaggtttatttgatccttctttggtatatttctgacctgagaaatttaacatggcacaataatcatttagagaaattattcatgataaatctgaatgaacaatatggataatcaaacacttacttttgatgttgtgagtctgaactttaagcttcaaatctgatttaggatcatttgggacaaagagcagcatcacttcactctgagaacaaaaattggaagatcctttgagaaaaaaaccattgagtaaggaaacaaaaatagaaatcatatagtggcaaagagttaaagtattcttactaattcgagggatccaagagttcctggatccttcacaaagctcttgtatttgactcgcttctccattgatatatgcccaaggttctaaagcatggtaaaattggtggattaagtttgtgagccggaggaggtaaggagtgtcgacggcggaggaaatatttgaatctggcggaggagaacggctagcgtcggcagatcagacaaaaatagctaaataatttgggaattttgttaattttaagttcgagagataatgaggtggttagaaccacgtgtacgagccgtgatagctcatgtcttgagatggttcaacagttcacacccgaagttgatgagtctcaagagccacgtgtacgagccttgtttaaccgggcctgcgatcaatagtagtgttgttagcttaagcccgtatatgtatggcccatttattgtctcgagctaaaagtcgcaacttttttttattgtttttttttagtttattataggcagacgataacatttgtcttattaatttcatgttaggaggacattggtaattttcgcttgtttttttgtgtttggtcaatgaatattttttttttttatggagccgtgacgcaaatgggggtggctaggtggggcaaatgcaatcatgaatagcagccacaataaaattaataaattgatcgagtacatatgtcataagataaatggtcggttttggatatgtaaggcgccggcattaggtggtatgactccacgtatcttatcgtcgatgcattggacggctattaaataatcagtctccaacataaaaattccaaaatcacacttcacacattcttttatcatgtcatgaggcttaatgggtcggtctttttttttagtggctagtgattttagctgatgtttcaacattttggttttaagtgtttctattttgcagcttaaatatacatataaaaataataatttaaagattgaaggtcctcaaatcgtgtaaatgtggatttttagtttgagaaagtatctcacatgagccttttttatcattaattacttaattacagtgtcaaaatgattgataaggagttggaaaatactaggtggtaatcaagatggcccttggatgctacaagagcgtagggccatagggcccattccagaacaatatagcaaccactaagcatgtttttgttttctttaacattgtcttttctatttggcaattagtacactacttacgttttgtggtaggaacaaataatttgtaatcttggcacaaaccagtgctttgtaactttgatgatagaaaaaatttattcactagttcgataacgattatcaatcatcataaataaaaaaagttagtttagacgatcatgaagagagaaaaaacagaattattggtactatctcttaatttcccaactctgtaggtacactcattaatcattatggagaatgtcatagtcatggtacataatgaatgtgcatggtgcttatggtacagatgttcttaacttcttatcctggctggcaaacgccagatcatctcaactggaggatcatgttttgttcgtaacagttagtaactaaccaaattagtgacaatcatgagggattattaaaaacagacattgatctatttttgattagaaaacattactgataaaactacaaaaatagctggaatggagcattcaaaactctgtccaaagtccaaacggttaaattatcactgacccaatccaataattagatttatttagtaagtatgattactacgaagataacattaacaaaattttatgttattgtcaatttgtcatcatcgtctttattttttatttctcaactttctttgcattacatcttccaactatataattaaccactctactttctcaaatcccacactcagagaagaagaagaagaaaaaaaacagagctttacaatttctctctacagagatcgaagatatggaaggcaaggaagaagacgttagagttggagctaacaagttcccggagagacaaccaatcggaacatcagctcagagtgacaaggactacaaggaaccaccaccagctccgtttttcgaacctggtgagctttcttcatggtctttttggagagctgggatcgctgagttcatcgctacttttctctttctctacatcactgtcttgactgttatgggagtgaaaaggtcaccgaacatgtgtgcttccgtcggaatccaaggaatcgcttgggctttcggtggtatgatatttgccttagtctactgtaccgctggtatctccggtaagtcactctacttctccaagtatacgcctttttactgtaattaggtttccgagtgtttgggttgtgaaagaagacgataaagctataatcttgagaaaattgtgtttagatttatagcttcttagcctgaacttgttccatttgtatctgattcaagaaatctcagaaagctacaatcttggtggaatttgcagttttctaatatgaattgtgtcctttagcctaatcttggaatgtattttttttatatgtaactctcaggtggacacatcaacccagcggttacttttggtctgttcttagcccggaagctgtcgcttactagagctctgtactacatagtgatgcagtgcttgggagctatctgtggtgctggagtggttaaagggttccagcctaagcaataccaggctctaggaggaggagctaacactgtggctcatggttacaccaagggaagtggtcttggagctgagatcattggcacattcgttcttgtatacacagtcttctcagcaactgacgccaagagaaatgctcgtgactctcatgtccctgtaagttaccactccttgtaacatatctgctaatagcttcttgaaacaattgaaatgagtgaacttttaagctgcctttagtgtgactctcatgtccccgtaagtaaccagtccatgtaacaattgctagaaacaattgaaatgagtgaacttgaagctgccattagtgtgcactaaagactgattctcaatattggatttgttgcttaccggcttgagttttgtaataattgtgcagattcttgcaccactcccaatcgggtttgcggttttcttggttcacttggcaaccatcccaatcactggcacaggcatcaacccagctagaagccttggagctgcaatcatctacaacaaagaccattcctgggatgaccacgtgagtttccacacactatataccaaatcgcattccaaactcggtttcgagcatttttccctgacaatttcgtttttttttgtcgtcattccagtgggtgttttgggttggccccttcattggagctgcacttgctgctctttaccatgtggttgtcatcagagccatccccttcaagtccagaagctaagtaaaaacaagacatcaagtcctctggtttctggccttgtccttagttgcttctatagttctattgttgatctactacatgtatgtgtgcaatgtgtttatctatgtgccctcttaatgcaatatttgtaaacaaggaagaagttccaaaggagaattatttgcaaattatgatgtttaacatgtttattacagatcaaagatgtttaacatggatattggtaaacgagaacctatataaacccaaattaagatggtctatcaccgcttaaccggttaggtattgtaatggtattttaaacgtgtcagtgtcaccaacctcgcctaaatcctaatggaattgagacacagccaccaaaaaccatcagaaaaatggttccatttgtcaaatacttttcaacaaagcacgaagattccttgaccgatagaaaaaagtaaactgtataagaaaagaagttaaaaatttactagaaacaggtgtaagaagttgactgtaagtttgatcattccacgagtacgaataaaactctgacaagaacacttcacttaccacaaatccacaattacttttctcacatagttccaacaagcaacttgtattattatattcttaacaccaatggtaatggatgatgatgcaatgtatttgtctcgttttctcatccatttatatgattgctttcttctccacctcaccaatcactcctcctctaaacttttcttcactctcttgtctcttcaaacttcggttactccgttttagtcgacaacaatggcctctgtttcaaggaggttactgaggagagagacgatcccctgtttcagccacaccgtgaggaaactcttctccaccgttggatctccttcttttgctcagagactcagagatctccccaaagacttcccctctaccaacgccaaacgtgacgcctctctggtaaaagaacgaacaaaaaagaaaccgttttttttattgagtatctacaaaattgcgatctgggttgtagcaaatttctcgtctttcttctgatgtcgattaacaaattcgtctgtgttaacgttgtagcttattgggaaaacgcctcttgtgttcctcaacaaagtcactgaaggttgtgaagcgtatgttgcagccaaacaagaacatttccagccaacttgtagcattaaagacaggtgctttgtgaaatcttagtcttcaaatccttcaaaagcactagtagcaagtattgattttgttccatttcctgtctttagaccagctatagccatgattgcagatgcagagaagaaaaaactaatcatccctggaaaagttaatagcttttttcttttctcttagttaattctcaaattaatggtgaatcaagagtttcttaccctctgaatttgatgcttaattttcagacaacactgatagagcctacttcaggaaacatgggaatcagtttggctttcatggctgctatgaaagggtacaggattataatgacgatgccttcgtacactagcttggagaggagagtgacgatgagatcctttggtgctgagcttgttctcactgatccagccaaaggaatgggtggaactgttaagaaagcttatgacctccttgatagtactcctgatgctttcatgtgtcaacagtttgctaatcctgcaaacactcaggtacacttatgagttagagaaagagatctttttttattattattgtgcattctcatttgatctagagatgatgcttggaatgcagattcattttgatacaactggtcctgagatttgggaagatacacttggaaatgttgatatatttgtgatgggaattggcagtggaggcacagtctctggtgttggccgataccttaaatctaaaaaccccaatgtcaaggtgagtgatctctaagttctgaagaaatcttgtgaatatcaaaaaagtagattgcgtttgatcatgaatgtcttccaaatgatagatatatggagtggagcctgctgaaagcaacatactcaacggtggcaaaccaggtgagaattttgaatacttaaagactttgttagtatatcctcattgcggttgctgatggtagagttttgaactttgagttaggtccacatgctatcacaggcaatggtgttggattcaaaccagaaatcttggatatggatgttatggagagtgttcttgaggtatagtatacggctaaagcttccatcttttcaataatctcaactcttaaggcttatgttttgagaatacgttaacaggttagtagtgaggatgctataaagatggctagagaattggcattgaaagaaggtctcatggtaagtgttttgatgatgtacagagatagtttgtttgtttgttttctggtcgtaagtatggacaataacttgtaggttgggatatcgtcgggagctaacaccgtggcagcaattagactggcgaaaatgccagagaataaaggcaaactcattgtggtaagagaggacaagtgttttctttggtctttgttattgatctatgtgttatgatttggtcagaaattattgttttgtgtttattatcatatagacaattcatgcgagcttcggagaaagatatctgtcgtctgttctgtttgatgagctgaggaaagaagcagaggagatgaagccagtttcagtggattgatgaaggaagactgacactttaccaaaaatctcgggagcaaaagattataaaaagaaagatgtaagagtaataagtttgtgtttatattgttctattgttgatgtataatataatcacagtattgttgatgttgatcttggatattgaagatccaactaaataaagttcatcattttctgtttcaaatagggattttctgctggtaaattccgtctaactgagattttgctgatgtaacataacattttacaagtagagctataccgatttccaacaaaacagaggattggaaaatcattactcttttttgatgaaataaaacgtatacatttacaagcattgactattaaataaaagccataaatatactaacaacgactgagtagttgaccaatatatcacactcagaatcaacatttttgacttaataaagaaaataatcttcaactttataaggaaagtataatcttcatgatacgccctcgtggcaacagatcgaacggccacaaaacaatcttctgtgcttttgtaagctataagctccacgtgtcatttctgtaactgttctgatcatattcaaaacaaaaactttcagaagaaacctgaaaaaacctttcggagaaatctccggcgaaaaagaaccctagcgtcgagcggcgaagatgggcgtaattgatttgatcactagggttgattccatctgtaaaaagtacgaaaagtatgatatcaatagacagagagacgctaatgtctccggcgacgatgctttctcccgcctttactccgccgtcgaatatgctctcgaaactgttcttcaggttcgtttagatttctccgatttcgtttcgttctctgtatgtttttgttttgttaactgtaaacttgtgagggacgttatagaaaacagaggatttgtcgtctgagacaaacaaagcgaaagctgtggcgatgaacgcagagattcgaagaactaaagctcgattgcttgaaggaattccaaaacttcagaggctttctctcaaaaaggtctttttcttaatttttgttcgatgacctaattttctatcaaagtctgtgttggtgagaggttggttttgttgcatgtgatgataagaaaggagttgtttttaggtcaaaggactttcaaaggaggagcttgatgctaggaatgatttggttttgtcattgagagataagattgaggccataccagaaagctctgctcctgttgtaggtggttgggaagcttcaacatcgtactcgaatatcagattcgatactaatgtctcgggtattatataatggtttctctgtagtttgtgacctctgcgttataatattagtatgttgattaatgaagactttctcaattgtatcagatgacagaattggtagtgaatatttccagccaaccggagagtctgatcagtttaagcaagagtatgagatgaaaagaataaaacaggcaagtgagtgtgttgcttatttggtttatcattaggtctataacgatcgatttctaaaaacaagagtctaaattatctgtaagcaggatcaaggattggattacatagctgaaggactggatacactcaagaatatggctcaggacatcaatgaggttcacctataccgatattcttttctgcggttgatgttctggtttcctttattgatcctcttactggtacattacattacaggaacttgataggcaagaaccactcatggatgaaatagatacaaaggtttaattaactaacacttgtccctgatctgagttttgtttttaacgagatcgtctttaccgtttcttgattcggtatttatcattcagattgacaaggcagctactgacttgaaaagcaccaatgtgaggctcaaggatactgtaacaaaggtgatataactgatattgagatcgaaaccaatctcgttttaatatatagttaacctcattgcattctatttggtaatatagttgagatccagccgcaacttctgcatagacatcatcctcttatgcatactcctgggaatcgctgccttcatatacaagtaagtaaccttttttatttactcgctcttaatcttggagagttgaaatcttgctttcatcttctttatctttatttggcgattttgcagctctgtgaagtgaaagctggtgatgcctgtcatttacattacacatgtttatggtagagacaaaatatggaagtttcacttttcatctgtctattatacacccatgtattttaaaatatgcttattagttggtctaaataaaatagcaagtaaactccaatgcaaatctatagctatctcacactgatatctaaaagaaaaaatcattatttatataaaaaaaagttactctaaaagacattgcaaattcaagttcatgagctcacttcaagagaagaagaaatacatgacagatattacaacttgcatcacatccatcataattctagcaaaaaatccagccaggttaagatttgtttggtgatgctgattcagataatcagttcacgatgtgacttttaagtggagccaaccactacatagctcctgattcttattgcgcaactgcaagcaatgctctcggaggtgcttgtgctgctaactataacaatttacaaaatacattataaaacatatattcccataatattatattataatgttttgtatacgtgtgtgtgtgtggactacgagtctacgaaaatctaaaccaactcaaattgctttgttgtttgctgatagatagatagactattataaaagtagattctctagctagtacatgaaatctagaacagggcatgatatggattatagatgatggtgatttgtattggtcatcttttcaatcattacccaaatagtaaatgccactttcccccatttttaacctacccactctggtactcttcaattatctttctctatagtgaaagcatgtcttctcccttaccatcctacaatgaatctgatcaccttcagtcaaaataatgctacatcaataaaacatctgattaaaaacaaaaataaaacatctgattataaataggtattccagaacattaggactagaatttcagtttttcattttagattttctcttctgatttttatgtttatatataatttgtagaataatcatagtaactattacaataaataaatcagaaatgttcggttttcaagattttttggatttctggtatatttctattcaagtaaaataaattcattgaattattacgttagaattgactgatggatctgcagaccaagcatgttacgagattctgcctttacgcattaccatgatccattgaatttagatccttttggtaaaaaactaaagataaaaagatgactcttgtctttaaaatatttattaccataattaccaacaaaatttacagaagtgatcactggtcactggtcagagacaagttctgacaagatcttaactactcccggttaaaaatacattaataactcttagacttaattaaaatagcataagttactgtaaatggaaatttaaggtcataactttcaatctgcaaataaaccacttgactggattataaaaatgtaagactgaaatttatacttatggtattgattttggatattcttagcatgtaactcaatttttaattttctttttaactttcaaagtaaataaactactttttattttcctgtctcggtaatatttattgctcatctctcattcatatgtaaggagtatatacacacataaaagcgtggcaagtctaaatgtcagtaagaggggtgaaaaaagcaacatcaaaagtagaggggtgaaagtcaaaacaaaaaagaacataagggacacagaaaaagatagaaaagcgtggcttcttctataataattcggtcacgggacagtgaaaatcatgaacaccagaagcagcccatagccgttgattaaactcttcttgcatctcatctggaacaaacggtgttctacaaagtggacacgtcttctgatcatgatccatccaacggtcaagacagctccggtgaaatatatgtctgcaatttctcagccaccggatctcttgttctccttcgaattcgtatagacaaacggcgcagttttccggtagatcttcgccggaattcgttaactcttcgaatttgataaccggtaggatctctctaattaggagtgcggagaaaggtgagcgggtttcgggtattcgggtcgggtacgatgtgtaatcgggccaggtttgatccatttcgagaaaatctgagagacccaagaagcggaagatagagaagacgatggttctgatgaatccgagaatcgaaagcgtttgtacgaaaagcttcggtaagaaaacctctgtgtaacctacgggaaagcccatggagaaagctagggtttttagagagataataatgagtgagctctgttttttttcctttttttgaaaaagttgatttttttaatgtcatgaggagtttgatttatagaaatcaaaggaaggaagaagatgaaggaaggaaggaaggtacaggattcgtctaaacgacatcgtgtcgtgtaagattgattttgatagagttaactgactgtgacgtttgttatgtgaacgttccaatgaggtgaaaaagagtagaaatgggaaaagattgaagttggactgtgagatttggttctgtcaccaacattgttggatttggctacgtgcgtctctacagtataacttggttttttttttttgggaataaaagtatctgcaagttgcacgacgatcagcacacgtggtacgtgcggttgatgtggattgaggaattaattcgtcctatttttttataaatggaattacgttttttaattttaatttttgggattcgttgaatgttatttaacacgtgaaatttacactaggcagtagataaatagggttacgttctcggtattaggacattttcataagaacaaacaaaaaatagagcactaattatcattattttaaaagacattagtatatgaaaattttatcaagatcgttaactaatcttgtagtaaagtaagatcaaatggctgagcttcattccgtaaatcacacgtcaaagaggtctcatgcgttgtctctattagcatttatactggttataggaaaacaacaaatgtatttgaaaagtataaaattcttttgtaattacatatgataagctaagtagctaactactgtattaggttcttttctttatttaacaagtttagatatttgttttgtgattctatgttggcatcagtggaggtgtatatatcaaataatgcgagggatcacctaaaatattactatttctataaaccagttcattgcttttgtctttcttttttttttttggtaagctgcttttgtctttcttatatatataggaaactatgctctaatttgcactacggtttggattagtttcttattttgactacagtaatatagttaggattgcttctagttttgaaaaagatgataatatgttttgagatcggtacaatgtttaattgaaatatatatatttgatgatcaaattaaaggcatattaggttgagtaaaaacattacaaaagcaaaagttcaaaaaaaaaaaatgaagaaagcaaagagaaacgagagaagggtgtgtgtgggtcaaggaggctttaaagagatgattaataaagaagaggaatcaaccttatctatacccctcaccctcaatttcgaaaatgatagattatatatatacataattaataattatataaaagtagaaaaaagtctattgtttaactgagtggtggaccggagagaggtataggagacaagtcgtcggtggcaatgatccttccaccaaccggcaatggttcatggctcaactatgatcggagaaatgtcgtttttgcaatgaacatatatgttttgttatctataatcgtattttaaaatcaagtggtcgtatatatatactctaatacttatagtcatgtggaaattttttcataagatgtacaacttacttacgatgatatattcaaacttagtaggaatttatttggttctatagcctatatatagttgactcactcaaaaataaccagagataaataataaaattgatgttttttggtaatatttatgaagtatgggccttatttataatcacacgctgaattctgaaaccttataattagaaaacgcattcaaaaaaaaaaaaaaataacaataagaaaatctatatagcctagtagaacggtcacaaaaacccacaaaagtatcaaaaactcgtaaaccatcaacgtttgagctcattttgttgttatagtcaaaatcattcaaagttattttgacaagacgtattggtaccataataacgcattaatacacctatacatttataaattattttattagttatacacgatggtagtacaagaatacatgtattgtagtagaattttgtaatcaattaatgtcacaaaattcaaaccaaacttcaatgagaaaattcatgatgctcaactagtcaatgtgtatgttatacgacaaaaaaacatgcaatttgtcaattaccatcgatccaaaaaaaaaaaccctctaaaacgataagaggaacgaaataagtatggagaatggtgtgttgatttggaaatgttataatgaggccgagacagccacatggccctattgcttgtatgcatatcatctcatctcctacctctcccacacttctctttgtcatgtcactgtttaatttttgaatactcgcaccatctcgttctctggtcccatgatgcatcgatacgaatatacttgattgactgtttcttgtttgtttcataactatataccctactttaaaccctatttgatccaatattgatcttagatttaagatgatgtttcggtggaatatgaggttcaatcattgcttcatttgtaattaaataaaattttagatgatactgaaaaagtcacgacaatacagatttttttattacactataattgtttttcaaataaaaagattggagttcatgtattcagtctctgttagggtcttaggaaccttttgttgttgatattatacgataaagatataattagcttattctctatctttatgattcctattcctactgatgtctttatgaatctcataatttataggtcacataaaacatggctaatcagtgttttgctaatcataagattttatagatgtgattcgcaattttgtttcctacaaagcaggggtggttttctagatagaaagagataaacgtatacaatcattcgctataataatatatgatcgattaacaacgatgtttatagatatttaatcattttgctagtgagtatacagtcttagatctcgtcgtcttgtctttctcctacacgtcacatggtaccacttcatgtttctttttgcttggtaccactccatgtttttattatcaaattggatatagaaaaattgcaattaatttgtagaaggtacataaatgaggtcccgctccggcaaatgttaaagccgtagttattttcttgaaggcctaatgctatcagctgaagattaaaaaaagcccaaaaacatatgggctttggtattctttataagcccagtcacttggaatactagcttatattttctttctttaaaactcagttaatagttatgttcaaatagagagaaaatctaagatgtggtgggacgaagttgccacgtgccaatgagttgaccaatgaggaaactcagtgcgttatccgtagggataatcagataagcagaatctgattttgtcaccagagtgcttttatagattacacaacacacgttcgtttctttcttcttctaacacactctgagtcttgaaggtcaacaacgtcgagaataatggcatcatctctttgtgcttcttctgccatcgctgccatttcttctccaaggtaagctcatctttttctctcttcttatcagttatcatcacttgctatgtaggaatgagactaagatccttgtacagttgtacttaattagtttcgttaacatgactatgatagtgatccattgattgggatttatgatctagtatccgagaatgtgtgtgcggttgtaaaattagtgatccatcatccatttagattaaacgttgtgcgactattgtttgtgtgatccaaacaccgatctgccctatgtaataatatgaatttatgcatggttggtgttattgaagttgtgactaaatttttagggctatgatatatgtgcagtttcttgggtggtaagaaactgaggctgaagaagaagttgactgttccagctgtgtccaggcaagatgcgtcggtgcgcgccgtcgcagctgatccagatagaccaatctggttcccgggaagcactcctccagagtggctagacggtagcctccctggtgacttcggatttgatcctcttggtctttgtgagtatattttttttgttcctccttgcatgctttttaacaagttttataaacaaaattagactatatttataattttctgacaaaatttagacacatgtcagcatcggacccggacagtctaaaatggaacgtacaagccgagatagtccactgccgatgggctatgctaggagccgccgggatattcatcccagagttcctaacgaagatcggaatcctcaacactccgtcatggtacacggcgggagagcaagagtatttcacggacaaaaccacactctttgtcgttgagctcattttgatcggatgggcagaaggacgtagatgggccgatatcatcaagcccggtagcgtcaacactgacccagtcttcccaaacaacaaactgacgggcacagacgttggttacccaggtgggttatggttcgacccgttgggttggggatccggtagcccggctaagctcaaggagttgaggaccaaggagatcaagaacggaaggttggctatgttggcagtgatgggtgcttggttccaacacatctacactggcactggtcctattgataacctttttgcacatcttgctgatcctggtcacgccacaatcttcgctgtaagtgtgatccaaatcaaaacatatctttactaaatgttcataacgtcgacacgtttaattgactagcttttgtgtgtgtgttttttttacaggctttcacacccaagtgagacaacgaaaaagggttatggggaggtgaatgcgtttgtgtgtgatcatgtttgtacaaatatcattttgaacttaaaattattatgtactttatataaattgtggtcgaatgcaaattaaggttccccgtaacactcttttcctaactcaatgatcataagatgcttttacattgtcattcggagcataaaagagtccatcttaattgtttttcgttattgttgatatctaagcttatgttcttcttctatctctctctcttacctttctctctttccgaatatctctttctcacctttctctctctctcttgcttacctttttctaaatctctctttctcacctatcttcttttctctctctctcaatataacatgacaaatttaaatattgaaaatcaactgaaaatttgttattgtctaatgcatattcactaaagttaaatctaagatagtagttatacgttaattatgaacatgatttagcaattatacaacttccaaatagataaggtggaaaaaagtgaacacatgagtaaattgaagtttaacttgtaaatattttgtacagagaaagaacctctatcaattaacactcgataaattagtaatcactataaattacttattttttcagtctcgagttagatcaatgtaatatttaacatcatttgataaaataataacttgtttgaaaatctaatgtaactaaatagtctagtaatatcgtaaattaataatcattatcataaattaatataaacttatcaaacatcaaaattccgattacaaaaagaataaaagtttagttatgttattaattattaaaaatttagacgaaggtatactagttttgtaatcccattattaatagtctatagaatggtaacgggctaacggcgatggtgataaacggaagagaagagagagagctagggttggagaaagagacaaaagagagggactacggaatgcagaggaaagcttcggcggtgttcatagggtcgtagaaaggagaaaaaaaacagagagaaacgacggaaggcagaggaaagcttcggcggtgctcataagaaacccatggagaagtctagagtcggagatgttgtcggagaaaggagaaaaaaacagagagagaagacggaatgcagaggaaagcttcggcggtgctcagctcataagaaccatggagaaatctagcgtcggagagaaatacaaacacacaacagagagagagagaaagagagagcttacattgtgagatcagagcgagagcttccatccagagagagagagtgagagcttatatagatggttttccgaatatatagtgtgtgagaacgaagaaccatcttttgtttttttgtttttttcttaagtacttttatataaaaacacgagagagagagagagagcacggagaagagggagagagacagagaaagcaatggtaatgatcggaatatggtgcacggcggtgatgatcgggaaatggtgcacggaggagagagagagagctaaaaaaaacttacatagtagtacatgaaatttaattgtttattttttggggtttctatgaaatcgtagaaatattattttattaaatatgaaacttacaataaatattattttctttaacctagagaaatagtagagatacaagtggatattggatataaatacctctttatcaaagacattttatacaacacacatatcaatattaataatacaacggttgattaaagtcaaaaacaaaaaatcccaacccaaatttttttaagttcacatatgtgtagtttgtttagcgtttcagaattcttttcaaaccaagtaatccgactttatttttaactgactcgtttttttaattatgttttggtgtcaaaactaatcaacccatggaaagtatcaacccacatatgtggtttagctttttcataaatatacattttaatcatttcttgtttagttagtgacaagacatgttacttgtttgatgacaaatatttgtatctccaatttctaaatcttttagccaaatgaaattatatatttgaccaaaaaaataaaactaagaaaagtgaaagagtatgggggcatcagaatctctgtcatgtgagtactattttttgaacaagctaagtaacgtcttgtatctatttgatttttttttagtatcatatagcacgagtgtcttaatgaaatcgttattagcttcaataatactaaataaaatgtttactttcacaatatgtaaccgattaaattcgtaaatattttgtacgaagaaaggatctcactcgataaattagtaattactataaattaattatttttttaatctcgagtgagatcaatgtagtatttaacataatttaataaaataataatttggttggaaatataatgtaattatatagtctagtaatattataaattaataatcattatcataaattaatataaacttatcaaacatcggaaattcagattaaaaaagaacaaaagtttagttgtattattaattattaaaaatttagacgaaggtatactagttttgtaattctattattattactctatagaattaaattaatagtctatagaatggtttgagtaaaccgagaaatgagagagagttctccttgaaccaaggataatcaataattgattcccggtttattcgtaaaattagattcgtatcaccgaaaccaattatattcgcaaaattaaaatccgatcaacataaaccggtcgggcaattccaattttgatgctccgtttattgagcgtttattgatctgcgactgcgagatccatcttcttcttcttctccttcttcttcttccaacgaatgttcctatgatctctgtgtatgaacagaatctgtaatcagatccattgtagagagagatagccatttcaattcgaggtagccaaagatgtatatggcttacgggtggccgcaggtgatcccgcttctacctggatcgcagcgagtcgtgtaccttaagctcgccggccggctattactggtcgtttctccgtctcacctggagctttggggttcttctcaggtgctttatcatcatctctctgcatttcgtagtaattggagtctagagttggttaacttatatagctttttgtttgattttcccgcaattagcaacgagtgaggttgggaaagtatatgagagatgacaagtcgttgcgagaagaaggagagaatttgcaagctgtgtggagtccagactccaaattgattgctgttcttgtaagttcttagtctcactcttttcctttgctaatttctgctaattgtttagtcactatcaatctttatccagctgagaatttattgaattgtttatacaaaatcttgttattggatcttctccagattgttctttatgtgtaaggatgagaaaaaacatgtttttaggtttgattggttgatgatttcagacattctaaagcctctaatttcagtagtatcttatttgaatcgtttgatcaagatgcatgaaaattcggaacttgtgaaaaaaccagttttttgtatgtcttctcaccaattattttttgattcgcagacatcatcgttcttccttcatatatataaaattaagtttaccgataaaagagtaaaacccggagagagacaaccctcggagttgtgttttgcaaccatatctcttttgctaagtgagcaggtcccttttgctggcaaggacttgtctgtgtaagtgctttttctgtacgtgtctctgccgtgctcaacatttgccgtaggagtctacacagttaaaactctgggattataaatgtaaggccaattctttctctctctgcaggagcaattttgttagggacagcaaaactatgcttttgggactctccgatggatctttatatagtatttcctggaaaggagaggtaatgtacatctgcttcatctgcattgtttgttcttggggtttttgaattctttgtgcaagattcctgatttctcatgttttgtttgtctttgtagtttggtggagctttcagtattggctcccacccttctgctagcaacgatgatagactcttgtcctacactcttggtaatgggctagtctctggagtagcttcaccaacacttgcatctgatgataaattctctacaaaaccggctattgttcagctggaactttgcactcgttccaagttattgtttgtgttaaattcggatgggcagctagtagtatgctctgtgaataagaaaggtttaaagtacactgagagtattagagctgagaagaagttgggtggtgatgctgtttgtgcatcagtggcttcagagcaacaaattcttgctgtgggtacaagaaaagggatggtggagttatatgatctgtcacactcgatctctctcttgcgaacagtttctttgcatgactgggggtaagcaacttgttactatgaaaagggatggtggaattttgtgatgaacctttattttttaatatttgttttgaaaggtttgagtattactattcatctgagtagtttttattgtggtgttgtgtaaagaccataatatcatacttgtcatactacaactggaagtttatacgcctttggtagttttcaagttgtcttactgtgatttatttcatgcccttgatattttggctgcatcgttaataaaactgttttaaaacttgcagttattcagcggattacactgggcctgtaaataacattgcatggacgcctgataattctgcttttgcagttgggtggaagtcgagaggacttgcagtttggtctgtttctggatgtagattaatgtcaactgtccgccaaattggactgacttctacatcttcccctaaaattaatccaaaacaagactgtaaatacgaaccactgatgagtggtacttcagccatccagtgggatgaatatggatatagactatttgctacagaggaggcatcatgtgatagaattcttgcattttcttttgggaaatgttgcttaaatagaggagtttcaggaaaaacttatgttcgtcaggtaatgtatggtgatgatagactactcatggttcaggcggaggacactgacgagcttaagcttttacatctaaaacttccagttgagtatcatcatatccgttatccccttttgctcattcatcgtatcactttgaaataaatttcttatatatattttcttggtccaggtttcttatattagccaaaattggcctgttcaacacgtggcagctagcgaggatgggaaatacttggcggttgctggtttacatggcctgattttgtatgacgttaggtttaagaagtggagggtatttggagatgtcagtcaagaacaacagattcattgcaagggtttgttatggttggggaagattgtcgtaatctgtaacttcattgaagcttctgagacgtaagtcccgatctatattattagtttctaatcatggttcactggctatatttattaatgtttacaaggaagagaaagtgccttttaatagaaatgtgtttgctactcttccagacttttttacattaatgtgataaacgtttctgagcattttgtctttgaatgttgtttaatttcacgtgtatgttcgctaattattgcagatatgagctgcttttctatccaagatatcaccttgatcagagctctttactttgtcgtaaagtgctgcttggcaaaccaatggtgatggatgtttaccaggattatatacttgtatcttatcttccgtttatcatccacgtctaccatgtgaagatatatggtgaattgacaccttcaagcaaagcagatctacaggtagttagttattccggttcatttcttctctgcatcattttcagtaaattatactttttaacttccaaatgtgaacgcttgagttgcttttcatgcaccttaaagtgattaaatgacaaacagctttccacagtaagagagttgtccatcatgactgcaaagagccatccagcagcaatgcgatttgttcctgatcagcacccgagagaaggcgaattggatgaagataatttgtcttctgatttgtcagaaagggaaccctcaaggtaatcatcaatagagtagaatatcctttcagtttatgctgtcattctaattgcctttgtggtctccatagatgtcttatactgagaggaaatggggagctttcacttcttgatttggttgatggacgagagagggaacttacagactcagttgaactattttgggtgacatgtggtcaatcggaagagaagacaaatcttgtcgaggaagtatcttggctagattatggacaccgaggaatgcaggtaattcctctgcttcaaagctgcttgttatgctcacttttcttcttcttcttttttttttttttttttttcttttttctttttctcgttatagggttgccctgcccctaagtgtctgacagtaactctctgtttgatccctgtcttttgtaactttttttgatttgtttaacgctgagattctatattataggtttggtatccttctctaggggatgatccttttatgcaagaggatttcctgcaggtatgcatgctagtagagtccattttcaccgccattggtggcttatctttttgttctgatttttattgtctgtaacattattgtttgacgacattgacattcaaacacatccctcttataaatttctaattttttcattgtttcaaatgcatttttattatgttccattcttcagctggatccagagttggaatttgatcgtgaggtgtatcccttgggacttttaccaaacgtgggcgtcgttgttggagtttctcagagaatgtcattttcggcaagcgcagagtttccgtgttttgagcctacaccccaggctcagactatactacattgcctgctccgtcacctccttcaggtattgttggtcctggcttctcttttcttaagttagaatgatcccttctttcttcctttattcatttctcctttgcaattttttttttctctcagaatcttattctgtttttctcttattttggacagagagataaaaatgaagaggcgttactcttagcacaattatcggcagagaaaccccacttctcccattgtctggagtggcttctttttactgtttttgatgcagagatttctaggtatccaattcctatcaatctttataacgtatctctgttctttgtaatttatacttaaccttcttgtcttgcttcacctaattgattttttgtactgaacatgtggcttccaaatttcaaggccaaatccaaacaggaaccagatttcaggacctggacatcttaaaaagttatcccttttgagaaaagcctgtgatttaataaaaaatttccccgagtactatgatgtggttgtgaatgtagccagaaaaaccgatgcccgtcactgggctgatttattttctgctgctgggatatcaacaacgtatgtttctctatctctgtgtttggcttttgtttcttgtaacgtgtatgaaactagttttgtttactgtactagacacgtgagcagttagccgttgctaagatagcaaacttcaccaatcttgcctgctctttttgttgagtaaactgtattctgtgctacgaaacttgatattctcttttgggttctagattgtttgaggactgcttccagcgaagatggtatcgaactgcagcttgctatatccttgtaagactcagaagcccttaaccctcgagtatgtttagttaaataatgttgtatcaataaaactgcagtcttctgtttgttactaggcaagtagcagtgtcaattgtcatttgattaaaatctcttgggacaaaaaaagcgcatggagttactattatagaacactgaagaaatctattaggttatgtttcaaatcgtacactaagtatagaaatggtgcaggtgattgcaaaactagaaggtgttgctgtcagtcagtactgtgctttacggctattgcaggtaatttcggctgtagcatgttgaatttatatctttcgagtcctttcttgtcaattttgttctttctgttcttaagaaagtttatttttatatttgcaggcgacacttgacgagtccctctatgatcttgctggagagctagtatgtatttgatgttcttgttgtttgtttaaaatgggcaattcaaagcttaaatcctaactaatgatgttattctatgacaattatgctgttaggtgaggttcttactaagatctggaagagacattgagcaggcgccaacagaatcagattcattatcgcctaagcttctcggttttcttatttttggctccagccacaagaaatcatcactcgataagaggtggaaactacaactctgattgtagtttttgattttctagagtgatacaactgtcttctgatcaagatttatttgtaaaacgtgaccctaaatgtagctcctcgttcaaagagcaaagtcctcatgttgcttctgtaaagagcatacttgaaagtcatgccagttacttgatgtctggtaaagaactttcaaagcttgttgcattcgtcaaaggcacccagtttgatattgtggtacgtatacaatttgtaccattcaccttttcatgcttggaaccaataaggtatatagtcattcactaacaataccaaaattccaggattttcttcaacgagaaagatatggttgtgcgcagctgcagaattttgctgcagggcttgaactgattgggcaaaaggttagaatcaacccccttgtggtttctttgatgttcaaaactcgttatttttccctctcattctgctgcttgaaacaatttgataactaaaacatagatccctatcgcatcgtaaaagtctgcatatttgagtaaacttatcttacatcgaagtctaactattgaaatccctcagctgcaaatgagtgagctacagaaccggttagatgcagagtttctattggctcagatgtgctccgtcaaattcaaagaatggatagttgttcttgccactcttttacaacggtctgaggtaaaaatcttttagatttccaccgtaatcacgactttaaagcattcacagtgatataaccagattgtttcattattttgtcacaacacaggttctttatgatattttccggtatgatctacggttgtggaaagcatatagcgtgacattagaggtaacaaactcttgtttccataacaatcgatatcgatttcatcacgtgcgggtctcctctttaaaacatgttctttgtttcagtctcacttggctttcgctcagtaccatgacttacttcagattttagaggcaaaactctcagcgacctcacgagaagaaagcaatagaggttccatctcttgataaatcattttatttttgaagctttttcacatcaaacattttctgcctgagttttcacgttcgtgtagataaacataatttgagaagaaataagaaatacatcacctcacatacttttactatttattttggtcacaatagaaaggaaaagaaatgtagaagtcatatcatgtttggcctaaataatcgaattgttacagcctgaaatcgaaaataaattgaaaaaaacactctgcattttgtgtaatgtgcgtgtatataaaaccattgttttgtccaacataaaaagataaatgtatatgtattttgatttactattcagtataacatgtttttattcaaatcaatgaagcttggaacaaaagtatatgagtgctgactaggtgtaatgttctggtcgttattattacaaatagtagattagaggtattaaaaaaacaatcggagaaagaaaaagagagttgtattaaaataaaactgaaaagtaagataagcgtaagcacccgtgaccgtgagtaagtatggaggcggcagaagtgggtcggcagaagtggggatgagtggagtgaaagtgggacaaccccaaagttcacaagaggctaattagaaaaccaaaaaaacaacaataacaaaattggagatgctcttttatgcaaaaaaaaaaaaaaaaaaaagcaacaataatgaaaattaacatggtttaacacattctcattcctatatatgttacatgcgtaactggagatgctcttgtatgccccccaaatttgcatagtccatgttacttcacttaaagatagttttatttctaactttttctttataaaaactaactgccgtaagtagtaactaccgagtagtataagatggtaatgtaaaatttagtagccacgtcgaaagtgacaaacaagtgatgtatctatactctactctcataagtcacaagtcacatagagacaatcacccattcttgtatcatatccttttcagatgcaaaaataacctcacacattaaaacccgtgagtaaacaaacgaagtaaaggaattgacgttgtactcacctcacattctctccctagtttaaacaaattatgattgttatatgtttggaaagatacatgcaacacattttaaataatatgttgtgattgagccgaatgcttatatgattttctattatacgtatagcaatgaacacgattatgaattcgatttagagtgatgatacaaccttaataccttaatccattcaggctagagaccataataagttaacttaatctcctcatcctagtcactactcgaatgccatctttacgtttaaaacaattatggccacactaacgatatacctatgtttgtttgctagtataataaggatatgtctctatttgctatcacttcagccttttctgaagacaatgttaccgctatatcttccaatcaattgataccactaaatgataaaatcattgctaatcttataagatcaccaaacactcagacaaaaagtttgaatcttgcttcttcgtttctccactctttatccgcttataaatactcttattctctcctcttaacatcctcatcaaaccatttagcctctccacactcacaaagggctcacaagtctcaagtaattctctttctctctctcaagcacaaacacacacaaatgtataaacaaacccaccatttttgctttcaaatgttagttgttcactatgtctcatttacattaaactctctttttctttttcccaaaagttgttcaccaaaaccaattgattagctctcattctcataaaaaaaacaaaactttacaacaattactaacctttcacatgcacccatttatttaccaaactacgaaaaaagatacaaccttttatatctctctctttaactaacttaaggaactaaccattctctcttcctttttttttttcagatacaaaacaatgaagaacatactagcttgcatagttaccatcataaccctctcaaacctcataaccatttctcaaggaagaagggtatcacagtcatttgaaacatttgagtacacagcaattatttgcagatcccacagtgcctccataacagagtacggtggtgtaggagacggcaagacgctaaacacaaaggccttccagagcgccgttgatcatctcagccaatactcatctgaaggcggagcacagctctttgtacccgccgggaaatggctcaccggaagtttcaacctcacaagccatttcactctgtttcttcacaaagacgcaattcttctcgctgctcaagacttaaacgaatacccaattctaaaggctttgccttcgtacggacgaggacgtgacgccgccggtggaagattcgctagtctcatcttcggcactaatctctccgacgtaattatcaccggtaaaagttttatcctttttttcttttttcaataattcgaaattagagagaaataaacctgaaccgttggatattattttacagggaacaacggcacaatcgacggtcaaggatcgttttggtggcaaaagttccacggtggcaagctaaaatacactcgcccgtacctgattgagttaatgttctcagatacaattcagatttcaaatctaacgttccttgattctccatcgtggaacatccacccagtgtatagtaggtatagttatatcctgtgtcacactctcatctaataccatgcacactcaccataaccaccgtacgatttaatttattaattaaaatatcccacgtggcagcaatatcatcgtaaaaggcgttacgatcatcgccccggtaaaatctccgaacaccgacggaatcaatccaggttcgtcgccggtgatcagatcggattaattactccaaattctcctactttatttctctaatttcgattttaatttgagttcagattcttgcacgaacacgaggatcgaagactgttacatcatatccggcgacgattgcatcgccgtgaaaagcggatgggacgaatacggaatctcattcggaatgccgacgaagcacctcgtgatccgtagattaacctgtatctcaccgtacagcgccgcgatcgctctcggaagcgaaatgtccggcggaatcgaagacgtgagagcggaagatatcaccgcataccaaacagaatccggcgtacggataaaaaccgccgtaggaagaggagctttcgtgaagaacatatacgtaaaaggaatgaatctacacacgatgaaatgggttttttggatgaccggaaattacaaagctcatgctgattctcattacgatcctcacgctctaccggagataaccgggattaattacagagatattgtagctgagaatgtttctatggctggaaggttagagggaatctctggagatccttttactgggatttgtatttcgaatgcaacgatttctatggcggctaagcataagaaagcgatttggatgtgtagtgatgttgaaggagttacgagtggtgttgatcctaagccttgtgatttgcttgatggacaagaatcagagacgacgaagaagaagatgattgacggtggatgtgattttcctactgatgtgttggagattgataatgttgagcttaagacttgtagttatcaaatgagttagcaaagttgtagtctttttctttgacctaatttcatatttacgaaaatttctctgcagggattatctgtgattttggttaaccaatctgtgagaagaagtataagttatcgatagaaagtgaacaaatccatgtgagattgggagatgaaacagagaagctgagacaatgattacttgttcataaagaaactgaatcagaccagactctttagaagttttctcttggattgttctatatgcctctctttctcatgtcatggaggaaaatggaaatgttgaaccttttcctgcaacagagttgatcaaatctcattttaatgggtctctaaagactgtgttgtgtccaaaggcagcaacagaaagaagaaacacgtacaatctatgatgcaaacacagatcaatgctaagccaacactctaagctctggtttttctgctaacgaaaacaatgaaatcaaccaaaataaaaaagagttaatgttgcacttacttcagctacgcacagaagttggaagaccgcctattggcaacaaaaccatttcaatgtcgtctaaccttcgactgcctctattatcgtgacgtgaccttccgctacaagcagaagttggatgcggtgtaacatcttgtgagcttctgctgcaagcagtagtataagtattgtcaacacgttgtggccttttgctttggattcaactcctccacttcgtgttcatcattaaccgagaggttgaagaaactcatacctcaaaataaagatgagattctcaccttaccttggatgattcttgctatggaattacgttatgatacacataatgatataaacattatcatcactgatctcaagcttcatgatatgactaattcggagcaggaatattggtttgagaattatatatatgaacataaatacaaaatgaagaaaactatattaccattcattgaaaatgagatcagaagatactagtgtaagtgttcattattaagttattaatgtaccactgtaccagtacgaagggttttattgttcagtacataaagagattacaacactgagagaaaatgggtaaaattgaaaatcttatatatccaaagtcatattgtacaatcgaaaagaagatcatatagggtcatgagttcaatttatttgtttcaaaatagttccaaatggatttaatgtatacatatagtattagaggcattgtctaaagataaagaaaaaatgagatttaatcatatatgtatggtccatgagttaactccctaatcattgaatcaaataaaccgtcacgaatgatttcacgtcctttaaaggttacatcagacaagttgccaattttcctgaagatttcatctaacccatgttccagtttctcgacttcttctttgcattcctcaatagattccttaaaggactcttgaacaagatcatcaccttcttgaattgtaagatacatcttcttcattttggcagcaacagattctaactcttggagtaccattgttccatcagtggaaatattaactcttgttttgacgtttacgatagtctgcaaatccaagaaatcttttttccacaatgattgcttccagacatatataggcaaaatatctttgtcggaattcgacaaaactatcacaaagacactgcagatataagccgtaagaacattagccccataaaacgccttcataagaacctttgcttcttttatacaattcttgactttatgaaagtttaatgattcaacatatctcccaagaacttcgcggcatttcgatatttccgcggtgatattttccctccaactatcaagtgcggaacaaatctcagtgcatagatcctcagatttcatttctaatttatgcctaaggaactttaagcaaacaatgccatggttcatgtgacgaagcaaggacataaaagcgttacacagatcgagcaattttgtatttatgttcatgtaattctcaaaccaatatccatgctccgaatcagtcatataatgaagcttgagatcagtgatgagaatgtttatatcattatgtgtatcataaagtaattccatagctagaatcatccaaggtaaggtgagaatctcatctgtattttgaggtatgagtttcttcaatctctcggttaatgatgactcaaagttgttcaataataaatttttctttggaaacaacatcctgaaaaatttctttggccggaagaaacattgcgctgtaatcccttgttttgagatcatcttgaaaagattctgagaaataaaaaaaagaagtcatcagaatttcgatttgtttgataaactgtcgtttatatgaacattgatgtccaagaaaattcgaaagcaaaatcacagttcaataatgaacgagaactataccttccgaagtcaagaaatcacaacaaaatgtatcgatgtaggtagacgagaaatgtaccacaagttttttttttttatataggtattactgtattattgagagaggacatcgtaataaatatataagtatcccgtgatgtgattgatataaattagggaagacataattttggcaaatcttcttctgcctacagtagttatttgatcaataatcacatctggatttattcattaatatatggatattttgggacaaaatcattaatctaaagttaataaatattatttatatgacatataaagataattaaaaatttggcctaaaaatataattcaaatttacatttttaaaattttctagcaataagagatactttctttttaaaacaaagataatatttttttatttgataaatggtacaaatttaagttaacacaacataagaaaaagaagcaaatcataatatttatatttatattctaatttggcctaataaaagagtatctttatatttatgtgattgacaaatgacaatctttatatctagtaaaacaaaaatcagaggaaaaaaaaaactaatcagatctttctgattaggttttgacatgtttttaaaatttatcatttgtaattaactaaaattaaaacaatttaaattttggcatttacacatgatcaatccaaagatatcagaagtccaaagtaatatttcaattttgtaaattttgattgaaaataagcaacaaaaaaaaacgagcaaaacatatgcaacatttaaacttcatccttgtttggaatttttttatatttgatagttagatagtttctctagtttcaatttgaacctgtttattgaatcatgtaatatatttgttatattgaaatatacacaatctatttaatttatacaaattattttgttatattgatatatacgcaatctatttgagtataatcataacaaattttaagctcgaagcaatggtgaatgaggagacatcaactttggtgacctaacatgttcctcgtacctcatcgaagataaactcagcttgagattcttttgaaaactcttacgtttcttgttctcccttttgttgttgcaaatgcagttacagttcttgttcttgttggctctgtctccaaccacaaagtctttgattcgttcaagtgcaatttggagtgtgtcttcgtccatattagcaaagcagactcggaaccaaccaggctcagagcagtgaaacgacgagccaggagagacattaatcttgaccttattgataataactcgccaaagcgccatttcggaatcaaatgtctgatccttaagcatatgcctcaaatccatcaaaacgaataaacccgcgttgcttctcaagcaagaaatccccatctcttcaagcccttccgtgaacatatggtgtctcttcgctactcttttcgaaacctcaacaagaaagttatcgacaaaactctgatcagacaacatagcagctagaaaactttgtgtctgcgacgagaccaatccaaaactcgacatcctccttgcgcaggacacaacaacatcgttgtaagagtaaaccactccaacccggaaaccgggaagacccatgtcctttgaaagactgtagacgatatgaatcagatcacggttaacataatacatctcttggatgatctctgcaacactgatgaatcccggttccgcaaaaaccgttgctgcgtatatttcgtcgcatactaagtgaatttgcttgtcgttgatgaagctgacaaggctttcaagagtttctcgatcgagagatgttccaagagggtttgagatgatcaggcctttgatcttgataccggtttcttgggccttaaggtacgctgattctagggcttgttttgtaatctggaaattgtttgagctgctacactccacagggattattctaactccagttctccaccttaagtctctatcgaatctggaatttttagtaaacccagtataattagtactgaagagagcaagtcaagcaagtgttaattaatggtttgacttttgtgaagagtcaatcgacaatttgatcatagttgtaacttgtgtggacggggttgcttaccaaattaaaatattgaatcaatcaaatgaggtatatttcacaaataattctgaaaagtgaaaacccattatcaaaagagacttttgttttttgacctatgtaattatgaaatcattagaacttttgcccttttcgattacttttattttaatatagtataatgtttacttattctatttcataacatcaaaatccctaattcatgtgtctttttaattattaatgaccaaaataatatttatttgaatactagtaaagtgtgtatatatacgtacgcagcataataaggagtagggacgagaaaagcgtcgccgggatcagcaagacagaacatgatcgtctcatttgctccggtggctcctccgctcatcaccaccctctccgcctcaaacctcacccgcccgcctctcgctctctccataaacgtcgcaatcgcctgtttattttccgtccccaaacaaaacattatttgaaagcaaattatagttctagaaatatacaaatctcaaattcctaagattataatatactcaattcataatcttacataaatgtaaggtgtataattactaccaaacaagagtacgtgaatgagcataaaaatacttgatactgtaacatatataagtatataataatttaatagatactgtataataataaaaaaaccttataagaaatgagataaatacctgtctaaattgtttgagaccgtgataatcttgaaaaacagcaatgtcggagaaagagtcaattccctccgccgtacaaatagatgcctgtggattttcctttatccattctttgatcaaatctgaacaaagctgaaagcaaatcacaataaaataaactaaattaaaaaacttattagaagaagaaaaagtataacgaactcattaggatgtaactaataagaagacgaacttgattttcggcgagacccatttgaataactccttgtggattatgagttggatgaaaaggattattgtcgtaagctttccagccatggaagtacggcgaagcttctccatgtttgtcactcaaagctaatttggatagaagttgattctcacatgcaccctgagacatttatccgttccagtaatttgaacaatgtgtgtgatttttgtgaatttgatggattagtttacttgtgagttgtgatatgtaaatgaatgggagcattcgaggattatttatagtgggatattgagagcgagcatatgaaagaaacttgtttccgttatgaggaaacttaactgaaattttctgttttctataaaactagtagtattaattttgcgtgaagtcaaacctacggccaaagcccaaaatgtttttagtctttttttttcttcatctatgccaattataacattttttttttacaacggaactgttatatggccaaaaaaaagtcttattaatatttatgagtatctataatcaacaaatgaacaaacatttaatttctgtaactgaaaattatagttttgatataaaaataaataagaattaatgatgataaacaactgtagatttttttagacacacctgtaccatgcagatggtacatttgaaaatttaagaactttatatactatgaaaaacattgtaagacaaagtatactttgtgttaaaaatacagccgcgacttggtatcacggtaataactaagtactaattacattaaaaagactttgtgtttcattaattttagttaaacaattagatcaagcaagaggttttacagacaaaaacaaattaaaagtcgagagtgttttaaagattcaacggagtaacaaattaacaagttcaagtcttacgaactctattattagacccacgttgatataagattcggggggagatgtttaccatgacttggtgttttacctttttcaaatcatatgttttaagttttaaaattacttgcgtgtcgaccgaaacgtaatcatggtctaatcacgtgaaaataaaatttcaaattttgtctttctccattttaaattagtttaagaggaagaaaatcatgtagagagaatggtaatgccgtaatgggttggtcgttgggtttagctccaaagagttcttcaaggtcattcattatgtttatagtaatccaacaaaattaacatgtgaaaaagtattgacacgtggagcagcccactgaattggcgatcaaagatctttttgggcggctttctagatttacgacatagtaaaactctctctacattaatctttgccttagattgaattggtcggagatcgaaaagactaaaactagatggacacgctgtatgtatctaagtggagtgattactcgttttcttagagtgtatttgtagggaaaaagaatacgtatacgcacgtacagttgttaggggtcggattgggcctacttggcccaatgcccaaacccaagtcaaaaacccaaaataagttccaaaccaaggagtattaaggcgaagggtagtttcgtcaaatccctcgatgaatgccctacacgcatagtgctataaataccgaatagcatgtcctgtcacgaggggggattccgccaggacacttagagacaaagaatagcccgtctcaagtagctcgtcagctcacccttctcaagtagctcgtccgtctaaagtagcttgtcagctcgcccttctcaagaagctcgttagctcgctcctcatcgccaagctcttcagctcgcctttaagctcttcaagctcctcggctcgtcctcaagctcgtcctcaagctcctcagctcgtcttcaagctcttcccatcactcagcgaccatctcctcgcctagctgtcagctagtcagctcgtccaactcgtctagctatcagctcatccctcgactgcaaaactcatctacctcctcgcctagcggcagttcgtccattgactgcatagtccacctatctcgtcccccagctcgtctacaccttcagcaaacaactcggtttgtccaactcgtctctcttccacggttcatccagctcgtcgcacatttgccggctcgtcaactacctgccgacctacctccaatgacggcctagctcacttattctaatatgaactacgtgtggcttgatccctttctaagggtacgtaggcaaccttttacaaggttcagctataaaacgaataaactctattcttcctcggacatcaagttcgtcttccggcctcaagctcacctttcatctacaatcagctcgttcttactccatctatgctcgttgaagaaatcatcctttgtaatccgtccaattcgcctaagtcgcaggctcgtctttaatagaaagattcttcttccttccctagaggtcccattttcgtacttgtgtgattcgtgcatcaacaacagtgactgtgatattaattacaccaacttccttttatcttgttttagtctttaaaaatattgatccttattccttcgtaaatgcatgtgatgcttttggcattaaatcgtgactaacaatatgaccaatgatcggaaccaatgatcggaaccaaagctagaggttcagcttccaaagttgtcagtttaagtaaatgcatgtgatgtttttctttgtcaaattggttgtaagttgtagattgtaacataaaatcaattcttatttgacgcatgatacaaaacctaaatggcgcttgaaaattctgacggttaactgtaacaaaagctcaagaggtgaaagagaatctgtattcttaatttccatatccatattgtataagattcgagaagaatattttagttctacgtagaaaatatacaaatgttcctcaaaacataataaaatgtgcgcacgtaataagtcggaacaatagggcgaaaaaggtgtacatttgataaatcgtgatttatacactaatgaaatttaagtgcgaagatctaacggtcctgacccctagggttaggggagttataatgattagtcaacaattaaaacaaaactaatcaactcgttgaacaaatggcagctttgacttccgcttctttagttgtctgaaaaaaagaaagccgagtcaaattctctgtttaggattcgctactagtcagctcgaagaaccattcaattcgagacacgtgtctgtccaagtctcggggacctcaaatacacgaggcccataagtaaatgggcttacttaagttactgcattgagaattgtagaaagctggattttttattttaacaaaatttagcaaataaccatacataaataaatagcgattgtgtaattatataaaatgcataatcaagaaattattaaaaacattatagtaatggttactgtatctaaacgaacattatcccaagctaaagacatcgaaaggtgaagctttctcggtcggcgaagcaacagagtagccttgcataaacttcctcagcttaactaactcatcagaacctgagagacgctccattagaatctccattgtgatctgatttggttcacaagactgttcgaccatctcatccatcagtttaagtaatgtctctccttgggttttctcgttaagacacttaaacaaggcattgtaagtttcaacattaggtctcaccatcttcatcttcatttcctctttcagagagagcgcttgcccgaaattccccagcttagaaaatgcgtttatgagaatgttgtatattacagtgttcggattgacctttgagtgcaaacccatgtccttaaagagcttcaatgcttcgtctaattcgccgactgagcaataagcgtcaatcaccgctccatatgtcgtgacagtcgggtctaacccgtcttctctcatctgctccatcattctctcaacactctcgaagtccttgtgtttaccgaaaaacgaaatcagagtgttgtaagtgatggaatcaggtttcttcccttctttttccatatcggttagcatctcatagactttctctgtattattcttatcacaaaacaacccaataagcatgttgtaagccaataagtcaagagaaaaccctccttctttcagtttctccaccactctaatggcgtcatgatcccgtctaacttggcacaatccagagatcaaagcataatagatctttgcatcaggagaacaaccagcttccaacattttttcataccaatacatagccttctctacattactgacgctgcaacaagcatgaatcaatgtcatataagtaaccacattccctttcacgccttccttttccatatccataaagaatacaaccgccatgttcaatccatggtgcctgcacatcccaccaacgattgtattaacagttaccacattaggtttaatctcgtcctctttcatccgagaaacgacttctttagccgtctcaagctttccagctctgcaatacccatcaatcaagcaattgtaagtaactgcattgggcgcacatctctcttccagtttcatccttaccaataactcctctgcttctttcaacctccccaccttgcagagcccgtcaatgagagtattaaaatgaatcgaatcagctttaatcacatttccatcatcagttctctttccacgcattttttcaaaaacttcgagagcttcatctacccttcttgatttgcataaagtgttaataagaatccctaaagtcacaacatcaggccggattttcacctcatccatcttcaagactaaatcattcattctactaatgtccatattccttcctaagcaagacaaaagcgcattgaagggaggagcttcaagtggggttttgttcttcatcaggtcgctcaaaatatcccaagcagcattggcgcgagcatttttgcatagacttgatataaaccgagtcaaccaaacagagtttggggagacaccatgagagctaaatcttgaaatcaaagcaattatcttttcttctgtcaaaagccttcccttccaaacctcgtgtaacacaatatccgctgtgattctattaggaggaaaaacagattctttctgaagcatttcgtcgagcaccttgaaggcatcatccacaagtccatttcttagcaagacgtctaccacaacattacgaacctgcgagtttttcatattcgaatcgagtctttcgtatacaagaaccgactgattcaccatacccatacgcccaaaccatcggatcagaagattagtggcaacgacagtaagaggaatgttcttctctttggcgatctcgtagagacggagaagtttatcacgcgggtccggttcactaccggcgaattcaatgaccgactgaagcgccaaggagagagattcttcacggcgtttcagagactgagacttcgcatccaggtactcgaagaacgagattgctagagaatacgatcctagccgccgcgtgatttgcgagaatactaaaggagaagcagaagaagaagatacgacaagcgcacttagcgactcgctcgacgcccaatcatgttgcggggttttttgaagagttttcacaaatttgactactacaaattcctggctctccaatttgatttccggccgtgggtcaacatcatatgaaaaacgacggaggaatcgagaatggttgagcagaatataagagttccggcgccgggaaattgatagcatgatactcatcgtctaaggttttgaaaaagacggccaccgggaaaagtgagacgacgaactctgttcggcgaattcaacgaacaagaagttgggcccattttaaataatgggcttacacatatttagcccaaataaacctttacaatattacacaatgggtacaaaaatttattttttctcataaaactgaacgtgagctttttattatgctgactgattacattatatttataacaaaatgaggacgaatctttatttttctcatataattatcctctttgttttattaatcaagccaccaccctgaactctgaaatagctcctatggattacactagttttacccgctaataactatcctattaaaggatttttatttcttcaacctactcaaaatgaagagctacgagaattgcaacagctttgtcactgagaagatggtgaatctgaatgatccatcttttcagctgatgctgctgcatcagaagcagctttatctaatcccaatttctgtaactcgcttaagaatccgtccaggtcgcttgaggagatcttgtaagggctgtgagaaggacctggaaacaagtgtttggatacttcttccttatactccaagagggctttgttgatcacttctcctacttgagcgtactgtttgcaaaactttggagtaacctgaaatgaaaaaatatagggatgcaacacagcggaaactatcagataatgaatcataaatacaggaagaagcatgatgatatatgaatggtccaggattttaccttagcgtgatgtggatgctgcatcattcccagaagatcatggtagactaaaacctgaatccacaagaaaaatgtgacatacttgatcagaaatgtagataactcactctttttgtgctgatcttactctttaatcatgcaaaaaggccaataactgagaatatggtttattcaatcaaaccatgtataagcacatgaaaccgaaagaagcctattgctctcgttaagacaatgtaaagagtatcaaaacgaacctgaccactgcagaaagggccagctcctatgccaatggttggaatattaagagcagaggttgcagcagcagccacaggaggtggaacacattctaaaacaaccgaaaaacatccagcttcttgcaaagccatagcagtttccacaacctaatccaccaaataagagaaaaataattttatcacacacccctttaaaaaataacctcttaaggattacatacacatgcctgaaccattacattcaaaccttaacagcactagcaatgtttttgccctgtggcctgaaaccaccaagaacactgatagcttgaggagtcaacccaacatgtcccataacggcaatccctgcttccacaatggattttgcagcagtgatccttgaaggtgatcctccttcaagtttaatagcatccattcctccttctttcaacaccctaactgcagtatcaaccgcctgaacatcattcaaactaaaacttaatcaaccaaatcgatgctttgctcgaacaataacaaacttgatatcaaagcgattaactgaaacataggataggatcctttgggttgtgaatttgaaacaaagtatccaactttcgagattattcacctgattggtgctagattcataagtaccaaacggcaaatcgccgacaagaagtggtcttttggctccgcgagcaacggcgcgacagtgaacaagcatctcctctaaggagataggaagagtggtgtcatagccatggacaaccatggcagctgaatctccgacgagacaaacatcgattccagctgtatcgatgtgaacggcagaagggtaatcgtaggcggtgaccatagttatcggctcacctttccgatgcttctgtctcaattgcgtcaaagtcactctctgattcgagttctgcggtttcggtcctccgtaaaccgtgtcctccggtacgttgctcataaaccggacggtggtgatggctctcgaagcacgagagcaacaactcctgacgagcgaagcagccattgttgttgctgatgaaagcgattttggaattagttataaatttaaagacttttggataaatatttttcttttaagaataaaaacgatgttggcgactcacgcgctggtgactccgattccaaagttgactgctttcgtactctctctatctactactccatcaagattgtctggttctgttccgggtttgattgatttctaccgtcgccggagattttgtcgtgtaatcacctccatggctgaagcgggatcggtttacgtcgatgtagctggggaatcgaagtcggagcatgttactgggaagtggttttcggtgccggagctccgactgcgtgaccaccggttcatagttcctcttgattattccaaaagttctcccaaaattaccgtctttgctcgagagatcgttgcgggtaacttgaaatttggagctttttgattcagagctctttctgtgattacgaagctaaaagtttgtgtcttttgttttttgtagttgggaaagaggagcaagcaatgccgtatttattgtatttgcaaggtggtccaggatttgaaggtccaaggcctagtgaagctagtggatggattcaaagagcttgtgaagagtttcgagtggtcttactcgatcaagtatgatgctttcatagttttatactcttctctggacagtttttttagtctttgtgttgttctaattttgtttgtcctgcagcgaggaacaggcttgtccactcctttaacatgttcctctatgcttcaattcaaatcagcaaaggaattagctgattatttggttcactttcgagctgataatatagttaaagatgctgagtttattagagttcgtcttgttcctaaggctgatccttggacaattttgggtcaggtaatttgtctttgtattgtctattggtcatcttgcttcagttcttgtcatttgattttgtattcatctttttttcttcaaatctacagagtttcggtggcttttgtgcacttacatatctgagttttgcacccgaaggactcaaacaagtgctaataactggaggaattccaccaattggtaaagcatgtacagcagatgatgtatatgaagccggttttgaacaagttgctcgccaaaatgaaaaatactacaagagattccctcaagacattgagattgttcgtgaactcgtaaattacttggctgaatctgaaggtggcggggtgagggattacaacatttgctcaatccactgaccagtttagtttagttccttacttgtctctgtttctttgtctttaggtacctctcccatcaggaggcattcttactcctaagggtcttcaaactcttggtctttctggtttaggatcaagtactggttttgagcgcctgcattatatgtaagagtttagcttaatttttatcaaccacctcacatgttctgtgttaaatctggccttcttaattgatcataggttggagagagtatgggatcctattttagttactggagctccaaagtgtattagtcagttcttcttaaacgctgtaagagacccacaaaaatttgttgttttctgttctcagctcaaataaggaattcaatagtctgagacattttatcgttgctgcagtttgagagttggcattcttttgatacaaatccactatatgctcttctccacgaggccatatactgtgaggtatagtctcttcaaatttctcatctttttttctatttcagacaattacttcttcttgttatcgtttatgtttaaatggaaactttttcagggtgcttcatcaggatggtctgctcatagattacgggataaatatgagtacaaattcgacgcaatgaaggcagtcaaagaaagtcagcctgtactcttcacaggagaggtacaggttttgagtatttctaattgtatggctcatagcttggatgattggtccacattgcttaactaaaatagaatttggatttgtatagatgatatttccatggatgtttgatgaaattcatgccttgaagccatttaaagctgccgccgatcttttggccaagaaagaggattggcctccattatatgatgttcctagattgcagaataacaaggtctgtttcagaatcttgatcgttctttcatatggatcaaataattttactctgtttcacatgatttctttttgtaggtgcctgttgctgcagcggtttactacgaagatatgtatgtaaacttcaagctggtgacggaaacagcttctcatatatcgggtatcagactttgggtaacgaatgagtttatgcattcgggtcttcgtgatgctggaagacaaattattgatcatttgttgggaatgatcaatgggaaaaagcctctcttttgattccttgtactagtcagtactttgtgacttgtggttttcttcgttatacactttctttgagaattaaatgagtaaaaaagaaagagaatgaataaaagaaagtctttcaagttttgactttcctttccatttagtgttcatgcagacagttgggcgagagacagtgagataatgtaaattctagatactacttatacaatatacgatgctggtttagcaaaatccgttgtagtctagctggtcaggatactcggctctcacccgagagacccgggttcgagtcccggcaacggagtctttttttgctttctgtttttttatttccggaaactgtaaaatagaatgaacttagaagtcgtgagatactgttactatctgctcattgctcaataaaatgttgaatgatgaaacgaaaatagctagaggtaaacaacaacaaaatatcacacatgtcaatgtcatacggctcaagcatttaaactaaataagactagaaaaacttgacctcccttgggccacactactaagtgaagtcactattcacaaaacgtataacaagaaaacctaataaatgcaaagctattaatattttgccaaacattgtattcaatgccgtagctacatttccccacccacctccccaaaacaccaaaaaaataaatacaccaataataatctctccatcactcttttttgccatcgacgccaatcccacatggccctaacctctttcttcaccatcaaatgtcaaccgccaccctcgtcgtcttccctcctccacctcctgtccctatccctacctatataactagcctcggccttggctactccatagccatagctctaggtttcctcgttcttatctccacaatcattctctcttcttacatctgttgccgcgcctcacgcctccgcttctctgcctccgccgcaaacgcaaacgcaaacgcatcgtttagcgaccgtggcgttatcgtcccaagaatcatattcgtagctgaagacgacgatcttgagtctggaaacgtcgtcgttggaggtcttgatcattcagtcatcaactcttaccctaaattccatttcactaaagatatcaccgccgtagtaaacggtgatgggtttcacgacggagaaggaagagagacgacgtgttcgatctgtttatgtgagtacatggaagaagagatgttaaggatgatgcctgagtgtaaacactacttccatgtttattgtcttgacgcttggcttaagctcaatggttcttgtcccgtttgtcggaattctccacttccgacgccgcaatctacgccgcagtcaactcctttgtcggaagttgtgccgttgtctcaatacgccgccgatcggaggagatccagaagataaaacatttcttttttttgctccgtggcatttattattaaatctttttttcttggtataatatataatttattgatttgctttacatactctttgtcatgtaattaagtttgtatcaaacaaacaaacaaaaagttcactgttgcattcatcttcttatattttagctaatcgagatttggactacaaagtcaagtcaaatatgtagttaatcaaattagattagattaattgtcggagatgaatgtctctaaagatgggaacaaattagttggaatttgagatttaaacaaaaatgttcctaaatatcggtaacgttgactaaaaaaacatatgtttttctaagcaattttaatgtgtttgaaatgtcaaagaatgtaaaaaagagaaagaaagaaagtctctaaccgagataaagactttgccactcactgacgaaatgtcccacgacgtcgttctatcgaccgtttgtttttttttaaacgagtgagccgttgatattattcttatatgaaccgatgactgccagtctgccacgtatacggaatctccttacgcttgtcggttactttatgtaagtaaaaaagaggagttacagagcgcaccaggcccactaggcctttgttggatccttggttgcctccacgttccaggcactaaacgttgacgtccgtttattccttctttaaaaaagactaacgtcgttaacgtatttctgtggttcgggtcacgaatctaaaggctcgttcataagttgcctaataaacctatttctccgttcgttctctccctctctctcgcttcacgttggatcgaaatcggacaaaagtaaacgacaatggcggaagaattggagaaatctatgcacaaggaagaatctctgatggagaagatcgctgataagatccacgatcacgactcttcgtcgtcgtctgattccgagcacgagaaaccagagtctccgtcagctttgaaggccaagatatatcgtttgtttggtagagagaagcctgttcataaggttctcggtggtggcttacgtacgttttcttctcatctcttttaatcgtttgtcgatgcttgatctgctatatgatatgaggattgattatgtttgttgataataagtgttttgctatgttttcaaaccatttggatttgtcttactgttgccttatgtttgcagcggctgatgtgttcttgtggagggacaaaaaactctcagcttctgttcttggtgtagcgactgcgatatgggttctgtttgaattggttgagtatcatttcttgagtcttgtgtgtcacattttgatattcgctctcgcagccctgtttttattgtccaatgctcatgcctttatgaacaagtaagcttttttgttgccatgtttcaagttacaatctacacgtttctctttctttgctttgcttaaaggttccaaaaaaacttttattttcaggactccacctaaaattcctgaaatccatattaaagaggaacatttccttatgattgtttctgcactgagaaacgagctgaaccaggcctttgttattttaaggagcattgccttaggaagggacttgaagaaatttctcatggtatgtttgtgttcgaattcgttattgtatacgtttgagttaagagaacaatatgatattgttgtagcataagttcagaacttattcaatctacttatgaaaccttctctatcatgggttttgtgacaaggactagtatatatattggtatctcaggtggtttttgggctgtggataatctcggttgtgggaaactggttcaacttcttgactcttgtatacatctgtaagtattcctaccgatagaaaaggttttagtttcgtctttttgtttgtttgagtctgaaattatctccatgtgtgtgggaaacaaaaaaaaacaggttttgtggtgttacatacagtaccaatgttgtatgagaaacatgaggacaaggtagatccagtggcagagaagacgttgaaggagctgaagaaacattacatggtgtttgatgagaaggttctttctaagcttcctgttgcttcccttaaggcaaagttgggttaaaaactttagagtgaagcaacctccctctctttattatctttccccttgacgttttgctttgtgtcttggggcatttttatttgttacttcagaaaaaaaatgttactctgtgttttcccttctctaattttgactaatacctttttcgtgggaaatgatttaaaatggtttctgtgaatgctgtgttaatcaaattttggtaaaagatgcaattagtcgttagctcatgtaatggtaaaacctttcacaaagaaaatcacagtaccagctgatgtaactttgtattttaatctttcaatcaaaatttccatcaaaaagtcagcagcatacatcaacaaaagaaaaattgacgaacaaacaaaggtgtgagatcataattacaacaaaagactcaatagaggttcaaattcctattttaaatgtaagtatgtataatgtttatctatgtaccatcttttaaggaagttatctcgagagtcgttgattactctcagatgatctgagaggcacagtagagaactctgaatcatgcaaagccgcctcttgtctcgtcctctccgaatcttgcttggctttactcgctgctgcttcttctgcttctcttctctctcgctcttccgcgtctttgagtaagaaatcgacccatagatccgcaaaagactgtaatacaaattccaaaaaaacacacaataatatctctcttagtgtgaaacttgcctgtgtagccgacaaaaaaaaacaaaacttgcctgtgtatcagtgtactttattatgttatggaggacttttacctggttatcagaagctgcattagcatgtaactctgcagatttcccacccaaaattcctccgacaaagcggcccggaaagcccaatacgcctctaacaactcctttacctcctccttgttttgccgctccaatccgctctttatcttcctctgaaaatcctagcatccgaaccatgaggtccaaaacctaggcgaaagcatgaaacaaccgaagtatatcagagacatttctcatatgtgtatgtcacaaactggatttcagaataatatcaatgtctattacctctttgttatgattcttctggaagtatgtaaccagcaatttaataacgattcgcctgcaaagacacatgttggttcatcattgcatcagaacacctaattcagacaggagaatcgaaactatatatgtccaagtgttaattggtgtacctatcaacaagataatcagactccattgacattctattgagccttgtcatgctctgctcaagaacacgtcgtacttttgcattgtcttcttcaaccttggttactctgtttttccattccgctgcaactttttccgcatgcaataatttggatgtgacatcttccttttctttatttgatgactctaaccgctcatcagaatccttcagcaaccgcaaaatagcatcagacagatatcgttatggcaggttgtagtttataaagggaaaagatagttatattcctactttcaaacgagcagaaagcttcatcaactcgtctttagccatcgcaagctctcgttcaaaatgctcctacaaaatgaatacgaacgcattgataaattgagagtaagaatagaaaaggaaagatttttgaatttcctaattccaaccttagcttcgatttcagcgtaatactggcctagagcagtttgaagatttaaaagttcaacattcttggactcgattgttctcaaacaatttgtaagtttttgatttaggtcatcaactgtgtcctttaattttcggatttggttgtcattgctcaatctgttatcctcctgattcgagatggcctgcttaagacttttctccaagtgtgatatctgagacctttgatattcattagtctggcggagttcttcaatcagtcggctatcttcatccattttctcagactcctctgtttcctgtgaaattatggcaaagaacacacttttcaatcatcttcacagaaaattatcaagaaaatattgtctcggctgaattcataacaatcttagaagctagaaaacgaaataatttgcaaaataatgatccaaaagctataatactacaacaaatgtaaccatgtcccacactaatagattcagtaaaatattagcttttacgacagctgctaaccttttctagcaagtgctgtttgagtcgttttaattcttgccgtgccttatctctttctctttgtgtttccttcaaatccatttccaacctctgcagggattgctccatttcttcttttccaggaaagctttcaggcttctcctagtaaaatatggaaacggcataagaaggaaggaaaaaggtagctccacatttaatgaaaagcaatgcaaaatgcgtttataattaagttccttctagtttaagaaccttgtccaaagtactaggatgcctagtcagagactctgtggcgtccgggaagactttgctattggttagcttcctgctttcttctaaagcagcttctagctcacttcgtttcaactatgaagtgatgaaaaagcatatcagattcggttccagattccaaaagtcaacgtagacatacacaatgttggcaatttttgcttgcacaaccattcagcagtatggaacacaataaaccttaagctcgttgttttccttctccagagctttgttaacttctttcagatgttccatgccaggtccaatagcatggctttcctgaccagtcaacttcatctgcaggtgtttgatttcaagtaattttgcatccaattcactacgcattttgctaatctccatggaggtctgcaaacagattcaatacagaaaataagaaaattgtaacttagagatggtgattcctaagaaaataataaatgtgtcttttctaactccaagacttactttgtttttatctaacctcatagactcgagttcttccttgaaagattcactccttttccgctcctctgatggaagtaaggtaagtgagaatactagctaacatggatacaaaagaagcaccaagctacaagtgatattatataccctgtagagatagctgaaaatctcttaatttttcacgctctttggcaagctccgtagcttgaacagctgccattgatttggttctatcttctagcatatctgcaaggtcctaaaaggacatccagtttatcgcttataatttggtatttaccaaacaagaatattgcagagcaattacttatgtattagaagatgtatctaaagaaattcagaatctcagaagtatgtatcctactgacaaccaattttcaagaccccaaagcttttatgttaagctaatggtaaataaacattagcgttaccttttcctttataaacgaatcggtatccttcccttttccattggacatatggtttggactttttaaatgcgaaacagatttgtgtagcctattgggtgactgatcattgtttccctggagaagataaataacaaattaattgaatagtttaagaccttcacttaagaacgcatctctcagcaaaataaacacataaacaaatgtgacatacttatcaaaatagtgatgttgacaaaactttcttgatctaatatatgatctcataatacgctttctatcctagtaaatcccactaataaacttagcatataaccaatcctatcaataatgcgttccatgccaaaacatgcttcacacattacaactcttaagtagttgcatgatcctcgtgatccttcacacacagtatgcgcaaagaatcgcatagagatgaaacaaagatatgaagtgtctaccttgatagcatagttgtttgatcccctggaaatgtcggttctagcctctttaagagcggcactagttgaggtcagattttgtttcaaagagccattctcctgattcaatctggaaatctgatcctgtaataatcccatagggtctttgatgtaagaaaaagagagaaaaacagttaatggcttgaagattgtgtgtcagaaactaacctctttctctcttaagagagctgcataatttacagataaggctttgatatctgattctgattcctgaagcttcttaatctctgccttataccgctcaatctaaaatgtgacacaaaattgaatcataaaaacaaacttaacactagaccaactacatcacagattttgagtaacatttccagtgaaattcagatgcttaatctttaaatctagcaataaatttatccaattcagaccaaatacctcatgatgagcaggcgattcaattccattggagatcgaatacctcgaaacggacctaaaaccactggaattcctccgatcagagttcgatacgccattggcggaaccatatttgtggagatcgtcttcttcttcgtcgtcttcatgcacatcgagaacgatcttgtgcaagttcgccttcatattctcaattgaactccacatagctctatctcaacacctactgcagcctcaaaggctcaaaaaccccacaaaaacacagatcacttgtctatcaaagagacaatgaatcttcgtcggaattgagcgcagataaacaataagcagaaatgaatttcgtgttcttttcccggtcagagagaagagatttggaattgaaataaatgtttagatcatattgaattagcgtattcattaattaattaactcttatcgttacgttttaaaacaaatcgctactcgtagcaagttattattattaatgggcttttaaaaacaaaggcccaatagataaatatgagacgtcaaaataaatctttagacaaaaaaacacaaacacaacagccgtcgttgcaaaatctgtcaggacatgtgctcttcgatggtcggaggcattgtgaagaagttgttgatttcacttggaaagtctagctctgccttggtcagcggcaaacttttgaagaagttgtagattcgacttggtatgtcactgcgaagaaactgggaaataggccaactgggcattcaaaacttaaaaccaaatctgtaatggaaccaagcaaacgacaagacaaacgaccaccgcacaaaacgaagccagtggatcgtcacgcgatgtcaatatcgacttgaacctttccacttgtgagtcagcataatccatcatgtacaacaatttctccgacatcttcatcaacctttcgtgcctcaacctcaaaatctcattatctgcgctagtcatatttttttatacgagaaattacagagaaaaatatagaatgacgacttatcaaatttgaatgtgctctttaaagttttttattcaggcactacccgttcaatgttcatataggacgtaagagaaaaaaacggaaaaaaaaaagaaagtaaaatttaacattaacataattttagaaaagggaaaattcacatatacggtataaatttgtaatagaccgtcctatttaaggccgtacatgttcttaattttttctaaatcaacggttctgaactattaggaatttaggaaatcatttccatatatccaattatctatatatgtaatgtatatactatgtaggtttcatcgcggcccttttggatttgagtttccagaataaggcccattttcaaattaagatttcagatcaagaccccttttccaacccgttgtgtaggcccaaataaatttcatttgactgaacatcaaaacttcaaaatatcttcttctacaaaattggcattcgtaattatcttcttgaaaacaaaacaaaatatatgcaccaattttcatttgtcacacgttgtaggcttcgaatcgtatgcattttataattttacttataaacaaaagtgacatcagaaatagtatctcctatattataaaaatgaataaccaaccatcttcccactgctttcccaagtcttctttgtattccttacaccaaacaaaaaaaaaaagtcttcttatttcccagttgagcaatttccctcccttttgctatttaatttgttcttttagtaatattatcaatgtgtttatctgacttttattctcctccatggataaaataaagatatcccacttgaggaagaaaatatcttggaagagttaaccataaatcagaaaaagatatggaagagaacagctgtgtatctttgagaccaagtcttgagaagcagttagacaacatggacggtgctggttgcattcaaaaatctttctatacataaaacggaatatgccaaaagtcatcaatatatcgtaaaaaccatatgcttctatttataaattttacatttcataaactttaggttagtttatgtttccatatcactcatgactcaacacatatgctaatattcgggtaatttatagtaaaaatgaaatttttaaaggtaaaacctgtatttttgtttttttctgtaaaagaataaggctttattgaccacaattagaggatacttttctttttcggttttggcatttggtgatactcttatttattttcttaatgttgacattactaacttttttggagcgtagaaaaaaaattgacggacaccaaccaatgacagaacatacagaaaatatctaaggtaacacgtggtctgtcttgcatttcatgattacttacgagggacagcactaagtttcctcctttctaattaccataactaaccattttcttaattgcccaataatggtccctctttaccaattctgatataccacccaaaattaacatcaaacccaatatttaaagtcccacacgtgagaacgactgacgtcggcacgctttagccacgtaatttcggtctccaaaaattcaatattaatccgcgaaaattcactaaatataaaacaaacccataatataaggaggataaggaaggagtcgaagataagcggagagagagagagagacagagagagattcaaaaatccgattccagatccattcctgggcaaacaaaggttggtgtttctctaatctcaaagcttttttcaaattcggaaaaagcaaatcgtgggaagagattcatcttctctctgtgcgttcatcggatctcggagcttttggttcgtcgtcaatggcggaagagacggagaaaaagtacattacgaacgaagatcttaaaaaacacaacaaatctggagatctatggatcgcgattcaaggcaaggtctacaacgtctccgattggattaaaactcatcccggaggcgacacggtgattctcaatctcgttggtcaagacgtcaccgatgctttcatcgcatttcatcccggaaccgcttggcaccatctcgaccatctcttcaccggttaccacatcagagatttccaagtctccgaagtctcacgcgattaccgtcgtatggctgccgagtttcgtaaactcggtctcttcgaaaacaaaggtcacgttactctctacactctagccttcgtcgccgccatgttcctcggagttctctacggtgttttggcttgtacctccgtcttcgctcaccaaatcgccgccgcgcttctcggtctcctctggatccagagcgcttacataggtcacgattctggtcattacgttatcatgtcgaacaaatcttataacagattcgctcagcttctctccggtaactgtctcaccggaatctcaatcgcgtggtggaaatggactcacaatgctcatcatctagcttgtaacagcctcgattacgatccagatctacaacacatccctgtcttcgccgtctccaccaaattcttctcctcattgacctcgagattctacgatcggaaactcacgtttgatccagtcgcgagattcttagtcagctatcaacactttacttattatccagttatgtgctttggaagaatcaatctcttcattcaaacgtttctcttgctcttctccaaacgtgaagtaccagatcgtgctttaaacttcgccggaatcttagtcttctggacttggttcccactcttagtctcatgtctaccaaactggcctgagagattcttcttcgtcttcacaagcttcaccgtcacggcgcttcaacacattcaattcacgcttaaccatttcgctgctgatgtctacgttggtccacccaccggtagcgactggttcgagaagcaagcggcgggaacaatcgatatctcttgtagatcatacatggattggttctttggtggattacagtttcagcttgagcatcatttgttccctcgcttacctcgttgccatctccggaaagtttctccggtggttcaagagctttgcaagaagcataatcttccgtataggagtatgtcgtggtttgaagcaaatgtgttgaccattaacactttgaagacagcagcttatcaagctagagacgtggctaatccggtggttaagaacttggtttgggaagctttgaatactcatggctaaatgattttaatcaaaacaaaatatgcttttgtttgggttaaatttgatgtgttgtttttatgctttattgaatctttgaatttcgttttgttacttacttacatggaagagatgttttagatcgaaattgaatcgagatttgatttttttattagacaactcttcgtatcgtaatgatttattaataatattattttgaatttaatttgtttttttatataagtttttgtttcacatggctcttttttgttgcctgtgacttactttgtggttttgcggcttttggccttttcaatgttttgtcgtgttacattaaaatacgtgtgtggatgctatttgagatcctctatatgtaaggttttaacagatcaacggtcgttgtgttattttgggtgtgtgattcgtaaccacgaaacgttgcaacttgcaaagatatgggcttcttttttgacctcatacttcttagtgggctaagatgggtatcaagcttgtatattggtctttttgatattcaattaatgggctaagttatgcaccacttgttcagacccaagcccgtgactacaaacacttatggccccaactccaaaaagaagaaagaaacacacaaaatttcggaatgttatatgtttcaaacacaataagtcagggaatggtttcacttgaaatgtttaagccgataaaagaagaggtgaaggatttagttttctgaactagttcatgatttcaaagatgaatggtcatgacttatgagactcacgtagcttactgttatctggtaatctcgataagttattttattatgagtcaaatcttgaatttggaggatcctcgattgcgaatgaggaaggataagtctttgggaacattttgtactttttagattatgtaatccggtttcctttatccggtttactgtaattatgtagttggtttactttggtttacttgtatgtatataaactcaattgtatcatacttagcttaatgagaaggttaatacattcacattatttctctaatagtactgagattagagaattcatctttatgataaaatggatatataattatataaatctttctttaaaataggagatagagagagagagtgagaaaacagtactaaaaataacaacttgagagagaaacagtaagaaaagagagcaacaaaatgtggaacagaagaagtatgaggtcattagttgacttttaagtttactccactttcctacaacaacaacaaaaaacagcaaaattagtccacttccacaatcatttctctttttgatttacttctaacgatttttgttaaaacccacgattatgttacaatacctaattcatatgttggtaatttggtgtacatctgattagtttattaaaacgtgtttgaattaagtctttagtaatcgtggtgtgtggtgaaaatgaagagactgtctatatcgacatatgtgttgaatgggtaagtgccatggtcaaagcttataactagttttcattgtcttttgatacgtttctccaaaatcttttctatttttcagctgtattctgatatgaagtctggatgaaggattttaaaatggtttagaattcagaaaagaaatttactagttattttttaaaaatgaatgtgtgcatgtgtgagtgtgtttgctccatagtgtaaagaatgagaagtgagaagtgacttaatgtgcacaaaggtgcctttggcagaaagatcaaggcctggtccataacacccccaagtgacaaattagtatttgccactatgttctatatacatttttatcctttctttgtttattgtttttctgtgtctttacacggaccaccaaatgggccaaattgattagtgcatattgatcttgctagatcttcccacaatcttcacatcgtaatcatgttcttttaagaagaaaaagtgttgttttcacactcttaactcatatatagatacacgaaacacgatttgactacagcttctactctctaggttagttaaagtttttttattattttaaaagttattagttagatgcttttcataaacgatgcaagaaggtacccaaaaagaagttgcaaaaacaaatcttattagagtttgttttcattattatcgttgcgttttatttgtttacgagtgaagaaaagagaaacaaaaatatagttgctgaaattttagtatttataaaattcgcagcaatggatattagaacgtatccataatctgactatagataattctatatcgtgccaagaggaaccaaaataaattgtacatgtcgtttgattcattcctttaatttattgtgtaaagaaggatccaatcctaacaaagtcttcaaaaccttcacattttttcgaaatttaacgacaactatagggtttctagctagatttgaaagttttttcacagttacacctttacctatctgcagtaatacttccacaaaactaacgttaaacttctgccggtacaaatacatgtgcttatgtaagaatgaaaacattttgaatttaatattttgcactggacacgtttttcttttgccattatggattttcacatagtgacggatacgtgtagatccgccgatccctatgacaacatagcattttggaatttgtttacgttcaactcctttaaataaatagttaaggcagtgcgtcactatactgcttattactacatagtctaatttggtatatgctttgattatggatttatgataatcaaaagttatatggtataaccaattgtcgttagctcaattggtaaagaccttaggcgaagcttagaggtcgccggttcgtgtgatgtttgggacgaaactaatattacatgctgtggtttcgggcctgaggggattacgggcttcggcccaaaacttcttggatttcaaaaaataaaaataaaaaagttatatggtatattcttttggatatttcattctctttttaatttcgtttcgccttaaccgcattctctaattaaaaatttaggtacatgattcacacttttacagtttagcaatgtatacagtttcgaaacaaattcagtttccaatgcccatgaaaacgcgtataataccataaaagtttatgttctcaaactagattgagattagtggccaattgatcatgcatgttccatttaactgaagatatacgtaaacatgatcaatcgtccatgagaacaatttcagtcttgctacactaaaatgcaacggatcgtaaaagtgatttatattttcatagaaccaccacataaataattaacaattgaattcagatcttaaaaaacatagacaacagaaccaattttgttctaaaaaaaggcactaaggagcaatgtgatcatatagtttaatgagccagcaactaatcgcacacttgtaatataatggaatatataaatatgggagtagctagctatataaaccataaagggtaagggcatatgatcgaaagaagaaagaaagtaatgcatatggagctgagatcagtatatagctttacacgttaaatgtagttagtgcacatgacgaaaaactaaaaataatacacttgagataatttgcgttgatttttaattttgaatttgtagagtgagtgtattaggtaaaggacaggccactgagaaactgcgagaagtctaggctaaggaaagtagagagacagacctttcagtgtttcaaaagcaaagtataattactaaaggtaaattataatttttaaaaatgatcatttatttattcaaatatcaaataattagaagacaatctttctaaaataaatataaacaaaaaatgacaaaaaggttacctcatgtggtatgtcattttcagctaacccctctggttgccagagtaaataccaaattaagtaactttttaatttactaatgtataattgttatctttcgccctcctaaatttataacaatatataatatactgctaaaaaatatataaaacttcttatattagtaatccgatatgttggttaaataaaataaaactgaaataatcatatttagtctaggtacaatattaataacgccgggtttaaaaaatcatttaattggttggtttatgagtaagacagcattattattggtgttatgatatttcattgttttttgtgtttgcaagttctaatttttgttttttctttcttttgcaaataattaaattattgtatatttaatactcacatagtaaaaattaaggaaataacacgcgctaacacgcgcctcaactttaatcattttatttattcaaaccccatttcggaaataaaaatgacaaaaaaaagaagaagaggaagaaaaacagcaaaaacgtctactcttctctcatcctcgcgcttgctctctcttctcttttttgtctttccctttcgtctctctatctgtctgtatcattcattcgtgtttatttacaatcgaaccacgaaacgtctcttcttctctataaaaaccagatttttctcaatctcaatctctctcgctctcgctctcgttttctttgatgaacccttttacttcattcttactcttgataaatccaaattcccgagaaacccatttcatttccttcttctgtttctagaaagacctcttcttttcgataaaccgagatccacgaaacccgcatttcctctcgctaatctattctaaatttcgatactttttttttttttttatcggtttgaatctcgagaattccgaagattcagagtctccatagtcgaaggtgtgtagcgaatcgagatgggtttctgtttgatttcactgtcgctttctctgctttcatttctgagtggttcattgatctcttccgtgttcgtaatctatgattgatgatgtatgttgttatcagatgtttgattgatgtctgcctatagtctaatttcattattaagaacgttttttttttgtatacctaacatctaaattttgttgtattaattgtcatcagtggaatcttgacgttgaaaggatgacacaagctttctcctttttgtttttcttttgtctgaaaaatgtattgcaatgttagacaaagtcttaatactatctctcttcttcgtcttctgcattttcgatttaccattatgcatgtatgctaaagcaaatctgattgacaaggttttctcttgatttatgtattgttgttttgtgttgttgaaatgaatgatatttgggattcagattcgtaaagctttaaatctttatgtgttcttttcttggtaatggatttatttattttttgtatcgttgtttcagaggctcttgagaatggaagcagaaacgtcttggaccaattatccgtacagctacattacatatgtccctgaagctgaatcataccgtgagcagagcgacgatgaagccaaagtcgaaaccttttcaatggattctcttctccctgacgatttattagaacgaatcctctcgtttctacccattgcaagcatcttcagagctggtactgtctgcaaaagatggaacgagattgtatcttctcggaggttcttatgtaatttctccaacaattcggtttcccaaaggccttggtacttcatgttcactaccacggatgatccatctggttatgcttatgaccccattatccgcaaatggtacagtttcgatctcccttgtatcgaaacatccaattggtttgttgcttcctcttgtggattggtttgcttcatggacaatgattgcagaaacaagatttatgtctcaaatccaattaccaaacaatggaggacgcttattgaacctcctggtcacaaatcgacagattacacggcaatgtctacctccgtaaaccgagcgaaccaagcagtaaaccgcgcaaaccggagttactcagtctcgatagtgaaatcgaagcaagttccagggaatttcttccaatgggatctctctattcatctctacagctctgaaacaatgacttggacaacattagtaaacgatgtcttatccggatggagaggagggaacgagagtgtgatctgcaacaatgttctttacttcatgatatactcaacgggaggctcagatcatcgccacggcttgatcgcttcgaatctatcctcgataggatcaccgtcaagcggaatcttgatgaggagtttcattccaatgccgtgttctttaacctgcgggagattgatgaatctaagagagaggcttgtgattgtcggaggaatcgggaaacatgatcgaccagaggttataaaagggatagggatttgggttttgaaagggaaggaatgggtagagatggcgaaaatgcctcaaagattcttccaaggttttggtgaattcgacgaggttttcgcgagtagtggcacggatgatttggtttacattcaaagctatggatctcccgcgcttctcacgttcgacatgaatctcaagtattggagatggtctcagaaatgtcctgttactaaaaagttccctcttcagctctttactgggttttgcttcgaaccaagactcgagattgctccttagttgcaatgaagaagcaaatgggtctgtgaaagtcttggtcttttggattgtttttgcacagagaaatcgccggcggctttatgaagatgatgatacggtaatgtttttaaattttagttactggaaatgtttttcaggaatattgttatttgcaatttggtactctgttaattataaatttataaaatgaggcccagatacttttatttgaacaaacgaacccttctctatctctcagtgaaatataagaacatttttcaacatgtggcccacaatatctcatgtaaatgggtcggattctgaaactggaggttgtcttgttgctgttcctggtggataaaaataatgattttgttccttttttttccacatatattcataatgatttttcatgttttattaattaattattgttgtaaattattttaaagaattatgtttctgtacttgtataaaattgggacctattttcgtgatgggatttgtcaggtttggcagtgttaggtttacgggtaatggacaacagctattttattgtgtattttatcattttctcaagggtcacttattttcaattttcatagctataataatttactaaattttaaaatataacaaaatgtcattcattagttataatcgtataaaagttgacgaagtgatatatagattctacatactaaaaacaaaattaatttgtgtcattatgccaaaatgtcaaaaggaaaagaaaatttagacaattactctgacacatcaaatcagctaaaacctaactaaatataccaaactagcaacacatatttttgttattaaaagcatttataatgataaatcatgatcagaatcatagtaagcagattcgaacactagtctctcaaatttcggtagtaaagttttcaaccattagaagacaaatacgattttaacatcattagtattgttttttcttttttaatttaagcgttggctttccaaaatgaaatagtaacaagcattaacgagttaagttgtcaatgggggaagttaaaactctttaaaaccaaaaaattgaccacacaacacatatagtgcccactagttctctcaaacgaatatggaatactttaaaacccacctctattctcaagaattaaagcccagaatttcaacgttctaaaaatagttttgaaagatttgtttttcacgggtttttcgtaaaataattatgaacaaaacaaataaattcaaactaatttttacacgtacaaatctgactcctagcctcctagatgaaattcaaaattttgtaccagcagctcaaagctactaggtaaaaaatgtcacgagagaaaaccggaggaatattggtggttcatcaatacgaatcaaaccgaaccaagtcataaaccggttcatagaaagataagaagacagacaatcagtcatcactttggtctcgttgagcctttcgtctatctctcacctgaaagaaagacgttcagctttctctttccaaaatcaaaagctctccgatcagtttctccggcttaggaaattaattgaaggaaggtgatgagaggtactactgagaatacggatctgttcgatcccaaaacccaaatggatcctgacttcactcgtcatggttcttcctccgacggcgattttggattcgcttttaacgacagtaacttctctgatcgtttgcttcggatcgagatcatgggtggaccttcggattctcggtctgaagttgaagggtgtacgagtatcgctgattgggctcgtcatcgcaagagaagaagagaagatatcaagaaggaatctggtggtatgtaatttgttcgtatggtttagggtttttgttattgaagtcgaagtccaagtctttttgggttttaatgttgtgatttcattttgcagtcacgatttcagacattgtggcatgtcctgaggagcagattttaactgatgaacaacctgacatggatggatgtcctggtggtgagaatcctgatgatgaaggaggagaggcaatggttgaagaagctttatcaggtactactatagagcaacatcctttggcgaagttttagctgtacacaaaggagcttgttttgttctgagaagtgttttatttatttaatgtttaggtgatgaagaggaaacgtctagtgagccaaactggggaatggattgttctacagttgttagggttaaagaacttcatattagttctcctattttagctgccaaaagccctttcttttacaaggtatctaaataggttgttgatggattttgcttttgctctcatgtgtaccttactctttaatccatttgtgttctttttttctcggaaatgttgatagttgttctccaatggaatgagggaatctgagcaaaggcatgtcacccttaggattaatgcatcaggtacgccattgcaacattagctatctgaacgtgttattgatttatcacactagatacagttgtaccgttctctattaggtccacagaatcaaaatatggttttgatttgagtttgttaaggtaacttggagattcttagattgatttacatattatactctactttgtgtgtattacagaggaagctgctttgatggagcttttaaactttatgtatagcaatgcggtatctgtcaccacagcacctgccttattagatgtgttgatggctgctgataagtttgaagttgcctcttgtatgaggtactgcagtagacttctccgtaatatgcctatgactccagagtctgccctgctctatctcgagcttccctctagtgttctaatggccaaagctgttcagcctttaactgatgctgcaaaacagttccttgcagcccgctacaaggatattaccaagtaaagcccctgaaactacatatccatgatattactgtaatcaagagcacatgagatggtggggcgattcttataaggcatgtctaaactttcttttccaggtttcatgaggaggtaatgtctctacctttggctggaattgaggcaattctatcaagcgatgaactccaaattgcatcagaggatgcagtttatgattttatcttgaagtgggcaagggcgcaatacccttgtttggaagagcgaagagagattctcgggtcacgccttgcactctccatccgcttcccattcatgacatgccgaaagctgaagaaagtgctgacttgcagtgactttgagcatgaaatagcatcaaagcttgttctagaagctcttttcttcaaagcagaagccccacacagacaacgtagcctagcctccgaagaatctgcatccctgaaccgccgcctgatagagagggcttacaaatacagacccgtcaaagtggtcgagtttgagcttcctagaccgcagtgtgtagtctacctagacttgaaaagagaagaatgtgggggactgttcccgtcgggtagagtgtattcgcaggcctttcacttgggaggtcaagggtttttcctgtcagctcactgcaacatggaccaacagagctcgttccactgtttcgggctgttcctagggatgcaggagaaagggtcggtgagtttcggagtggactatgaattctcggcaaggtcaaagcccgcagaggatttcataagcaaatacaaagggaactacacattcacaggagggaaagcagtaggttacagaaacctgtttggggtcccatggacgtcttttatagcggaagatagtcaatacttcatcaatggcattctccatctcagagcagagcttaccatcaaaaggtctacagatccttagtgaccgtttacttctcaattgtcactgtctctctttcctttacctgctgctaaatctctcgctctctctaacttgccttttttttcttttcttttataaggcttgaagaagactaataaagcttataaaagtaaggttaaaaacgtttcgacgacaacgttataagaagaatgtaaatgcgttctttttttctatctacccttactcttttggctttggattataagtttaactcttcaatgaaattcttagcgtagagattcttgtattatgaacgaagttgtgaacagaaaagaacgaacgtaactctctcgtctcatttaactaatttatctagttggattgaaatagacatgacttttcgatttgggccatgcgtatgttgttggagttggactattttaaattcctgcaatcaatttcaaaaaaattcaaatcatattgaccgttgattatataccgtacacgtggtacaatgtcacagatatcttattataatactatacagttcacagtcctttgttttctttattagacaatcatgagacaaagtactgtaataaacaattaatcatacatggaattgtgaagtaacttttttgttactcttttaccagaaatgatcaaattttacaaatgattattttttgttctaaaatttattttaatgtcttagattaaggaaagtaaactagttttgtaataaataaagaaaaataattaagctcttaaatatgtataaatgattatgcatttaagtattaagaaagtgcaatagttttttttattttattttataatcagagaatcctcgtgcaccaagaatctagttccactaattaaggtgttattcttctcctctaacaccaaattatgtttgtatctcttatttaaattcattaatgacaggtttgacattaataaataatattttaaaatataaaatacattagtaattaaaattaaaaaataaatgagaataaagagtttcatctgtatcccgacggaagttgagttctgtttccgcccatttctatctgaaagcaatgcacgtagcctctctcgtccatctccttaaattcaacaagtatttaatctcttcctttaaatataaactctcaagttcatcaaactgtttccataagaactagtttttcttttcttcagatccaattttataaagcaaacctgagatttttattaatataatatatatattgaaaaacttccaaaaatgagagttatctgggtttaatttaatttactaaacatcaagatagctgttttgctctttctatcgccatgtgttcttcttcttctccttccttgtctcttttttttaatgtttttttgtttccttgagtgaagagtgtagaagctatagatttccagatctagtaacatcgtcttcatgagatttttgtgacaaagaaaagctcttttgtcgttttttcttctcttttggctgtggaaaaaaatcagaaaacttgtcagtgtgtaagttgttgaggttttcaaaattgaaaatgggtcaatatgcaacagtgtgggatcaaaaagaagcaagtgagataatcaaagattggaatggcgttgaccaagtccttctcagaaacccacatggtgcttctgccaaggtcttcactttttctccaaccattcttgtctgataaaaattcgagcttcttttgcttattctgtgtttgattttccagataagtttacatggaggacaagtgatttcatggaggaatgaactaggcgaagagcttcttttcactagcaataaggtatctgatctcactacaaaaccctgatacattgtgaagaatctgaaacataaaaagtaaaaatctgatttttatattgttatgaatttgttaggctatattcaaacccccaaaatcaatgcgtggagggattcagatttgttatccgcaggtaaaatttactagtagcgctcactgaactgagatcttttgttgatcactttttcattgaagttttgtgtgtgtgtttgtgaagtttggggattgtggatcactggatcaacatgggtttgcaaggaacaaaatttgggtaatcgatgagaacccacctccacttaactcaaacgaatccttaggaaaatcctttgttgatcttcttttgaaaccatcagaagatgacttaaagcaatggcctcataggtaatctcctcatcacttgtttcttcattttttcctcttgacagagattctaaaattctatgcttattcccttgcagtttcgagttccgtcttagggtttcgcttgctgtagatggcgacttaacattgacttctcggattagaaacatcaatggcaagccttttagcttctcatttgcatatcacacctacctctctgtctctgacataaggtattactcttcaataagtcaagcaaaagattattcagtgtttggtgaaatctttataacccaacaatgtttacttttcttctctacagtgaagtgagaattgaagggttggagacattggactacttagacaacctcagccaaagacagcttttgactgaacaaggcgatgcaataacctttgaatccgaggtaaaccttaacaagattctgcagttatcgatagtgaacaagtatctttgctcggttacttcatatcagaagtttcttttgattcatgtttcagatggaccggacataccttagatcaccaaaggtggttgcagttcttgatcatgaacggaaaagaacatatgttatcggaaaggaaggacttccagacaccggtaataatcgcacaacaactcgtttcgattacttgtttgttgtatatgatatgattcattaatcgtgatggatggtacagtggtgtggaatccatgggagaagaaatcgaaaacaatggcggattttggtgatgaagagtacaaaagcatgctttgtgtggatggtgcagcagtggagagaccgatcactttgaagccaggagaagaatggaccggccggctaatattgaccgctgttaaatccagtttctgcttcgatcaactcgaactacagagcaagggattctgactctagtttctgtatgcaacattggaagagcagagccaccgtttcttttatctctttctttttgttgattcttgttttatcacattagagcttatgacctggtgatttctcagaccagtcttgtgatgtagtgacagaaaaagcctctggtcttttttttcctcggcttaatgtaagaatgtgaggacaagttgtgttcaatcgattcagtttgatctttttaccaaattgattcatttttcccaaaaagagtttgcactactagctttttatcctcaacttccacaaacaacagcaaaatctaattaacaaaaatcttggagctttacgtttttttctctaactctaaagtttatgcagctcggcgatactctagctgtttggtgttttcttgaagtaccttcacaaagacagaagagccaaagacttagaaaacaaagaacgcttttcaatggtggaaagggaaaacttagaaagattcagaagtccattgttacctcgcgtattctctctgcaattgccttgcaaccttcagaagccaatgcaaacactgtctcaaatgtttccatcggtaacttggcatccatctacacattaaacccaaacgtaagcgtctagaatcatctgaatgcgaatgtatagaaatctgatatgaagagttgaagaaaaacctgaaggagtgacactttgtctaatttaggtagaataccgacggttacatcagctcctccagcactgtcttcaacatagttcagatcaagaagaggagtactgtttaaatatccagcactacaggaaacagcgagatcacgcattggaattc

SEQ ID NO: 1096 - DNA, 104868 bp, Arabidopsis thaliana
gaattcatctttatgataaaatggatatataattatataaatctttctttaaaataggagatagagagagagagtgagaaaacagtactaaaaataacaacttgagagagaaacagtaagaaaagagagcaacaaaatgtggaacagaagaagtatgaggtcattagttgacttttaagtttactccactttcctacaacaacaacaaaaaacagcaaaattagtccacttccacaatcatttctctttttgatttacttctaacgatttttgttaaaacccacgattatgttacaatacctaattcatatgttggtaatttggtgtacatctgattagtttattaaaacgtgtttgaattaagtctttagtaatcgtggtgtgtggtgaaaatgaagagactgtctatatcgacatatgtgttgaatgggtaagtgccatggtcaaagcttataactagttttcattgtcttttgatacgtttctccaaaatcttttctatttttcagctgtattctgatatgaagtctggatgaaggattttaaaatggtttagaattcagaaaagaaatttactagttattttttaaaaatgaatgtgtgcatgtgtgagtgtgtttgctccatagtgtaaagaatgagaagtgagaagtgacttaatgtgcacaaaggtgcctttggcagaaagatcaaggcctggtccataacacccccaagtgacaaattagtatttgccactatgttctatatacatttttatcctttctttgtttattgtttttctgtgtctttacacggaccaccaaatgggccaaattgattagtgcatattgatcttgctagatcttcccacaatcttcacatcgtaatcatgttcttttaagaagaaaaagtgttgttttcacactcttaactcatatatagatacacgaaacacgatttgactacagcttctactctctaggttagttaaagtttttttattattttaaaagttattagttagatgcttttcataaacgatgcaagaaggtacccaaaaagaagttgcaaaaacaaatcttattagagtttgttttcattattatcgttgcgttttatttgtttacgagtgaagaaaagagaaacaaaaatatagttgctgaaattttagtatttataaaattcgcagcaatggatattagaacgtatccataatctgactatagataattctatatcgtgccaagaggaaccaaaataaattgtacatgtcgtttgattcattcctttaatttattgtgtaaagaaggatccaatcctaacaaagtcttcaaaaccttcacattttttcgaaatttaacgacaactatagggtttctagctagatttgaaagttttttcacagttacacctttacctatctgcagtaatacttccacaaaactaacgttaaacttctgccggtacaaatacatgtgcttatgtaagaatgaaaacattttgaatttaatattttgcactggacacgtttttcttttgccattatggattttcacatagtgacggatacgtgtagatccgccgatccctatgacaacatagcattttggaatttgtttacgttcaactcctttaaataaatagttaaggcagtgcgtcactatactgcttattactacatagtctaatttggtatatgctttgattatggatttatgataatcaaaagttatatggtataaccaattgtcgttagctcaattggtaaagaccttaggcgaagcttagaggtcgccggttcgtgtgatgtttgggacgaaactaatattacatgctgtggtttcgggcctgaggggattacgggcttcggcccaaaacttcttggatttcaaaaaataaaaataaaaaagttatatggtatattcttttggatatttcattctctttttaatttcgtttcgccttaaccgcattctctaattaaaaatttaggtacatgattcacacttttacagtttagcaatgtatacagtttcgaaacaaattcagtttccaatgcccatgaaaacgcgtataataccataaaagtttatgttctcaaactagattgagattagtggccaattgatcatgcatgttccatttaactgaagatatacgtaaacatgatcaatcgtccatgagaacaatttcagtcttgctacactaaaatgcaacggatcgtaaaagtgatttatattttcatagaaccaccacataaataattaacaattgaattcagatcttaaaaaacatagacaacagaaccaattttgttctaaaaaaaggcactaaggagcaatgtgatcatatagtttaatgagccagcaactaatcgcacacttgtaatataatggaatatataaatatgggagtagctagctatataaaccataaagggtaagggcatatgatcgaaagaagaaagaaagtaatgcatatggagctgagatcagtatatagctttacacgttaaatgtagttagtgcacatgacgaaaaactaaaaataatacacttgagataatttgcgttgatttttaattttgaatttgtagagtgagtgtattaggtaaaggacaggccactgagaaactgcgagaagtctaggctaaggaaagtagagagacagacctttcagtgtttcaaaagcaaagtataattactaaaggtaaattataatttttaaaaatgatcatttatttattcaaatatcaaataattagaagacaatctttctaaaataaatataaacaaaaaatgacaaaaaggttacctcatgtggtatgtcattttcagctaacccctctggttgccagagtaaataccaaattaagtaactttttaatttactaatgtataattgttatctttcgccctcctaaatttataacaatatataatatactgctaaaaaatatataaaacttcttatattagtaatccgatatgttggttaaataaaataaaactgaaataatcatatttagtctaggtacaatattaataacgccgggtttaaaaaatcatttaattggttggtttatgagtaagacagcattattattggtgttatgatatttcattgttttttgtgtttgcaagttctaatttttgttttttctttcttttgcaaataattaaattattgtatatttaatactcacatagtaaaaattaaggaaataacacgcgctaacacgcgcctcaactttaatcattttatttattcaaaccccatttcggaaataaaaatgacaaaaaaaagaagaagaggaagaaaaacagcaaaaacgtctactcttctctcatcctcgcgcttgctctctcttctcttttttgtctttccctttcgtctctctatctgtctgtatcattcattcgtgtttatttacaatcgaaccacgaaacgtctcttcttctctataaaaaccagatttttctcaatctcaatctctctcgctctcgctctcgttttctttgatgaacccttttacttcattcttactcttgataaatccaaattcccgagaaacccatttcatttccttcttctgtttctagaaagacctcttcttttcgataaaccgagatccacgaaacccgcatttcctctcgctaatctattctaaatttcgatactttttttttttttttatcggtttgaatctcgagaattccgaagattcagagtctccatagtcgaaggtgtgtagcgaatcgagatgggtttctgtttgatttcactgtcgctttctctgctttcatttctgagtggttcattgatctcttccgtgttcgtaatctatgattgatgatgtatgttgttatcagatgtttgattgatgtctgcctatagtctaatttcattattaagaacgttttttttttgtatacctaacatctaaattttgttgtattaattgtcatcagtggaatcttgacgttgaaaggatgacacaagctttctcctttttgtttttcttttgtctgaaaaatgtattgcaatgttagacaaagtcttaatactatctctcttcttcgtcttctgcattttcgatttaccattatgcatgtatgctaaagcaaatctgattgacaaggttttctcttgatttatgtattgttgttttgtgttgttgaaatgaatgatatttgggattcagattcgtaaagctttaaatctttatgtgttcttttcttggtaatggatttatttattttttgtatcgttgtttcagaggctcttgagaatggaagcagaaacgtcttggaccaattatccgtacagctacattacatatgtccctgaagctgaatcataccgtgagcagagcgacgatgaagccaaagtcgaaaccttttcaatggattctcttctccctgacgatttattagaacgaatcctctcgtttctacccattgcaagcatcttcagagctggtactgtctgcaaaagatggaacgagattgtatcttctcggaggttcttatgtaatttctccaacaattcggtttcccaaaggccttggtacttcatgttcactaccacggatgatccatctggttatgcttatgaccccattatccgcaaatggtacagtttcgatctcccttgtatcgaaacatccaattggtttgttgcttcctcttgtggattggtttgcttcatggacaatgattgcagaaacaagatttatgtctcaaatccaattaccaaacaatggaggacgcttattgaacctcctggtcacaaatcgacagattacacggcaatgtctacctccgtaaaccgagcgaaccaagcagtaaaccgcgcaaaccggagttactcagtctcgatagtgaaatcgaagcaagttccagggaatttcttccaatgggatctctctattcatctctacagctctgaaacaatgacttggacaacattagtaaacgatgtcttatccggatggagaggagggaacgagagtgtgatctgcaacaatgttctttacttcatgatatactcaacgggaggctcagatcatcgccacggcttgatcgcttcgaatctatcctcgataggatcaccgtcaagcggaatcttgatgaggagtttcattccaatgccgtgttctttaacctgcgggagattgatgaatctaagagagaggcttgtgattgtcggaggaatcgggaaacatgatcgaccagaggttataaaagggatagggatttgggttttgaaagggaaggaatgggtagagatggcgaaaatgcctcaaagattcttccaaggttttggtgaattcgacgaggttttcgcgagtagtggcacggatgatttggtttacattcaaagctatggatctcccgcgcttctcacgttcgacatgaatctcaagtattggagatggtctcagaaatgtcctgttactaaaaagttccctcttcagctctttactgggttttgcttcgaaccaagactcgagattgctccttagttgcaatgaagaagcaaatgggtctgtgaaagtcttggtcttttggattgtttttgcacagagaaatcgccggcggctttatgaagatgatgatacggtaatgtttttaaattttagttactggaaatgtttttcaggaatattgttatttgcaatttggtactctgttaattataaatttataaaatgaggcccagatacttttatttgaacaaacgaacccttctctatctctcagtgaaatataagaacatttttcaacatgtggcccacaatatctcatgtaaatgggtcggattctgaaactggaggttgtcttgttgctgttcctggtggataaaaataatgattttgttccttttttttccacatatattcataatgatttttcatgttttattaattaattattgttgtaaattattttaaagaattatgtttctgtacttgtataaaattgggacctattttcgtgatgggatttgtcaggtttggcagtgttaggtttacgggtaatggacaacagctattttattgtgtattttatcattttctcaagggtcacttattttcaattttcatagctataataatttactaaattttaaaatataacaaaatgtcattcattagttataatcgtataaaagttgacgaagtgatatatagattctacatactaaaaacaaaattaatttgtgtcattatgccaaaatgtcaaaaggaaaagaaaatttagacaattactctgacacatcaaatcagctaaaacctaactaaatataccaaactagcaacacatatttttgttattaaaagcatttataatgataaatcatgatcagaatcatagtaagcagattcgaacactagtctctcaaatttcggtagtaaagttttcaaccattagaagacaaatacgattttaacatcattagtattgttttttcttttttaatttaagcgttggctttccaaaatgaaatagtaacaagcattaacgagttaagttgtcaatgggggaagttaaaactctttaaaaccaaaaaattgaccacacaacacatatagtgcccactagttctctcaaacgaatatggaatactttaaaacccacctctattctcaagaattaaagcccagaatttcaacgttctaaaaatagttttgaaagatttgtttttcacgggtttttcgtaaaataattatgaacaaaacaaataaattcaaactaatttttacacgtacaaatctgactcctagcctcctagatgaaattcaaaattttgtaccagcagctcaaagctactaggtaaaaaatgtcacgagagaaaaccggaggaatattggtggttcatcaatacgaatcaaaccgaaccaagtcataaaccggttcatagaaagataagaagacagacaatcagtcatcactttggtctcgttgagcctttcgtctatctctcacctgaaagaaagacgttcagctttctctttccaaaatcaaaagctctccgatcagtttctccggcttaggaaattaattgaaggaaggtgatgagaggtactactgagaatacggatctgttcgatcccaaaacccaaatggatcctgacttcactcgtcatggttcttcctccgacggcgattttggattcgcttttaacgacagtaacttctctgatcgtttgcttcggatcgagatcatgggtggaccttcggattctcggtctgaagttgaagggtgtacgagtatcgctgattgggctcgtcatcgcaagagaagaagagaagatatcaagaaggaatctggtggtatgtaatttgttcgtatggtttagggtttttgttattgaagtcgaagtccaagtctttttgggttttaatgttgtgatttcattttgcagtcacgatttcagacattgtggcatgtcctgaggagcagattttaactgatgaacaacctgacatggatggatgtcctggtggtgagaatcctgatgatgaaggaggagaggcaatggttgaagaagctttatcaggtactactatagagcaacatcctttggcgaagttttagctgtacacaaaggagcttgttttgttctgagaagtgttttatttatttaatgtttaggtgatgaagaggaaacgtctagtgagccaaactggggaatggattgttctacagttgttagggttaaagaacttcatattagttctcctattttagctgccaaaagccctttcttttacaaggtatctaaataggttgttgatggattttgcttttgctctcatgtgtaccttactctttaatccatttgtgttctttttttctcggaaatgttgatagttgttctccaatggaatgagggaatctgagcaaaggcatgtcacccttaggattaatgcatcaggtacgccattgcaacattagctatctgaacgtgttattgatttatcacactagatacagttgtaccgttctctattaggtccacagaatcaaaatatggttttgatttgagtttgttaaggtaacttggagattcttagattgatttacatattatactctactttgtgtgtattacagaggaagctgctttgatggagcttttaaactttatgtatagcaatgcggtatctgtcaccacagcacctgccttattagatgtgttgatggctgctgataagtttgaagttgcctcttgtatgaggtactgcagtagacttctccgtaatatgcctatgactccagagtctgccctgctctatctcgagcttccctctagtgttctaatggccaaagctgttcagcctttaactgatgctgcaaaacagttccttgcagcccgctacaaggatattaccaagtaaagcccctgaaactacatatccatgatattactgtaatcaagagcacatgagatggtggggcgattcttataaggcatgtctaaactttcttttccaggtttcatgaggaggtaatgtctctacctttggctggaattgaggcaattctatcaagcgatgaactccaaattgcatcagaggatgcagtttatgattttatcttgaagtgggcaagggcgcaatacccttgtttggaagagcgaagagagattctcgggtcacgccttgcactctccatccgcttcccattcatgacatgccgaaagctgaagaaagtgctgacttgcagtgactttgagcatgaaatagcatcaaagcttgttctagaagctcttttcttcaaagcagaagccccacacagacaacgtagcctagcctccgaagaatctgcatccctgaaccgccgcctgatagagagggcttacaaatacagacccgtcaaagtggtcgagtttgagcttcctagaccgcagtgtgtagtctacctagacttgaaaagagaagaatgtgggggactgttcccgtcgggtagagtgtattcgcaggcctttcacttgggaggtcaagggtttttcctgtcagctcactgcaacatggaccaacagagctcgttccactgtttcgggctgttcctagggatgcaggagaaagggtcggtgagtttcggagtggactatgaattctcggcaaggtcaaagcccgcagaggatttcataagcaaatacaaagggaactacacattcacaggagggaaagcagtaggttacagaaacctgtttggggtcccatggacgtcttttatagcggaagatagtcaatacttcatcaatggcattctccatctcagagcagagcttaccatcaaaaggtctacagatccttagtgaccgtttacttctcaattgtcactgtctctctttcctttacctgctgctaaatctctcgctctctctaacttgccttttttttcttttcttttataaggcttgaagaagactaataaagcttataaaagtaaggttaaaaacgtttcgacgacaacgttataagaagaatgtaaatgcgttctttttttctatctacccttactcttttggctttggattataagtttaactcttcaatgaaattcttagcgtagagattcttgtattatgaacgaagttgtgaacagaaaagaacgaacgtaactctctcgtctcatttaactaatttatctagttggattgaaatagacatgacttttcgatttgggccatgcgtatgttgttggagttggactattttaaattcctgcaatcaatttcaaaaaaattcaaatcatattgaccgttgattatataccgtacacgtggtacaatgtcacagatatcttattataatactatacagttcacagtcctttgttttctttattagacaatcatgagacaaagtactgtaataaacaattaatcatacatggaattgtgaagtaacttttttgttactcttttaccagaaatgatcaaattttacaaatgattattttttgttctaaaatttattttaatgtcttagattaaggaaagtaaactagttttgtaataaataaagaaaaataattaagctcttaaatatgtataaatgattatgcatttaagtattaagaaagtgcaatagttttttttattttattttataatcagagaatcctcgtgcaccaagaatctagttccactaattaaggtgttattcttctcctctaacaccaaattatgtttgtatctcttatttaaattcattaatgacaggtttgacattaataaataatattttaaaatataaaatacattagtaattaaaattaaaaaataaatgagaataaagagtttcatctgtatcccgacggaagttgagttctgtttccgcccatttctatctgaaagcaatgcacgtagcctctctcgtccatctccttaaattcaacaagtatttaatctcttcctttaaatataaactctcaagttcatcaaactgtttccataagaactagtttttcttttcttcagatccaattttataaagcaaacctgagatttttattaatataatatatatattgaaaaacttccaaaaatgagagttatctgggtttaatttaatttactaaacatcaagatagctgttttgctctttctatcgccatgtgttcttcttcttctccttccttgtctcttttttttaatgtttttttgtttccttgagtgaagagtgtagaagctatagatttccagatctagtaacatcgtcttcatgagatttttgtgacaaagaaaagctcttttgtcgttttttcttctcttttggctgtggaaaaaaatcagaaaacttgtcagtgtgtaagttgttgaggttttcaaaattgaaaatgggtcaatatgcaacagtgtgggatcaaaaagaagcaagtgagataatcaaagattggaatggcgttgaccaagtccttctcagaaacccacatggtgcttctgccaaggtcttcactttttctccaaccattcttgtctgataaaaattcgagcttcttttgcttattctgtgtttgattttccagataagtttacatggaggacaagtgatttcatggaggaatgaactaggcgaagagcttcttttcactagcaataaggtatctgatctcactacaaaaccctgatacattgtgaagaatctgaaacataaaaagtaaaaatctgatttttatattgttatgaatttgttaggctatattcaaacccccaaaatcaatgcgtggagggattcagatttgttatccgcaggtaaaatttactagtagcgctcactgaactgagatcttttgttgatcactttttcattgaagttttgtgtgtgtgtttgtgaagtttggggattgtggatcactggatcaacatgggtttgcaaggaacaaaatttgggtaatcgatgagaacccacctccacttaactcaaacgaatccttaggaaaatcctttgttgatcttcttttgaaaccatcagaagatgacttaaagcaatggcctcataggtaatctcctcatcacttgtttcttcattttttcctcttgacagagattctaaaattctatgcttattcccttgcagtttcgagttccgtcttagggtttcgcttgctgtagatggcgacttaacattgacttctcggattagaaacatcaatggcaagccttttagcttctcatttgcatatcacacctacctctctgtctctgacataaggtattactcttcaataagtcaagcaaaagattattcagtgtttggtgaaatctttataacccaacaatgtttacttttcttctctacagtgaagtgagaattgaagggttggagacattggactacttagacaacctcagccaaagacagcttttgactgaacaaggcgatgcaataacctttgaatccgaggtaaaccttaacaagattctgcagttatcgatagtgaacaagtatctttgctcggttacttcatatcagaagtttcttttgattcatgtttcagatggaccggacataccttagatcaccaaaggtggttgcagttcttgatcatgaacggaaaagaacatatgttatcggaaaggaaggacttccagacaccggtaataatcgcacaacaactcgtttcgattacttgtttgttgtatatgatatgattcattaatcgtgatggatggtacagtggtgtggaatccatgggagaagaaatcgaaaacaatggcggattttggtgatgaagagtacaaaagcatgctttgtgtggatggtgcagcagtggagagaccgatcactttgaagccaggagaagaatggaccggccggctaatattgaccgctgttaaatccagtttctgcttcgatcaactcgaactacagagcaagggattctgactctagtttctgtatgcaacattggaagagcagagccaccgtttcttttatctctttctttttgttgattcttgttttatcacattagagcttatgacctggtgatttctcagaccagtcttgtgatgtagtgacagaaaaagcctctggtcttttttttcctcggcttaatgtaagaatgtgaggacaagttgtgttcaatcgattcagtttgatctttttaccaaattgattcatttttcccaaaaagagtttgcactactagctttttatcctcaacttccacaaacaacagcaaaatctaattaacaaaaatcttggagctttacgtttttttctctaactctaaagtttatgcagctcggcgatactctagctgtttggtgttttcttgaagtaccttcacaaagacagaagagccaaagacttagaaaacaaagaacgcttttcaatggtggaaagggaaaacttagaaagattcagaagtccattgttacctcgcgtattctctctgcaattgccttgcaaccttcagaagccaatgcaaacactgtctcaaatgtttccatcggtaacttggcatccatctacacattaaacccaaacgtaagcgtctagaatcatctgaatgcgaatgtatagaaatctgatatgaagagttgaagaaaaacctgaaggagtgacactttgtctaatttaggtagaataccgacggttacatcagctcctccagcactgtcttcaacatagttcagatcaagaagaggagtactgtttaaatatccagcactacaggaaacagcgagatcacgcattggaattccagcatctgctagagctagagtcgcggcattgatacaagctgatcttgttcctgattacagaacataacactaatggctgatcagagattgaaagagatcaaaaggtcaacttcagaacagaggtttagtttaattttacctccatcagcttgtagaacctgaaggaaaatatcgatctgcataaaggaaacaattcatcaggaagcaagcaaaaggaggaggaagaaagaaaatttagatttcaatatcgccggagagtaaaaagtaaacctgagagtgaggcatcaattcggttaatatgcaagcttccattgtctgacggatgacaagagatagctctgttgatcgcctgaccatcataatacacaacaattcaaactttatgattttcgtaagaaaaagcaaagagtctctcagctatatagtaaaatgtaacctgtcgaatttctgtcttctacgatcaccagtactaaactgagccatactatactcacacaacacctaccaaaacatacaattagcaataagcattccatattcaccaagaacaatactaaacaagatcaaagcatatacataccactgcatggtcgttcttcttttgctggctcttgttttgaatctgaaggagcacattaacagaaataaccaattcgctgaattatacaattaaagtatcaatcttgataggtgagtaacagagtaatcaagtacctctcttggaccataaacagctgcaattactttggtattacccatctcgaagacagcagaactggaaacaaagttggaatttttgttcatataaaagtgccgaatatagaactgagatacggaaaaagataagagacagattttgagttttacccgtcagccttagaaacaactccaacttcagctacgatttgcctcatctgagattcattacaagcaatcacgaatagaccgattaacttgtgaaggcagtggcttacaaagacagtgaatagagatgcaaacatacctcgttgaatcggcgaccatctaatcgaagaccttcagggtttacgtactccattgttgtgaactctaggtagagataatcaaggatgagagcaatgaaagacagaaacagaacaagtttaatactttctgatcccacagaacagggaacaagagacgaatttacctctgccagtactttagcggcggcgatatgacggagggcgatggacggcgtcgagagaactgaaagagtgtcgacaacataaagattagggctttttggttcctttttgtgaattaagtgagattttaagggtaaaaccgtcaaatcacaggaggatttttttttataacttctagtttatgaagccaggcaaattggtaattcgcttgcaaagaaaagtaaagctcaaaattgcgggaacatgcatgcaataagagaattaagagtgagatcccttcaaaagtatagctcaaattgttgttgttttcttttatcaaggcttttcttgttgactctgttatttcaagtatgtattagtaatagtaatatagtatctagatcaatttctaagtcaatagtatattgatagtagtatcaacgtgtcgggagttacgtgtggcaatgccgacaaatgaatgcaaagtgaggtatatgaaaatgacgggttcctgacggaggagatgatggaattatttactaaggtttgctaacatcttctttttttatgtatgtatgtttggatcaaaaagtatacaaaaccatattagacaatttaagagagaccactctctagtctctacctagtaaaagtagtacctactacgactatcctaacgaatgtcatgcaatttaatgttccatatacaatttttttttttttaatatattaaaaacaacccaatagggcatgggctaagacccaatacacagatgaaatccagttacaaaataggttaaacagaaaaagtcaccgacaaacaaagaggttcgaaccttgctgctggtcggaagcagagtggtcggagccttatatctggcggactcaagcatcacagctttgcggccgcagacgacggatcgagaaacgcagctggaagattccggtttccatctgcacctatctccgccgtcgcaccaacccaccacaactctcccagaaagctaaccactccgacttaccggttccgcgatatctgttccatgccaagcaacccgatacactagagtttaacccctctccgacttaatgttccatatacatactactaactattattaaatcaaactgactgttatttttaaggtctaacttttaacacgagtacctgactaatcccacgtaaaaaaaaagtcttgaaatcacatgtatctttttataaaatcacaggtgaattcgtgtaagttatataaggttcaaaataaaacaatatagaattactgtaagttacaagatttggtatattaacttgtagaattatcgatataataaaagcttatttttcaattattattttaggaccaaatctagtcaaagctcaaccattaactatggaaatctaatttctagttacctttttaatagtagctttttctaataaagtttctgataagagacttggtctccaagcaaaagatcataaattttttccgaaattaaaaatatattttaatattaaagacgagattttattactctttcaaacacatcgttagattcattaccattaaacttcacaatttccatattgggtcaatgcgaattgacacatactcgtgaccaatctcacacgcgtggagcccactagccggcgcgtgtagcaaacgtaaaacagaccgcgcgtaaaagagttaaaagttgcttggagaccaagctatagattaggacaattggctctactttcggtacggtaactaccacgtgtcataaatctaacgtctcaatctgagatgcggaaagccgtttctggatcccccattggccgccacgaaaccgcccttaagcatcgtccctctttacattaaatccaaatctaattcccggtttataaactccattaaccggattaaatttcaataggttaagctttgataaacgtatgtcatttcaccaactatattttaagatacgtttagttataaggttgaatgagttttgattgggtcagtgtctcatatcatatgaatagtgttgaacacgcatcaatttctctgtaacagttaaaatctaattaaattaattacatagaaaaaatcacgttactaaacaaaaatctccaaaaatagtgatgagttaatagtatttaagaaggatgttcctgagaaacggcgattcttctttaaccttttgactcttcttctctctctctctgcaaattcaaaacagtgaaaaaaacctctcttcattttttaactccctctctctctctctctctatggagagacgaacgagacgagtgaagttcacagagaatcgtacggtcacaaacgtagcagctacaccatctaacgggtctccgagactggtccgtatcactgttactgatcctttcgctactgactcgtctagcgacgacgacgacaacaacaacgtcacggtggttccaagagtgaaacgatacgtgaaggagattagattctgccaaggtgaatcttcttcctccaccgcggcgaggaaaggtaagcacaaggaggaggaaagcgtagtggttgaagatgacgtgtcgacgtcggtgaagcctaaaaagtacagaggcgtgagacagagaccttggggaaaattcgcggcggagattagagatccgtcgagccgtactcggatttggcttgggacttttgtcacggcggaggaagctgctatagcgtacgatagagccgcgattcatctcaaaggacctaaagcgctcacgaatttcctaactccgccgacgccaacgccggttatcgatctccaaacggtttccgcctgcgattacggtagagattctcggcagagccttcattcaccgacctctgttctaagattcaacgtcaacgaggaaacagagcatgagattgaagcgatcgagctatctccggagagaaagtcgacggttataaaagaagaagaagaatcgtcggcgggtttggtgttcccggatccgtatctgttaccggatttatctctcgccggcgaatgtttttgggataccgaaattgcccctgaccttttgtttctcgatgaagaaaccaaaatccaatcaacgttgttaccaaacacagaggtttcgaaacaaggagaaaacgaaactgaagatttcgagtttggtttgattgatgatttcgagtcttctccatgggatgtggatcatttcttcgaccatcatcatcactctttcgattaaaaatctcttcttttttggggaaatttttgtgtggtgatgatgacgtggatacatcgtgaccgtcggcttaccttttttagtctgaatgacgtggactgttcagatcaactgaagcgcaaacccaaaaaaactagggttttgttttattaatttgtgggtaaatattttagttaagaagaagataagtatgttaatgtttatcaaggtttggacctttcgttgttttggttcctctctctgagattgtctcaacggtaggaagcagtatataaatgtgtttctatgtctataaattatttatgaaaaacaaatcgtatggaattttattatgattatgcgacaagtgaaacaagtctttacttcgaagtaaaaaaacaaaaaaaaaacttattcacaaatagaattgtcagaacagtcttggaaattcaagaaaagtcatgatcttgactaattataaatgaatgattgtatcatattattgatatcatcttttgtgattagagatcaaaaaatatttatatatatagtactttaaaatataaaaaattatattttaaatagtaatcaccatgcaccaacacctctcttcttctttttttttttttttgcatatgcaattgttgttttgttgtgacaaataaaataaaactgtggtgctcctatctaccaattattatgaagcgatgtcatggtttacttatcgctttctacaaaaatgttctcagtcatgtagaattggtgctggttttgttgagtgtattaaatgtaaatccgtatcctttttttatatataacataaatctttaatataaagtatgtgacaaattgtgaaaaatcttatgataaataaaatttttaaatttttaaattttatcatggagttattttttaattaatatatggttgataaaaaaaaaaatctaaatttaattcatactatagactccatattttttatacggtagatatatgggttgcatgtggattacgacaacgacgcagttcgttttttactccaaacataagattaaattcgaatttaaatttgatagtaataaaacaaacatattcaaaaaaaaaaaaaaacatattctaaatgggttaaacaaataatatatatggtcaaaatttaactgattatcctcgtatagatatgagtgggtgtagggtgaagtgaagattcaaggtatcgccgagggacatgttatcgtgtctgctgttgttttcttctacttaagtaacaaagcccattcatgtgaaaaaccaaaccattgaatcctatattaaccctaccaattgtgtctccactcataaaaacatccttcacgttctcatattaactataacagataaccaagtacttctaccttttcatatatgtacatatctatatatatgatacaataaacatttgcatcctgtcaaaattggtcgtagtctacgtatagaaagacaatagagtttggtatacatcagtttcgaaggacaaagtgcgttgtcttctaattaaatggctgttttctgttttgtaccatggtccatccaagaaaatgggacaaatctctagcgatctaagctccatggcctcattcatcgaactttagctcaatacttcaatataaaccattataagtttatgtagagttataaggacaattgaggatacatatacttcaagaatccctttttttttgttgttgtcaaaaatacttcaagaatccctatttagaaaaatcttaactaagaactaacttttgcttctcttaataaaataaaataaaatcggccatcttaattcttaacacccctcttaatagtgctggttatctatagatggggtaaatgacatgattcggcccctccaaaaagaaaaattaaaaaacaaaatggcatgattaaaagaattggattatctatctctatacaggtgagtcttccaatagatttgaaatttcctcacgaccttgtctcgttgatcttattccctgtcttcactctattttcctttctatagttaatacatttcctcccccactaatttgcaaatagaatttggaataaaatatctcctccctatagaaaaaaaaaactaaaatattatcctcacgctataaataatcaacaaaaaagactaaagagagtaacacaaacagtttggtcttttgaaggtcaatattttgaccaattcgacaattttcgatcctttgcagcatttgatattccccataggtttggcttctcgagtgagaaactactcattcagaagcttcctggtcacgttcatgttgttttttaaaaccttaatattttaaaaatacatatggtgtgaagaaaaaataataaagatgtgtgtgttcttatgttagaagttagagacagttaccctgagtacaagtaagtactgagcgcgggaagaagagagaaatcagatcagtaaaatataagggatgtagttagtatccatagtgaattcaatatcgaatgtcctacgcacctattttggggcaaaaggataacaagaactgcgaatccatttatttgtttttgtggttatagtggatggacatgattaaatcttcttaccagtagagttgtggaatccgaaagaatacgcacaaaaacaaaacatagagattgatcacatactcagaaccacttgcaacacacatgtaaaacatcggagcatttaatgcctgcagcttggaccgaccatattatgcaaaacaaaggggaacaagattcaagaaattaatacgaataataatcaaatattcaattcaattattattatgagcggtgacccaattatgtttctgcatttcaattcaaactgggtggataatatactcgttcgagactgttttttaagtttctaagagttttcaataggatgtataacaatttagataaagcaacatgtctaatataaaaatgaaaggacaaacttagcttaattaaaaaaataaaataaaactcagctttaatatgtttaactaatttaatatgactaaaatgattatgatctgatacagatacaggtttattgcaatcttgatattttttcagttgaaatttcgagtaactggattcaaactgaattagaagtacattaaatattatagatgagtaataagagcgggtctaataagcccaaatatcgtgcacaacgaactggtcaaagattgggccacaaaagattgagaggtgaggcaagttgccactggccacaaatctaatctactacgggccccaactagatctcctcaagacaccccctttacagatttcataccgtttattatactcttgttttttctttttttgtaggtcaagaagaagaataaaataagaaaatgaatgaagcatgagtcactctcattcatgtttcaaattgggtcattaataagagatttcattcttgttgaaatagaaaatccttattctcaaatacaccaaattaaatgtagttataacaactttgcggtaaaaatcttcagagtaatttacaatatttgttatcagaacctcacttggtatagtatatacataccatcattgacacttctaatgtaaatgggctcctttcaacaacggaaaacttttggcccatataaggcccagatcactgagagcacggtatctaaaatgcgtgtcattcaaagcgtttttgtctatagaaaagcgttacaacatgcgtttactttaaaacgaaaacgacgattagatttgaacggtacgtttatgacacgcatttagcaaccacgcgtatgcgcatgcttggtgagacttttggagcatgtgtgttaataacagtaaagtaagtaacaattttggaatatttttaaagtattggaaacattggcaataaacataattaaaaggggtacgtttacaataaacaaattatataggagacataaatcaataaacaaatctaaaaataacaaaaaagatatctctaatttctgaatattagcgaaagaggtttgtgttcactgaaaataggaaagttgaaacactaaagaactcataaactctctcaaatttagaaatccaaaagattagaagaaggtgtaggaggaagaagatgcatcaagaggatgaatgagatacgtcagcaccaacgccaccaccattagcaaatacgcgattccttgatcaatcgatgttcctgtgttatcaatcatcaaacaatcatagatttaatttcccccaaaattaattgattctgaatgcaatgttaagagaacaatatcagatctggtgagagaatgtggaatcggaaaacattaccgtcgctagtgggggaaggagcaggagctaaggattgagcgccggcgaatggagagatgacggcgaaaacgaaagcgaataaagcgattacggcaacggagttcctcgacgccatctcaagattttacggaggacaaaattgaagaagagtacgagagagagagagacgaaatctgaatgaacaagtccggcgagagagacgacgaacgacacggacaaccaaaaacccctttggatcatatatatggctataacgcgtttttatagtaattgactgtttaccgggtatagccggtaatccactctagaacttttctgtcaattgttcaaaggagttaactgacatgtgtcattttctggctaaatgaccgttcctagttggttcgtttaatttctttctattccctcaacaaatggaattggaatttattgtaattattatcaaatttagctttaaactaaagttatggctaatttaacacgtcctctgaattaaaatttgacagatattacgcgttgagagctctttcgtgtataggagcattaaacaggggtggattttattctttgaaaccttaacatgtgtttcttctaacctttgtacgaatccgtgtccatatgtgcatctcccatttgaaatctcttttcttttgctactattactattactacaacacgctttaattacacaagagatcaactagtttttgttccaaaactcatactaatattttgacaataaaacttcaccttactagatattttctaaacctttctacataattatgcaaaaccaaattgtaattctctctccagcctccacatatatttctttaaattctagtatggtactactactagcataattatctatttgtaaataaataaaatatcatttagtaccaaacatcacaaaagatgtttatagttagggaccagaaaaacattgcagagggaataattgagttacataatagtaagaaagaggccatgtgatgtgatgatgttgagattccccctttttcagttctttacttttaaattaaaaaaatggaataattcgccaagctgttccccttttttttaaaaaaaattattgatacgagaataaaaacaaattgttattataaaaatttatgctttgagtgaaacatatgtaacggctagtaagtaagtgttgttataggtctttagtcagattttggtttttactcgtaagattatgcttagtttcaaaataagaagaaagataaggacttagctaacaaacaaagtaacatacactttcgatatctaaaaagtaaaatctattcatcataaggccaaataaatcgcagttgatgtcggattgtttatcgttttgtcaacatctctttttattatttgcttactaatttacaaatactcgcgtctaaaacgacttcttggaaaatcattagtgtaatttgttacctaatcccattatattataaaatatgaggtccacgaaatttaaattcttatatagtaagtaaattcaattcaacttgcaaaggtttttttttataaatatgattttatattgttggttaagtttgatttgcttccagaacggcgtcgtatgcaaaaagaaactcaaaggagagttgaccgatagaatttactatgatcaacacggcactagtaaaagtttagatcacagcatatatacaaagaaaatagaatccattaaacccaattccttcatcaacacaacatgcttcttgctttctagagttttcgagtcttttaaccacacatggagaacatgatactccgatcacagagacatgagctaaaacacccataaatattacaattctagattccttctcctgaggagtgaggagatgcaactttgtgtgctctcaatcccaggaaacacacattcatctaacagactaaaaaactcatccacatcataccactattccaaggttttacgtgccaacacttactactgctcctaccaaaacccatttttaagtaatcctatgatcacctgaaatatctcagttaaaagtgaaacttcatgcgacttactctggtttttgtttttatataataatcagaacgccaacttcggatcaacaactcctgaagcattgccttcaccagtcataagctgttcagggtcctgagacagacacagatacagttatcatttcgagttcatccataagtaagattattgatgggaaaagcttatatacctccattccccatttgatgtaatctggagactcacaggccttgtattcatctaccaaactctcaattatgtcccttgattcgtcaaactctgaaagatcattgtcctgttcatatcaacatgtaactgtcaaagctgggtttgttgcactaaacatcagccaaacaaagccattatacttgagcagtcaacttacagcaaacatgggaaacttccggtaattgtctagaaaagcttgcttcttcctcaacttatcatattggctcaaacatttgctgaataggtgcctgatactagtgtggcttgctaacataagaccactgacctgaaatatcaaatacaccataaaataagagtctttgttgaatcttctaaagcaggaactagcagcctaagacattaactgtaaggagcggcaactctcagtatgacagatagatatagagtgatataagattaccctatgggcagtttgaacatatggggacttcttggaaagagcaacctgttgagagtaagatatggaaaaaattatgattcaagtccatggtgaagccaaaagcaataactaatttgcagacacaattaggttagaacctgtatgcttgcaggtccccactcaatgaaattaacaagctttctttctcgtatcctctgcaaactctcatgcacctagtatcaagtagcgaaataacagagcagattacatcagcaagaaagaataaccaattcatcctcaatgtgtccgatcaaaaaacagctaggtaaaagtacctgagtgggatcgacttctccttgaattatattcaatattgatatatactttgcctgactagcttctttgtttctagcataagacgaaaccatgatattttttgtctgcaaatacaatcatgttagaagcacaaccgattcaagtttcggaaaaagattggagaaggcaaacagctcacctgtagaagtcttctcataacatccagcacagtagttttacgaatgacatttgcctgccaagaacaagtcagttaatagagcaggaaatcaatcaaaaaaaccatttgcacactgtagaatttatgttcaagatacaatgatcgcttcccataaaattattttgtgatattaaactcgttgagatatcttacctggcgctcaacagtcaatggtgtatatccagtcatgaggaagtgacaccttggtgttgggatcaaagatgcaagcaagccaacgaggtcgttattcatgtatcctggataacgcagtgttgttgtgctagcagacatcacagtagacactagagaattcgtttgagcaaaggtaggatttgtcagatgtagacgctccacagcaatccttcccaaagcagtgttgtcaaggacaacaacacaatcagcatttaatgtaagccgcttaagcgtcaaaagtgagttgtagggctggacaacaacgtcactcgtttccatctgattgggaaagacactgtatgtctgaaccaacttcttgctgtagcgatcattcaaagtctccaacaaataagatcccataccttcatgtgaaagaaagagagagagagatggagggagtcattcacatcagaagaagcagtgaaaaaacatgagaatgctaaaagaagaaagcctcatcatttacctgagccagtgcctccagcaatagagtggcaaagaacaaaaccctcaagactgtcacttccatcagcttctcgatcaatcatgtccatgatttcctcttcaacacccttcccctggtgataaccactggcccagttattaccagcaccaccaccatggtcagcaacgaagatattctcgtgattatagagattgcggtaatcaccattctgaataccattgatgactctaggctccaaatcaatgaggagagctcgtgggatatagtgttggtcatccgcttggtaaaaaaacacatcttttctatcacctcccttcacaaacaagatcaaaacatcaaaaatccactaatccactaatcccaaatgggtattcaattgtcgattaatagaaacccagaaacaacgatttcgaatcaataagacctaagaaattcaagtagacaattaattataaagagaggcttggttggttcagaagaagaaggacctgagtagcgaagtcctcgagaataccatctttactgataccgtgctcgaggcaaagctgtttccagaactccataccgatctgattcccacattgtccaacctgaagcgtaattatctcccgaggcatttctaaacccagaaagttgttattgggtacaaaactagggtttcgagactgtgaggaagatgatgaatgatgaagaaatgaaaatgattaaattaagctctggcgcggatacctttttaaaactcgatccaatgctttaaagaatttttgcggacggagaagataaatttttgcatagattaacactaaaccatatgctctaattaaagccacactctctcagctaagctaactaacgtctgcttactcatattgggccaattataggcccgttttgtatttcttcagcccaataaatcttaaaaaggaagaattttgcatgtaaaggatggaataataacttttaactttaagattaatttttagagttttttgattatcaaatgggaaaaatgtcatttaaatcattagtttaccattttcgttagtttaaaatatgaattttgggtatggtgatttaaatccttaattttatgttgtttttcaatttaatcatgaattctcgttgagtaagctaattgagatacaaattcttctttttcgatgctatctgtcgacttagagacgaaaaattactttaaattaaaaaaagaagcaagaatccgaagaaaaagaaaaaaaaattggaaatctattttcaagatctaagattttttattggaagaatttctaacgacatgtcttaaccaacttagtcaacgaaaatttatgattaaattgaaattcaacataaaattaaaaatttaaattacatatttccctttatggtaaaatgataaattggaagagttcattctttaaaccaactaaaatggtaaaatgataatcacatatttccctttatcaaattcgtagtgtatctatattctccaatttccggattcattaacgagtaattaacaacaaaaaaaaaaacctccattaaaggtaaataatcgtcaaataaacataaacaaatctcgccagcttgactgttataagtccattcgaccaaaaacaaagactagaggaagaaaacaaaaaccttaaaacactttcaatagaagacacgcactcactgtcagaaatctacatcgagaaacacacttccactttccaaaaacatcattcatgaaaaagaccacagagaaaacgaagaatatggttgatgatgatgatcgtatactatgggattgtggaagtccactctatgattcctacgagctcgtttctcttactcacatcattgaacgccatttcatgtctctaccttctcttgctggcgccggaaaagtttgctgctctcgaagaccgtctgatctggaagaaaaggccaatcgtggggccaacaccgtcgttgatctgtgttgttcctctgattcgacgactggtaaactgttgtgcggtgcttttggaaccaaatggtggaagagaaagcaaaacaccgaagctgtcgtcgataattacaacaacaagaagaagaatatgttttgtcggatcctctctaagataaggatttctacaacaagatctggttcttcgaagatgtgattttcatatcttctttttctgtttttagtatttgtttgatccttcgtaaaataataattaagtatattacttgctcatgttttttaatttgaaaatttaatcgaataaactgtaatgaaacgggaaatacattttattgacttatggattaaatgcagagtaattagtttaagttgaagaatttcatggatttaatatccatcacatcatacgtctctgaaacgtttaggcaaagagtgaaacgtggatcaacatgcaatcaacgtttacattggggaatatgagatatatagcgatagaatgatataggagtcgtttagcaattgccattttactaacagttcatcggggtgtcagaagaaaaatatgaacttcatagaaaatcctcaagtgaataacaaaggacaaaacatgtgaagcaatttgaaaatttcatgattcttctgacaatattctaacatgcaaattgcaaatgattcttgactcagtcaatgatttaggtcttgggaacttggtaaatttgtgtaatttgttactctttaaaaaagtgttgagtatgcgcagatgggcttcttgaataaaagtctgtaacggcccatctctataactttgaacagaattaaaggctatattgtttccgttagaatttaccttttcttgttgagtatagtttagccgttacaacataaaatgcttcctcaataaagtattaaagcttatgataacaacgagcatcttcgaatttgttcctccatatactttagtttatatcatataagtagactatttttgaaacacttatattaacaacattgaggggtgttatattacactccaattcacatcatcaagagtacaaaaggctgctgaagaaagaaaagagaggaacaaatcacaataattaaaatcacaagaaagtgtaaaatgaatgcgaaatagaccaatagctataattgcataatccattaccaattgttgtctcaaaaagcagttaagtctctcgtttctatggttctccatcaacttcagagatcttttatgggctccacattttcattttaaagttttataaatttaattactttattaccaaaagaagcaattttgttaagatcaaagtaaaaaatcaaatccgtaaaatgatccacctaaattgcttcttcttcctctgtggttaacacttagacttagtagtaagataaagatccaatttcttaaagtgaaagtcataaaaaagagttagaaaaacagtcaaaagaaacacacacgagaaagaaaatgtggtgaagcttcgaatgggttgggtcgtttggtgtggcattgggctccaccaaagtatacacatggaccactttaatttaacgtttcgtcgtctttgaccttttaatttacgaatatttcctctctctctttatatttttgtttgccatttcatttctttactttgttttaattttctctgccattttgatttcgtgtaattgatgaatgctataaatctttattctgtcacatcttttaacaaaggccaaaaccctgcttttctttttacctcagtggtcgctgacatagaagctataaagaaaagctattatgtatatggttgttataaataaagcaaaagcaaaattcccccaacttatttattttcttcataatccactaataagtttcaaaatgcatactgaaaaaagataaaaagtaaaaccaaccatttcgtattttacaacaataaaaaacaaaaaagagtgtgtgaaaatggaaaaagtacacatcagcataaacactactaataacggcgtagaagaagaagcagacggaactgagagtttcgccgttaggaagatacggaccattgtggtggttgcgtcacagctcagagaggaataatgaaaacaaataaccaccaagtaacttacagtaaaaacgctcactgtaaaaaacgccgtcgtttcaataaatgttggtagctgctaaaacgacgtcatttattttctgaaagagagagagagagatgttttatactacttcttactctgtgccgtgtggaaaggagcgaaatttgcagaagaaacaaagcataaccccccagagaaagagagagagtttctcccaacaagatcaaacttcgaactctacgagaactactattatccaaaacgcgaaatagagagacagagatttcataaatttcttactttttaaccccaaagttcttttccagacagcgttttcctctgtcctttgctctttgtgggtttactccttcttccggtttggatatcccgagctagtaaagaagggatccagtagcagaagctgaagctaataaacccaatcatagagaaagctctctgaacaaaaggttcagtttttctctctttcttcaaaactgaaatcttctttgtgtgattcattcactaataagtcgtcattctttcttctccttctgatttctgtgtactttttctctgtcagacattttctgggtttgttttaattaaaaagaaatggccgattcgaccaaagtaaggctagttcgttgcccaaaatgcgagaatctcttatcagagcctgaagattctccctttttccagtgcggtggctgcttcaccgttcttcgtggtaacttctcttaacttttttgagtttcaaccagagatgcccaattttgtaggatttgatgattgtgcttttgatggaatcaatgcagagaatctttttttttagttcttgtttgtgatgttattagcgatctggttttgtttaattcgaattaagtagctttttgtatttcttatgcttaccctaatgagacttgtttaacatacagccaaaaccaaggagcgtgaagcagattctgtttcagtcaagtccgttgaagatacagccaaaccggtttcagctagttccccagagaaagcaatattggattctagtgaaacttcatctgactctgatgttccatctttgagacaccaccataatgttgttcctgttgatgttgagagtgatccttgttcaaaaccttcttctcttgaacaaggtaacagatctatattattaggggataaagatgaccttaaatctcaatcagggagacaacaagattcgggttgggatcggtttaggaaaagaacaaccaagagatgtgattctcaaagtgtcatcaacagattatccacttctaggcatccttgtgatgaaggcacttcttcttcagcaaactactttccagattcactccttgaattccagaaacacttgaaagatcagagcaacgaagcaattgagcaagaccgagctggacttctgagacagttagaaaagatcaaagaacagcttgttcagtcttgcaatgtggcaactgacaagtctaaagaacaggctcctagttcttcgtccgcctcggggttgaacaaggcgcctccaatgcggtttcacagtacaggaaatcacgctgttggaggtccttcttattaccatcaaccacagtttccttacaacaacaacaacatcaatgaagcccctatgcaccacagtctgatgcatccctcttatggagaccctcataggttcccgatacacggaagaggtcctcatccctacttctcgggacaatatgttggtaataataacaacggtcatgatctctttgacgcatacccgcagcaaaacgggcattttcatcactcatcttgctcttgttaccactgttatgataataaatactggcgaggttcagcaccggtggtccctgatgcaccctataatgctggtttttatcctcatgagagcgttatgggttttgctccaccgcataatcctagaacttatggttctcgtggtctacagcctcatggaagatggcctagtaacttcagtgatgctcaaatggatgctctttctcggattcgtcctcctaaagttgtattatcaggcggatctcgtcatatccgccctttggcaggtggtgcaccgtttataacctgtcaaaactgctttgagcttctacaattgccaaagaaaccagaggctggtacaaagaaacaacagaaagtgcggtgtggagcatgttcctgtttgatagatttatctgttgttaataacaaattcgttctctcgacaaacacagcttcaacgagacaaggagaagcccgtgtagctgctgattacacttctgatgactatgatcttcttggttatgtatttcactcgttggatgatgaaccaagagatcttccgggattgatttcagacaagtctcaagatatgcaacacgttcattctcattccgccagcctttccgagggagagctaagctcagacagtctaaccgctaagccactagctgaagctcacgaaaactttgttgattactcttcgatcaatcatgaccggtctggagcaggcagccgtagctctcgttcagaacacgacaaggtcacactgagcaaggcaacagccatgagacagaactccatgaaagaggtttcacttgcaagtgagatggaagttaacttcaacgactactctcatcgtaacagtggagtatctaaagatcagcagcaaagagctaagaagagcggattcgcgagcattgtgaagaaaagcttcaaagatctgacaaaatctattcagaatgatgaagggaacaaaagcaatgtttcgataaatggacatcctttaaccgaacgtctgctgagaaaagcagagaagcaagccggagtcattcagccaggaaactactggtaagtaactttcgatgcctcttctgttatgacatcttcttcatgactgctaatgtgttttggggacattctaggtatgattacagagctggattctggggagtaatgggaggtccaggtcttggaatattaccggtaaacacatttttgatattgcttcttgtcaatatgttcctgaatcttactaaaaaggcggaatcctttttgttgcagccattcatagaagagcttaattacccaatgccagagaactgctcaggtggaacaacgggagtgtttgtgaacggaagagagcttcaccggaaagatttggacttgcttgcgggtagaggacttcctccggacagagatagatcctacattgttgacataacgggtagagtcatagatgaagacaccggtgaagagctcgattgcctcgggaaactagccccaacgtaaacctttttacatcacaacttttgttactttcttcacaagaaatttatgtgtgatccagttggtttgtttgttgatggtgcaggattgagaaattgaagcgtgggtttgggatgagacttccaaagagaactacgtgaaagaagataagaggagagatatgtatttagctgaatatcttttgtttagaaagagagagcttatgtatgtatttagaaattggtattatttgcttccaagtttaatttttagacttcttcaatcaaaatttgctacaacgaacaattgaaatgaatttgtcatacgtctcaatagaaaacaaacaaaaaaattgagatgaaagattcttaaaccaattctcaagaaacaattcatgatggacattatgatgacattggctcctttaaatggaacagaaatagcagtgattgatgatctaacagacgttgacatcaggctagtctttgtgcggagatagaagcggcctggttatgagaatgttggagccatcaattgctttggttatcatgccatttgtcctcaaatcttgattctgcccactacatgatctacaactccatggctttgaagtagcaatagaatctgctatcggatccaaatgatctcattatccaaaccacaacagtgtcttctttgatggttagtataagtcttgcatcttatttagagtgtttgtgtttggttcgattgatctttgtaactgtgtttatgtaatcactcaagtatgctgtctgggtagtcggaagacagagtattatttattccctccttcagctgcaaaaattctctattttaagattaattagcccaatgtgagtaagcacacgttagctagctgagagagtgtggctttaattagcatatggtttagtgttaacatggctaatctatgcaaaattttatcttctccgtccacaagtttggatcgacttttaaacattggatcgacgtttagttaagtgatgggctttctttttagattttgaatgttttccagatataagtccattagtaagaagcccatgaactagaatgaaacggagggttcttgtggcaacaagtggcaagtctctttggcagaacattaataaggaaacaaacaaatgataaaaacgatttcacaaattttgaaaaccggcggaaactaaaaggcggctgccaccacctgggggacgatatgtggaggttactgacgctctttgcttcatgcaaccgaacatttggctcgtcgtgatcgttttacttctcatctttgcaaattactcttttacccgtgttctcctccgtggtcaaatagatattttcatctctcacgcacgcttcccatgtattatgacgtaaatacccttagactctctacgtttgatattattattacacaacacactggcattgtcgtatgggaaaaattcgttacgttatttatttcgacactccagcgcaaatcgattttgttagatttatgaggtttgactaaaattgtgaagaggcctagcaaacttgtggatacaagaacgacaaatttattttttcataacgacatttaccaaaaaagaaatcgataattaagcaaaagaagggcctaactactctccaaccaccaccactacgcgcggttttgccgatctttgagtctgtgaccacaacgagggcatttacgtccttacttagcttctctttctctccatccacgtgacttgattctctctctctctcttctttcatttcacgtatatattaatctggctccatctacatctgtgaaagagagagagagattcatgaatctttttacagaaacacgaacaagtttcagaatctggtctgactctttgtaaccttctcgtttaagattcattgtacgtattcaaatctacatttctttgccattgttggaatctccgcctcgatcgtttcttatcaaaggatctggtattcgatttttgctatcgtttcaaagcatggtctaatgatgatcctgatctccgactgatccaataacggttaagcaacgctgtttttgatcctccattgttgtttgccatcgatcaacactcagaaataaggtaattaacgcatctcgagactcattgttttaacaatctttgttttgtttcttccaaattattctcgtgaatatccgtaatctctccgtcttttaatgaacaacacatatcatatgcttttgtttgttttgttttgttttttcaacatttcaataattttgtctttttttcttcgatttaatttgtttatttcctgctataataaacgaaaactataattccatgtaatgttcgttgttgttcatagtgatttatcataacgagcaacaacataaaaatcaagagaataagaaattagagttatgctgcttatttgaattagacaaaacctacttttacttgttaaggaaatgaaaagatgttaataaagatgagcacatcgtacgtggcgcacgtggaagcacttctgtacgacggacccagtccaactcgaaccccacacacatagcaaaggttgttaagttggctcgtaggtgaatttaatacctgttatttcctttatagctggctaattacctaaattcgatccataataacacattcctactatgccaacatttaaccctagtcaaactaattaaaacgtttcttactttttggcctattaaaacgtttcattatgttccgcaaatagtatgaaatatataaagattttctaacaaaaaattactaagaacagttagactgattgagattgtttttatttccttttatttaattttcttttattatactctgtttatttgtgtttaataattaggattctatttgtcttgtcttgtttgctatagttggagttttgttcataaagaatggcgtttaatacggctatggcgtctacatctccagcggcggcaaatgacgttttaagagaacatattggcctccgtagatcgttgtccggtcaagatctcgtcttaaaaggcggtggtatacggagatcgagttccgacaatcacttgtgttgtcgctccggtaataataataatcgcattcttgctgtgtctgttcgtccggggatgaaaacgagtcgatctgtgggagtgttctcgtttcagatatcgagttctataatcccaagtccgataaaaacgttgctatttgaaacggacacgtctcaagacgagcaagagagcgatgagattgagattgagacagagccaaatctagatggagccaagaaggcaaattgggtcgagaggctgcttgagataaggagacagtggaagagagagcaaaaaacagagagtggaaacagtgacgttgcagaggaaagtgttgacgttacgtgtggttgtgaagaagaagaaggttgcattgcgaattacggatctgtaaatggtgattggggacgagaatcgttctctagattgcttgtgaaggtttcttggtctgaggctaaaaagctttctcagttagcttatttgtgtaacttggcttacacgatacctgagatcaagggtgaggatttgagaagaaactatgggttaaagtttgtgacatcttcattggaaaagaaagctaaagcagcgatacttagagagaaactagagcaagatccaacacatgtccctgttattacatccccggatttagaatccgagaagcagtctcaacgatcagcttcatcttctgcttctgcttacaagattgctgcttcagctgcgtcttacattcactcttgcaaagagtatgatctttcagaaccaatttataaatcagctgctgctgctcaggctgcagcgtctaccatgaccgcggtggttgctgcgggtgaggaggagaagctagaagcggcaagggagttacagtcgctacaatcatctccttgtgagtggtttgtttgtgatgatccaaacacatacactaggtgctttgtgattcaggtaatatgtgttcaaagttactactttcaagcaaatcctctgtttcctcacatcatgatccttgaatctgctagctaattagtgttatgtcgttgcagggatctgattctttagcttcttggaaagcaaaccttttcttcgagccaactaagtttgaggtaaagatcttgatcttggctagggatgtacatttggtttttgattcggttatttaactcggtttatccaatcgcttaggttacattacaattattttggtttgtgtttatcctagagaccttaagatattgatatgaatgtcgcaggacacagatgtattagtccacagaggaatctacgaggcagcaaaaggaatatacgaacagttcttaccagaaataacagagcatttgtctagacatggagatagagctaagtttcagttcacgggtcattctcttggaggcagtctctcattaatagtgaatttgatgcttatctctagaggactcgttagctctgaagctatgaaatccgttgtcacgttcggttcaccgtttgtgttttgtggtggtgagaagattctagcggagcttggtcttgacgagagtcatgttcactgtgtgatgatgcatagagatatcgtcccacgagccttttcgtgtaattatcctgaccatgttgctctcgttctcaagcgtttgaatggctccttccgtacacatccttgtctcaacaaaaatgtaagtcttactataatttcctttttggcttaacgttttgaacatcttaaattaaaaatacggatgttgaagttttttggttgtgtttttgcgttttgacagaaactgttgtattcaccgatggggaaagtatatattctacagccgagtgagagcgtctcgccgacgcacccatggcttccaccgggaaacgctctgtacattttagaaaatagcaacgaaggttactctcctacggcgttacgagcatttttaaaccgccctcacccgctcgaaacgctgagtcaacgcgcagcttatggctcggaaggttcagtcttgagggaccacgactccaagaactacgttaaggccgtgaacggagttctcaggcagcacacgaagctcatagttaggaaagccaggatacaaaggaggagtgtttggcccgtgctgacatcagcaggacgtggattaaacgagagcctgacgacggccgaggagatcatgacacgtgtctaatgaaggaaaatgtacggttgtatataagtggaatcacttctgattatgcgtttatttacatttcttgtgggtgagccgaaacaagcgaataaaatattgtaaagaataaattattctaaacttctaaaatattgtaagcaaattatggttggtggagattggaaaatttggttttctccaactccatggatcactcactcccattcgatgcacaccgttttacaaaaatgggcatatattagcaagaaataattaggcccaataataggcttatgcaatttgaaatcttcttttcgatagtaaggcccactaattaaaccaggcgtatttattaaaaaagaaagaaaagaaccatcctttaattttgttttttttaaaaaaagggttttctttttagttttatcaatgtctcatatatattcattaatccataaatacaacattcgtataggagatttggtttgaagaggcgattctcatatatatacgtacacatcaaaattaaatcaacgaatgacttcaatgtcgtttatggaatggtttcattttgggccatgagaaattagtaaggcacgtggaaaatttgcgtactcaaaatagaaaacacgtacattttatcattttaattggttttattattgataaaaacagaatatatcattattgcgttgtttgtgtgtgtgactttacaattattttgtaaggcatagttttaattaaatgtcaataagctatttaaattatgatacaatgacgaaaacgcccatggagaagctgagattcaccgggattgcctatcctcgtcaccaaacactcccactttttcctcttcctcccagaaagaaagaacgaaagaaaaagaataatatcatcaacaacagaagaagaagatattaaaaaaaaaaaaaaaaacctaatcaaaatatatagatgttcatttttggtcatgtcttcttcatcatcttcttccgcacgatttcagtccgccagtggtaaccttgatcaatctcgcatttgcctctcgattcgtcgatactgctagattttctctcgatttatcctctagggttcttattgatttccgccacccactctctgtttttagaatctaactcccgtctccttcgtttcctcctcctagggtttccttcttcttcaattcgatttccccttctccgatttcgatttgattctttacaaatttgtctgtttggggttattggattagccagatagatccaaggttctttaggctcgtagctatttgatttgttttccccatttccggtgactttgaagctacgattcatcagggaggttgcttattagcaaccgttgaagaaaacgtaacggttggtttaaggtctttgtttggattagaggggtaagctttcgtcggtgactgtcacggcagagatttgcatgggtgagcatgaatcatgggcggcttctccgccgtcaccctctggcttacatcccaacggtttattaccaggcaaggctgcatctgtgactaggccactcgatgctgagcgatgggccaaggcggaggatcgaactgccaagctcattgcttgcatccagccaaatccaccttccgaagatcgccgtaatgctgttgccagttacgtcaggaggcttatcatggaatgcttccctcaggttcaggtgggttaactttcttgtttttaaacttttgtttttattccttgagataatgtaacaagtaactattttgtgtcttctagatctttatgtttggatctgtacctctcaagacttatttgcctgatggagatatcgacttaacggcttttagcgctaaccaaaatctgaaggattcttgggctaatttggttcgtgatatgcttgaaaaggaagagaagaatgagaatgctgaattccatgtcaaagaagtccagtatatacaagcagaagtatgcgaattagaatgcttcttttttctcctctttctatgtttgctgtatgaaccattgatatttattccaagtaaggttgagtctcttgacgtactggatcgtctaatgatttttcactggtacaatgtttcaggtgaagataattaagtgtctggtagagaatattgtggtagatatatctttcaaccagattggagggctgtgtacattatgcttccttgaggaggttagcattccaccgaagacaacatgcctcttgctttctcttcctgagttaggcagatcttttgatttcttacctctttactgttcatatatgcaggttgatcactatataaaccagaaccatttattcaagcgtagtattatattgattaaagcctggtgttactacgagagccgtatattgggagctcaccatgggcttatttcgacatatgccctggaaaccttggttctttacatattttatcttttcaacaactcattttcgggacctcttgaggtaatgtcattatgaaactgcctttgttctgtcaagattgcttcttcaatcttcctgactggtcttcttgcatttgtaggttctctatcgttttcttgagttctttagtaagtttgactggcagaatttttgtcttagcctctggggccctgttccagttagttcactaccagatgtaacaggtatttacgaactgatgtccatcatacttttgcattagttgtgcttcttaactgtctctagtactgattgtcttgctatgcaattttttggcagcggagcctccacgaagggatgttggagagttacgagttagtgaagcgttttatagagcttgtagtagagtttatgcagttaatattgctcctcaagagatacagggccagccttttgtgtccaaacatttcaatgttatagaccctttgcgtgaaaacaacaaccttggacgcagtgtcagtaaaggtacttacttgggttgaatgctgtttactattctttataaaccaatacttttattattgaatgttaatctgtttgcattctgccttagttgcttatacagtatgaagctagaagatgcacaaacatgttgacttccttacatgcttggattatgtttttgttgttcaattattgtgtcaggtaacttctttaggatacgaagcgcatttaccctgggtgccaagaagttgaccaggttacttgaatgccctaaggagaatttgatccatgaggttaaccaattttttatgaacacatgggaaagacacggcagtggtcgacgtcctgatgctcctggaaatgacttatggctatcaagactgggagatcctgagccatatcatcaagctgaaaatgttagtaattctttaaacaacaaaagaaaccaaaatgccatccgtcttggtggggttcacggagctcggagtatgccctctcaacagaataactgtggaacagaaattacatctagagtaacatatcaaacgcaaaagagtcgaggcaactcttaccaacctgctcaggaagtcaattccaatcaaagtgctttaaatgataagcttcagcaaactgttaagccagaaactctggttaacaattttcatggtaggcatatttttgccaggacccgctctagccctgagcttactgagacacatggtgaagctcttttacaatctcgtcgtagtagagccgccccagatgctgggaaacgccaaactaattctaccagggttgatagtatcaggaaaaaaagtcttgagtctgaaactttgtcaagtggtgttagatattcagccgactcttcgtcagttaggcatactccatcccctcaaagtcctgatagtactgctgacatgagcagtgcagtgaacagttactatgatgaagtagggtccgtttccgtgaatgaagacttctctgttgcaggggaacaggaagagcaagatcttgttaactcgatgacatctgttactgggcaaggttttaatggacactttcctttcccttttaatttttcaacgggtcacttaccgtttccaattacaccttctatcttagcttcaatgggatatggtcagaggaatatgcctggtattgttccttctaaccttcctttcatcgaggcaccttggagtactaatctgcaatttccgcaaaactttgtttcttcaccatttacccattattttcccagtggagcccacccaatttcagaaaagccgagcaaaactggtagtgatgacatggggtcttcagaagtgaatgtcgatgagtctgacaatgatctctggcacgagccagaaaggggaactcatagttttggacttgaaaatggtggttatggaatgcatcaggcagatgataaacatcagtcatcttttgcagagcacagttttgtaccttcaagaaggaaaaatcggctgacaaggggggatgatttagaaaattcccactctccagtcagaggaagcagtcagattcagagtgaggagagaactgtaggctctagatctgtgtctggcgctagttccgttcgaagcaggacttcatctgaaagctcctgggatggatcaactacaagggggtcaaagccagctaaggatagacggaataggaaagttgtgtctggggccgcatctacactgtatggaaaaggaaagagtgttcctgagcactcaatccagattgatgatgataacagagaatggattcctgtatctagcaatgaaataatagatagagatctggggcctcgtcctactgtcccttcatttcaagttcagaggcatcaaatacatggtcatgaactagctcaggcaagtggatcagagtccacagtgtctcttgctccgtttatccttggccatggcatgcaacaaaacgaggttgataattctggatatacgttttatcccacaggaccacctgttccgattgttgcaatgcttccaatgtacaattaccaagctggtggtaatgcaacatcagatgctctggcaagccaccacagtgtggatgaaggagtagagaatcatgaaccctgtaaaagtttcgactcgtccaggggacttgatcagtctgagatagtagtttcttcgcactccactagaatgggctcttctgcagaacaggtggagcgtaagaatgatatactcaatggtgattttataagccattggcaaaatttgcagtatggccgctcttgccagaattctcaacatccgcctgtgttgtatcctgctcctgttgtagtgccacctgcttatctccaggggcgtttaccatgggatggtcctggaagacctctggcttacaccaatgctgtgaatcaactcatgacctacggacctcgtcttgtaccggttgctcctgtacaacctgtttcaaccaggccacccaacatttaccctcgttacgctaatgaaactcccagatatcgaagtggaacagggacctattttccaaatccagtaagaacttaataccttccttgagcttcctttatacttgcgtgcatgctttggttaatcgaggtacaactttcattttattgtctggtcttgtgaaacgaaccatagatattttcaaatgctaaatgaagtgcttttaccttgcttattaataataaaatggtctgtcagtcttgcagccctatatttctttaatgaatttacagcatgatctgtctgcttaccgtacttgcatccaaatctgcaacttgacaaatttggtcatgttgcaggctatatggttctggattttttccgttatacctttttttctttaccttttcgttttttcgttttttgttttccgttatacctttattgattctgtcctgtctttactcatgacggttttggtttgccacactgctctaaacttgtgctgaatttgttgcagaagatttctcctagggagcagcggcctacttctggcatgaggcgtggaaattatgggcatgacagaaccgaccatcatagcgatagagaagggaattggaatgctggttcaaagacacgaggttctggacgtaaccacaacaatcgtaaccaagctgacaataagccaatttcaaggcaagaccgatctgataggcattgggggtcgtcgtacagacatgaatcgtcctcctattctgctcatcattctcaaaacggtccaattcgctcaaacacttcacaagatgcttctggaaatattgcttatggtatgtaccgattaccaccggggatgaagcaaaacagtgtgacttcttcagagggacacaacgttccatctgtcatgatgttttatccatatggccataataatgtttacaattcaccatctgaacacaatgagtatgggtctcttggaccaggtggtgaagcgccacatttaaatgacgaggatcagccaaggtttcgtggtgctgctgcttctgctcatatgtcttcacctgacgatccttcctcgcctcacttccccaggtaattttggttttatagacttcctattacagcccaatgttaaattacagagaggaagaagattcttgattaaaaaagtatcgtagacctcagagtttcctcttgatttcactaaacaggggaaagtaacatcgatggttgctcaagtttagctgcaataaactcaagaacttagaagaatactgtacgatcacatcactagggtcttggaaatctaaagaaggcaaaaagttgtgaagccgtgaaaggagagacttgatagagctcagaccaatctggatatttctgttcaagtgtggtctggagagcagcaaagaaggaagccaagtcaaaggggaatcggtaagcgacccaagcctggattgttctttgtatgtacactacaatcaagccattaccgcccatgatcatcggtttaatcatcattttcacggagattgctgtttggttttgatagcccagatggatgaaaaaacgcaggaactctttctcagatctagttcggttaggtaacttttctctgttttttgtttcttttcgctttcccttagcattttatttccatagaaaatgtagccttttttgcccacatagaaactaatagaatccagggcttatcgtcaatcttgtttctaaaaattcaagaaagaatttctctactatttttagaaaaagaaaactgtagtacactttttagctgtacctgtagcttaattttggaaaattacggttatgaccagaagaagatgttgaatcatataacttcgtaagtctaaaaaaagtcaagtgtaaaaaaaaagaaaagggaaccataaattcatataagataaccgtttgtaggtattaaactatgaatgatgacgcttattcaggccaggcctaaatagtgtggcttatgttttgggccattaatgggctcgaaagtagtatgaaaatataagtaaaacagtatagcccatcattctttttgtgtagccatgacctgtgactgtgataaattgtacggagaaaatgccaaaactaacaataatttcatgtctcttaaacgtctgagttaatcaaaacgagctcatagttattgttttgttttagagtaataaacttagacgtaaaagagaaataaatgcattgttttggacctaataatagttgaccaaacattatagaatataataatttgagattcatatcatgatggatcttaggctttttctttgaaatatgatgagttgttttgtcacattgcaaattacatggttcttatgttgtttgataaactcggcgagtatggtattataaaagagaaaaataatcaggggaaaaagcaagcaagtcaacattgcgcggaactatatataatcagaagatcttgtttggtgcctattattgcctaatgacacaaaactattttgtagtgttttttttttttttataaagtgtaggaagtcggaccactcgtttatgagaaatcgaatttggtatcaattaatatagagagtaatttcacaaaaaaaaaaatggtggtcctgaagcaatggttgaatattacgtagaaaatggtattcccagaaagttccatagagcgagcaggccatgcccataccctgcctgcgtcttgtctcgtaacgcaacaatcaacaacttgatgaccattacggttatatggtttaattcgatttctttctcttggttcgctttgattttggttgggccaacggttaaatttaaatccaaggttacgtaatttaccattttactgcaaatattgtcttttacatatttactacagatgggatttttatttaataaaaaagggaaatataaaatagaaaagcgttttctttttttctttctttctacagtctactctcctgtttggtctctctctctctctcttttttttttactcttatctctgtgcaagcaacttcgtctctctcgataatggcgttccgatatcttctcgctgtctccgtcttcggagtttttgtttgaattcttcaaaggacagtcggatctttgttttacactatcttcataatctttgttggatttcatcagacttgtcatttattaatccatcgcgtttctcagtgtttctagttcgccaatttcggtttttatattggctattaacaattcgtcgacataactttgtgtgttttcgagtgtgtgagatttttagggttcgttcttcaaaggcttcagggtcgcgggaaggtgagattcgattggatcttttttgttgttgtttagtttgttcctctcctcattgtatatatatatatatatatatatatatatctaaacttttctgcttttttgattttattacaatattatttttcaaagtttctgttcatgtgggttttttttgttctttgttcttcttctgtttttatttttttaagaattatattactctctcttttattcatcaatctccggcaatttccctcaatctggagttgatgaactcactcaaactctgttccacgttctttacaatcaatgatttcaaattctgaaaatcaaagcttgttttgttgtttcataaatggcaaaaagattctggaattaggtttcacacatactgcagtttgttctttatctgggatttttgtttaggttttggttttgtgtttaacttttttcttatgaaatagtttttttttaattagatagattctgtagagtgcttacttgggatctgaaaccttattaaacaatgtttgagagactcacttttcatgattttttgattaattaaactaatcactgtggaaaatgctttcactttatactactactattctcttctttttagcttcctaatatattttattgctttgattgtttgttgacttgtgctactactagtactgtagaaaaactaactatggccatcggctaactggttttcttttgttattcaggtttatgtttgcttgaaaattttgatacaaattgaccaatatgttgaactctatggactgcattgttgtttttggtgctaaagagaacacttctgattgaaggatgttttcactttacattcagcagtaatgaagaacggacaggttcttctctttttttttttggatcaaattagaccggacaggttcttctataacacaattattctacctttgttgtatttgctttagtcttcttcaaaagttgtgtaacttctgatatgcctttcctttttgcaagataacaactagtttctggtcccttgtagctataaagattggtggattaggttaacactttcacataagaagttggacaatgttgatcgtaagctaacaagtagtttctggtcccttatagctataaagattggtggattaggttaacactttcacataagaagttggacaatgtttaaatttccttactagcaataattaagctgtgtcagtacttgtagattttgattacaaaaaagtgaaactttagaaaataactattatttgatggcagtgcgcacaggagctacaatcttccactcaagcttcacatgactctcaaggtgaccagaaaaccaacctatcaatagatgctcctatacaagattctggttctgtatctgcttcaagcaatgacagtaggaaagtttcacgacaagatattgaacttgtaagaaacaaatttgagctccttcttgtcatttttaactattaaaaagtaggtttcatcgctctctccctatctaagtgtaaatatgttgtgtcctccctcgtatatgtgtaacatgtgatgataaacacttttgaatgatgtaggttcaaaatttgatagaaagatgtcttcagttgtacatgaacagagatgaggtcgtgaagactctcttgactcgtgcaaggatagaccctggatttacaaccttgggtaagcttttgaaggttattaaattctctttgcttcattttgtttcattgcatcatagcctttctttcagtcttagattttaagaattctcattagcataactccatcttctgtactgacgtgggatagaagagctacataggatactgggttgttgaagagtgacacaaaatgcatgttatatattgtttagttatagcattagcaacgtgaaacatgaaatgaaatctctatttctgactctcctttttattttatgtgtgaaatcagtttggcagaaattggaagaagaaaacgcagactttttcagggcatattatataaggctgaaactgaagaagcaaataattttgttcaatcatttgcttgagcaccagtaccatctcatgaagtatcctcctggacctccaaaagttcctctggcaccgatacaaaacggaatgcatcccatggcacctggtaataagtctgaaaccctatatcacctaaaaacttgtatacttatcacaagtaaaataagtttgatattgaacttcacttttatttaacactgttgtttcgcagtgcagttaacatgccgatgggatacccagtactacaacatcctcaaatgcatgttccaggccatccccatcatcttgatgcaatgggagtatcgagctgccatgttgttaatggagtccctgcccctgctaatttccatcctttgagaatgaatacagcgaatgagtaagaactaactcgcagtagaatgattattatcatcagttgatggcatgtcctgagaaaaatctccatttttcttagtatggtgatcgatacaactgcgaacgatgcaactcctcaagtgattccaccaaacagtggtgcgatgcctgagatggtagcgagtccagcttctgtggcgtcaagtggacactttccatttgctgcttcagacatgtcgggtatggtaatggacacttcagtacttgattcggcattcacatctgacgttggaccggatggagaaggagccgggaattccagagattccctcaggtcatttgatcagatcccttggaactttagcctttctgatctcaccgcagatttgtcaaatctgggaggtaagtttcaatgtcatccttctctttttatttctggctatggaattgtcagttttataaagagctgattatcagataaagatatgtatgttgcagatttaggagccttaggaaactatccaggctctccatttcttccatctgattcagagattttcctggattctcctgaacaagaggacataggtactctcttatttttcaactcttcttcttcctccggtttcactagtcttgaatcagattgaactagatttggtacaatgaataataaattgaaaacccaatttgaagctgaacataaacttcaagtttggttgatatagtgttatgctctctgatcattatttaaattgatgcacattatctctttatctgtatgaatagaggagtttttcgtggattcggtgcctggacctcgttctaattcagatgaagagaagccttgaattgaaaggtagagacggccataatcatctacagtcaccaagcattattaaaataacaagtattgatatataaatcagagtattatgaataaaatgaagctgcagttgtagtctccttgtatctctattacaattctcttaaatgaagcaagaaataggcgtagactagtttccttttcttttatttgtttcaatcctatgctttggtcatatgttatgttgtagttatctctaaatggatattttctttaaaaacttttttagaaatatgtcttacaaaacactgtaaatgtcgttgaactctttagcagcattctgcatcaaaccggatatgagacataatacgcttgagtgtacttataagaaatttgtctaaatgaggtgagagcgtaagtgtacttataagaaatttgtctaaatgaggtgagatttatgtttaacagatcaaaaattaatgatttatgtttagtctttcgcgttgtcgaatccggaaaagaagcacaaagcttgaaagtactaacgaaataaaaaggcctataatcacacaaatcagactgtacaaaaaaagggaaaaaaacttaaaagcatcaatgtttcttattattcgatgatgctatgacataaatgcttataaactattcacaaagtcgttgattcagtctatcacgagtttctaagtttttttacatgaaggcttactagagtcaggacctcgcttggcgtacaaggaaccagccgctgatatattagaaggcagagagaccgtcgcagagagaggttggaaattagtgtttccaacgaaccagtagagagcccatttgaggttgcagagagtatactttagtgctttggtccaactctcttgcttgttgaagctctgtgttattgaataccccaatactttgtccttttcgatcctgcaaaaaagattttatatgagaaacttgtaagtttttccattgcacccattaacaaaaaaagataagcgacgacaaagattttggtctaaaagaatggggacttgcttgtatggaaggttgaggcaattatctggtggaatattgttctcttggtcctttgaatttgcaaaatcagcaaagtctttaagacacatcaaatacagtgtcatggctttatcgtaccgagtgctccaaaacaagttaacaggaccaaacctgccgaagattatcaacagcttttagttaaaaagggtcaagaaaaacaaagacaaaactcagcacaggacatctgttttcagttcaaccccaataacaaaccaggacaagaatatgcaatttacttacagctcataagtttcgttgttgctgtctacaattctaggataactccccatcggctgtattttaacttgacatcttaaaaggggttactggtcaaggataaacttcatatacagtcaacagaatcaaacaaaaagggtaaaataaggaaaaggactgtgagatagttataaggatactgaaactttggccggaaatagttacacatcgtatggaggagaagacaggcttggccccaagcagcattgatctcatcccactcaacctaaatatgtttcatgttgtttagacaaaaatatgagcagaacgagattataaacatacaaggaaagtagcaaaacttacttttatggcagggagtcttccaagtcgaaaattgttaattgtaccaaattccccatcattccgtatggggaaggcatcaataagtacatttgtcttatttaataactctaaatgtgcttgtgaaacttcaatctttgccaagattgcatctctctcttcctgttaacaaagacatatcttttacactagatctaagaaacgagtgttacactgataaagcctaaacctaatcaagtgctatggctactaataccacaataagagagaactattatcaagtgctatgaatactaataccacaatgagagagaactattatcacgaatctgtgaagcaaacgaatgaaggctctggactctctaaagtatcatttagtaaaatgaaaaataagggagaaccctaagagtatcaccagaaacgcacctgatgggcaattaattgaaactgaaaattattgaactcttgccaatacctataccagaaaagtcgaaaaaacatgtcagaaaataaaaccaggcattataaatgtatcgttggccaataaggaaacagtgagagagcttaccgatcttcaagttcgttaaaacgatttcccttgaattctagctccttcagttgatggtttacttcagcattttgtttctctgtttcttctatagctgcaacaagttttctttcttcttcctcaatctaagtagagcaggaaacaacaaccaacttctaacttaagattatatgaaattcatcatctttagagtcaaacaatatggtaaaagctgaaatataccttcttcttttccttgagaaaatcagcttcactaagaacatcttgcgtctctccttctaacctctgaacgcatgcttcgtatgcttccacgtccctcgtcacatcctcgacttctttttcaagtttatcagacaataccctcatgcattctaagcacaatggctgttcaacctataaaattcaaaaaaggggaaagtaaaacatattatcaggtccacatgactcaaatttatcgagcagatatactcttgtaacaagaacaaaaacgttagagcgtcatgatacctgtgtctgagttctagcaatatcaaaagcacgagttaagacattgatagtcgcattaaagccagaagtatttgaatgtaagggaccgttttggcccacttcaagagacagattgtgagaaccaccagaatcagaaacaggctcagacttatagacaactacaaacgattcctccatcgcctttccagattgagtagcatcaggctgaggtgaggacgccccgcgaggacgtggaggaatgccctgagattgaggaggcttatgtcgaggtaaaacaacaaaagagttgtccatgcgtgttgaaccaagaacactgttagctccatggatagatgagccctgcgtagctggatgcaacaaatcacattttcattatgaacttttagacacataacaaatcattcatcatagtaataacttaaaatatgctcgaagaagaaccaatcctaattctccaaggcctaacttacagattggatctaaatcaacaattgaactctatctatctatgatgaacaagaacgcaattaccaaacatgaattccaaaaaagggaacgagagggaggaagaaggggctaaccggacggagggggatcgttgaagaacttgccggcgtaggaatcgacgccgacgatggtaagggagtggtgacagttttggcagacccatttcggcagattcggatcgatcgggatagtccgacttttatctggaatctcctctttcctcatcgctctcccagtttttgtgggggttttaaccaaagagaaactccgtacgcaatcaatctagggttagggtttgaatttgtctacaccaaacaatctgtgtgtgtgatgcttgttactaatctaaatcattcaccgcctaattttagatttctctcccagagatagaaatccgataaactgaagaagaaggaagaccttgatagatttgtagacaaaactcacacggaatttatagttttaaactaaaattatcatgtcttaatcaaaagcaccagtggtctagtggtagaatagtaccctgccacggtacagacccgggttcgattcccggctggtgcattgttatttttgccttccaaatatttttctatcgctcaaaacttcacaatgcacgtgaacttcgattacattaaaacataaacgagtttagtttgtaaactattcaagtttcattagattgacgataatttttgttgttgttatattacacacacaaaacattaagaaaagaaaaacaagtttgtatcctcgagacctcataaaaatcaagtttgtatatcctcagacctcataatttaattaaatcatcgttacgttttaaaaacaaatcactaaataatgggcttttaaacactaatgtatataagagatatgagccgtccaaaaaaacaaaaatcaacggtctagaaataatagctgcaaaacaaaacaaataaataaagaagaaaaaaacaaaaaccctagctagagaattgtctcagaacatgaggtcttcgttgctcggcaatcttcggaagaagttgaggctcccatcgggtaaattattgcggaaccacggtagttgcacccagtagcaaataaatacgaaaatcaaacacttacgaacatgtagatcccaaccaaggcaaacgacgagcatggagcaataacagagggccaataagataatcaaaacgaatggccgctcaagcaacgtaaaagccgctagtaaccgttcgccttgtgtagcagcatcccccattaataacatgacgttctccataatcttcctcaacctatcgtacctcatcctaagaatgttcaaatcgttctccgacgacggaaacgagtcaaactcttcggctaactcgtctaggttgatcgagtcaagtttccgtagcttcaaatcgacgagaatcaaaggaggcggagtgacgttccgataaaacaaccagttatatgtttgcctcggggacttgaggatttcccgtaaaagtataaccacaatgcaaagcacaatgcaatacgcaactagccacgaagtcaccaaccaatatatgtagtactcccaaaaaagaaacacaaaactgactccaagcgcaatgaatttcggagtacaggctgtcgtggatctgaccgatgcaatgaccgaaacacaccacaagaccatcttaacgactgtataaagcctatcaaaattatctttggatattcttatactgaagttcctactctttggtttcaacatatctgacacaacttcgcttctcaaagccggctctgttctcgcaagattcgcacaattaatctcaacagcttgtgctctcaacttgtcgatctgatacatggacaatggagatttgtaatgagctttcggtaacatccaacggaaaggagctgaataccgtgcatacccttgcgcaacataaacaaaacgaactgctagctgaagctctcccatcttcttcagtccgctgcttcccaacttcagaataggatacgagcaagtgtaaatccagtcactttgtacccggttcaatggaatcctcactttcccgatcggaacatcgttcgccttattcttgtcctccaagatttgtcgattatcgtagattccaagggttaacaccgtacacttctcgtaaacatcccacgaatactgctcgttccacttgggtgagacactattaaccacggttcgagtcctggcccatttattcccgtatttagccactacgtaactgtcgatagtctgttttttctcgtcgcttccctttaaaccggttgctcccaagatcccgatttctaatttcccgagcagaccgggccataacccttttacaaaagctctattgtcgctcgagtattgggtgcattcctcggcgacgtgataagcttgatcagtggctagtttcatcttgagtctgctagcgaacctcctcgaatcgccagccggtttgacttcagtcggcatttcaatgtcgtagaacaaagccggtgcggaacttggaactttgagcggagtcatctctgtcagcttcttcttcaacgtccctatgcatccttcgtgttgttcgtcttctctgtcgattaacctaatgtagacagttccttctaacggctctgatgcaacaaagattagatcttggttccatgacgggtttgtaccggaagaaactttcgtttttagagcgactttacctagagtagctgtcacataaaccgaaggagtcttgtttttatccttggaaatcaaatcatgacctgaaacaatcgtaaccctaacataacagagccttggggctaggtagaccttaggtcgcgtgttgatcacgcgagaggcacacacttcacaggcgtctgaaaaccaagcctctggataaacctcatcaacttgtgtaccgaaccaaactgacatcagcaactccatgtaaaagtcggtttcggtattatgcatagagtaccactgcggtgcgattcttgcatcgggaggaaccctagtcggaatttccgaggccagcttgaagttgcgcttgttgattacggtattggtcggaccgtctttaagagtaaccgacaagacatcacctttggatttgtcgaaagcaaagacttggttccaatccatatttggtcccattggcagatttttggtagaggatttgtagttcccgagagtgatttcgacgacggggcaacatatgcgggcactagggtttacaacagagttgttgatggcttggattacttgtacgtaaagaaactccatctgttcgacgaggtcgtgtgaagaagttggaccgtaacgagggtttcgagctcctctttctcctcccagctttggaaagatttgcttgacggagaattcatctttattggcagccatctctgaaacaaaaacaaaaaaagaaagatatgaataagaaactgaatttcagacataagtaaacacacgaattagtaataaagctttaaacgaactgacttagatagctaaacaagaaccctgaagcaaatacaaatctatggggaataagaattagactaccaaatttttgatcctttaacatatatcaacagttttcaagttccgagtgaataaattaggtattggatcttaggggaaattaaagatcgaacctttagtagagaaagaagcagagaagaatcgagatgaagcaaataaagcggtaaatatttgagagatgagtcaaaggaagtaactcacagacaatgtttgggacttgttttgcttccgtcttctccggtcagcttccttaggtttcttctaaagcaaggcttgattattctttttgatatatatatatatatatatatattatatatatatatatataactcatatagaatatacacaaagagttgaatagagaaacaagatttagagaataatctataggatatttacaaagagtcgaatgcttatatgtaatatcttctttcctaatagaaacaatgtaatctgctattatttgtaaactaaaattgttaacaactttaaaacgatgaaaatgtttatatgaaattaatttgcaatactttcccattttcgtggtttcatagaatctgccgaagaaaatctacgaattctctcattggcatttttacttttctcttggcgtttgggtttgggtttggttttgacatagtatttaatgcaattatagagagatccaaattccaaattctatacaaacgttacaagactattaaaaacaattaatcgcgcgccgacaaaccgggcagaactatgcaacttgagccacgcatcaatacattcggtatggaagcaatgttcacattcaggtaaacacctaacagtttctttggttgcgtattccgacaaacaaatgggacatacaacatcactggacccggtcgggagtctcctactctcccctagctcaactttcttgtatgactcaatcgtagactcatcgagacctgtcctcgcgacttcctcgcttggctgcggcattacggatccagagaggcgtgcaaccactgcgtgttgtatctgggaagagactctctaggactttacaatcagggcaatagtaattgttgtgctccagttccttaaaacgataaccaaattacaactgtcagtcattcggcagttgtcctaactacttagaatcaaaagttaagaagcacggagatgtataactgcaccttaaagcgctcattcgtaatgatgtcgcacccagcatgaacccatacgttacgcccatcacaacacacgtaatacatcaaatcacgtcagctacatattgtagatgtaatagtttataactcaggtcagtatttcaccgagcatggtcaaagagactcttgcagatgccacaatactgattggatttccacaactgaaacaaaaaaaattggattcaactctttttggccaaagaaaactgaagagtgaggaaattttggtaagaacctttgaacagtgtctgaaccatgcatagtagattaatgagcagaagttgagaaaaaaggatagtagaaataaatggatatgaggcccatattatttcaagcccaattgtgtgggcctcagattttgtttgaagctcattaatttaggcctaatgtggtaagcccacatttattctcaccaaattttgccaaacacatatatttcctgatattacctattctgattattttaacaccaattgccaaacacatttatagaatcctaaacttaccagaaaaaataattcaaataataaactagaattaatgtgaacaaaacttgtaatatataaactggcattgatgcatttaaatacaaaacaattaaaatggttatattgaaaccataattaaatgttcatacaaaacaaagatttgtaaatttagactaacaaaagttaggtgttgcaactgctttgacgaatgtcttttatagtgataaactaagtgttctaactaataatatgtgcttagactaaattttggctcaaattcaaatatttatatgagttgatggctcttttcatcgcccgtggtgaatactagaaaggactacttttcattttcaccgtaaaggtaaaagattcatacacccttggcatcatctgtaaactttgttattttggttttcttactctttgtgcagactccatggttagataacatgcattgtgtttggacaagtcattgaaggtatgaagcttgtgaggacacttgaatcccaggagaaaggttgcagaatctatgcctgcggagagctcccgatggaagcttaaaaaccaccattaaaaccggtgcattgtcattgatatccttgttctgttttcttattatgactattcttaatagagtttctctttaaacctgaaccatggttgcaaccatggcttgttgaacaattggcttttctcgtcttttttgtcttcccattattgaaccggaacatcaaaccagctcattttttttttttttgaataaaatgtcaaattatactcaaaagaaaaaatatactttttacatcagcttttttgatattttgataataagagaaacagagctagatcaaaaacagagtaaatagaattgagagagcaaaaacagagtcttctttcttagaggatgctatggacgcatggcaaaccagctcatttttcctacatctcattcattataaagcgcaagtcatcatcttgccaaacagcaaatagtctaatttcgttatagaatggtccaacactaaagcttcttaaatattcattgggtttgtgttgtgtatataagttcaatattcagtcagattattcttgcaacatattctggggacaaataaatgttactgaagaggaaaaggatttgaatactagaaatgcttaaagctttgtgtgactttgagacaatgcactgtgaaggaatcagagaagttgctgggagattctgatggaaacaatgtcaccgtctgttcctgctttcattgtgtggtacttcacaaggattcctgcaatttagatttgtaaaagaattgtaattgtgtttcttacttgctagataaagatggttgattatgcaaagtgatttggacatgtaccttcgttttcttgcagtcttgtgtgaacagcaacagcgtggggtgcgataactgctttaggttgggaatcatttgactctccggtccaagacttgaggttgagaatacctattattcatgtgaaaatgtatgagacccaaggagaatgatctaaagaggaggagtaaaggaacagaaaagtaatgtagatttgaagttacctgaatatgaagattctttaaggtgtttgaggtcaaatatggctccacaagctgcacttgcgtttttctgcaacttatgagatccgatcagattgtaatcccagcttccatctttgtagccttcactaaggaagagttcaatgtgcctagcatcaagagtttgcattgttcctatacatagtaaaacagaaactctcttagttgcaatttagttatttcatagactaacatcaatagaaacagactagaagttgattagtgtcttttaccatcacaggtactgaggtcacaaacagggcaacgtacaagctgtaaatctggaacatgagataagccatgttatagttttctttttctgcagtagataaagtttctaaagaaattgttcttacctgcaatccaaataccgcttttgatgtcgttgataagacatgaaccactggattgtaacatccgttctatggttccttcccttgggaatttcagacgaccactcaaactctcagtcaggagtgaagttcgagagtcaagaacaaaggcacctatccgcatccaatctataatgacagtgtcaaaacgagatcaaaatgaggctgtgatcagcaaatgaagtacttcaaagtcaaagatctgtacaacatcttaacatgactaagaagagagtatgatggatccaattcaaggactaaccaatatgcttctccttctgacggaacaagtaagagtgactcccatctgcagttttccatatcttttcttagtttaccattgtagaagaatgtatcataagtccgaaatggatgtgaaacttaccaaaagctgaagcataaatcttaatccaggtggaagaaacgggaaacggcacagggacctgaagatcacgcaagcaggcaaacctccaaacagtatcctccattgcgatcttatagaaccatttgtttgttgctcccagcttcaccagtgatttaccatccaaaaaccttgaaatgtatgtccatatatcttgctcatacctgattttgcagagaaaattataagatacgctgatatagagacttagatctaagaaacgtgatatagcgatgtgattttcaaaattcttcctcgtttgaatctggattcagtttttgacgattgaaagcggaataatatgaagaaaaactcaaatcccaggtttcagcaaccacacagtcacgatcagagatcgatataagcatctgaatctcatacaaatcaaattgattccagaaggtaccgaagatgattgatcgaactctatctcctagatccatccaatacagtaagattaaacgccgtacaaacatttcaaaatcaaattcgagctcaacccaaactcacacacacaaataatatctgagaatagatctatttcgttcataggggagaagaaaataccatgaaaagcgagactggtaagtctgagcagagcaccgtggagatacacagccacgaattcctctgaggatcttcccgttcttctggtcgctgctctgaacgattcttctcttagctctaccatcttcttctctctgaatatcgttcttctgttcgttgctctgcaccaattttctcttccgtccaccatttccttctcccaccggagctatcatcttccctctactatctccttcggcatcactagatctcgtcttcattctctctctctctatctctcttctcactcagtatctcactagtcgctaatttgttaagcggaaaattgtttcagaatttggtttttgctctgaaccgtgtagctgtgatatatagccgcgagggagacacagcgaatttgaaaatttcgaatgtcaaatgacgtatatacccctgtaacaaactttctacctctgtagattttaaaatttttaaaatacttttcaattttagttagaacccggtttagcaccaacagacgtagcattaaccgagagggtcccagtgagtgtggtttccatgattatgaaaaatcaagatagtatggattttttttaatagaaaattcagaaactgtattatggaaaatgttaaaagctatattaacacttcaacattttggaactttaggttgttggctgtgaagttattttcttagagtcggtgaattctagacatttacaaaattgctacgccggaaaagtatctagctgaatgtacatttaatgaatcaatcggaaagaagccagcatcatgtcaagggatttcccgtaagctagccgccgaggaaacaaatcggttagcttcccaccgccattactgttcaattagaaagcaagtttgaacgtttgcaagaatggtttagacttaagagagctctagttcatgaatttgcggcagtttggagctttacaaaggcagggcactttgatctcttcagattcatcaacctcaaagagataatcatacctgtagagaaataggttttcatgatcaaggttaataatgcatatggatttaatctatatcttatgaaaagagaagctgaagaaatgttttacgtaagctcttccccagctgcgacattggtttttgcaatgaggacgattctgttgtcttctccatcacccatactcactatacgagcatagcaattgggcatacactgcacaagacataaacatccttagtattaattaccaggttttgatctcgtgtgccaatttagggaacttactgaatgattgatcaatcgtgcgatgttcccagagtctgtggcatcaattactatctcttcgcttatcttgaatagctgcgttgttgttgttagacaataagttacttattagatgcagcggttaatgttttaatctaagcaagcaagcaatcggaacttacgtaacaatctttgccctgcgaacgatagtttgcctctctcagatctgcaacacttctcctaactttcaccccacgatactcgatgatctgcacaagaattttaataatcagtagttagtttgcctcaagaatttcaatttagccatatcaaaaccacgaataatacaacgtaaactaaataccatttctccttcttgaatacttttccttgcaaacaaaccccatccatgtatgccagatttaccaaagcagactcgaaaattttctgtcctctgaagaagataatatattgtttataaatattctaggataacaagatggagaaaatattaactcttcatgaatcaatgtttacctgcaaatgttttagccgttctctgaatgatgtaaaatctgcttcctggtgtgtaacaaggtaaatggaaattaagatcttcctaagatattcagaaaacgttgccccaagaaagcaaaacactgacatgaatggagctcggaatgagaaacttgccttaaaagagtttagattctcgattgcactcaaagaatgatggcttggtcccttaagcctgtgggatatagcctccagatcaatcttctgaaacgtcagcagtaaaagatatgaagtagtagctttgctagggaatagttaataacgaaagactctccaacgtccaagaataaacaagatccccagatgcatacctttgtgtttgatctactatagatacggcatcttgctgcagaaagagaatcaaatacacgactctgttcagcttgggtttgggtttggaaacctggaagcttcatcttcttggtcaaaacgagtcttgaacctttggcgcgcccatattgattctgaagcaaatttctagagccaaatactcctgagggtgtgtgcacaactacaacactatctggatctggctttctacatagtaatgatacaggcgatcagttggtcccagtatcacataacaggtcagttaaagaatatgtcggagaaacaaacctgtgaaatgaacagtaaactgacttcctggttctctgcacaccatttttttccaggcagtgcaactaaattccatagacaaaaacatcacttacacatccctaagatgattaactaacaggacagaacacctttgcaaggggtttaacgtgaaaaatgaagattatcataagcacagaggctaagcagtttaaggacttgactaacctccatgttgtaacctgcccgtgatgcacacattgcgtggaagtgagttgcacacttgcagcaatgaacgcaggaaccatgtgtctgcttacaaattgtgcaaacctaaaaggaattttcagaaaatatgaatgatgtataatataataaaacttctaatagaacatgttggttatactttccacttctagcattcatttataccttaagaaatgaatttgctggaattttgaaaagtccaacagcaggctccatattttcatgattcaaaaacccaacttccggtcggaaccaagcacatgttacatgaacccacaaaccctcaacgtcgcttggttttaaagcaccacctacataatggaagagttcaggaaagaactagaaatatggaaagtgagttcaatttagagcacatctacccaaaagcgaattctcagaatgactgtatggaaccttgtgacaggacagtcaagaataaaacatcactaatgcaagatcaggaaaaaaatcataaagagagctaattctgcagtagtaccttttacaggacaaagacaacaatctctctcaatgtctggtgtttcacatgctctgcatacccaggaagtgaggtcctgagatttgcttaccccataacattcttggtgcacagccacttgacacctgcttacagatttggtcagatttatgactcatgtttagttataagaacgctgtagaattcagtataaccaaattatgccattaaagtaacctgttacagatgatcattttattttcttcccagtcttctacccatctgcatacagcacacctttcagtcgtccacttagccctgactggctcatacttttctgtgcatataaaataagtagtaagcaagtatcttagcaattttaaactccaaaagaaggacgccaagaattaagatatactctaccttctagcaaagagagcatcttttgcttatccaacatctgggtttctagagtataggtactgaattctgcaatctgtaatatcttgttgtcagtattatacttcttatagacatcatgcatgtaaatttcaggggtatataagggaaagtttatgagagagttaagcataagggatgtacccatttttctagaggtagcattgtgtctttcactcttacactatacttccactttttggctctgcagcctgtatgccgttcccattcacttggtgactgcttccttgacccacatgaaccacacttgcactcaattctgaaaacaatagttccaagataaatgtgttgttttaatctctggaacaacaagagaatggtaacagaagcctaggatcaagcgcagaattgtcgtcttcagagaaaaaatcatcttacggcattgcattgtacagtcatggacaaacaaaatcctgctcaaatgaggaaattgaaataaagatgatgcatctaatacttacgcatgaaattttctgatatatgtcccttccatgccattacagactacagtaatcgcatcaggcagcccagtctctgttgtcttttctgtagacctgtcccaaagaggttgtgaagaggaattttgcaaattaaagaattagcaatagaacaatgcaaataataaaagcaggagaagatatttttttcgagaagactaaagtgagagaacatgagatgttaacaacatacttaaacactgagttctgttcttctaatattgttggcgtaagctcgtgttggactttacaatcagggcaatagtaattgttgtgctccagttccttaagatgaaaccaaattagaacagtcattcgacaatagtcttcaatacttaaaatcaaaagataagatgcacggcgatgtataacggcaccttaaagcgttcattcgtaatgttgtcgcattcagcatgtacccatacgtcacacccatcacaacaaacctaatacatcaaatcaagtcagctatatagatattataatttcttactcaggtcagtatttcaccaaacatggtcacagatattctcacccaatctccatcatctgaagggtgccatattctcttgcagatgccacaatactgattggatttccgcaactgaaacaaaaatttggattcaattcccgtcgatcaaagaaaactgaagagggaggaagttttgataagaacctttgagcagtgtttgcataaaagctcttccggttgtgagtctttagtcctttttagagattttaatggcattactgagccacaaccgtcgcatgtccttatgtcctcatgatatgaaccctacacaataattaaatcagcaaatcgtttaggggaaggtatttccagtaactataaaagagtcagatacaaacagtacatctacgcctatgtagtatgtttaaacttcatgacttagaacagaaagtatatcaccagacgtagacactacaagatgcttatagaactgtccagaattgatttacttttgtcttcccaaaacaattagaagagcaaacttgaacatctaaccaaaaaaaagaaaaggaatatgtgtcaagaaaacgtgcctgaaatctagaagcaggtccatagtcctggtcggattccgtcgcagaggaatctggggagatgatttcagcatctccaaaattaccattttctgctaaaactgcttcctctagtgccttgttaaattcacttgccttgtaattgaacaagtttgtctgatcctgaaatctgaagagatgaaagactagtaaggaacaagaaacaaacacacaagtatgaaagatttccagaaagagcgtctcatgtacttacttgtccataaattccgtaaatggatacaccatcccttgtcttacccatgcatagtcctgttaatgaccacaagttttcagaaaaaaagatagtaaaaataaacgccagcttgaagacagattaggattaaagagattaccctctgagttccatccttggagtacccaaaaaacatgacacaaattgcgccagggacgcaatgtttcaagaccccatcaggcgcttgtgatatcggatcgatcaccacagccggccatgctgggaatcttttcccacacttggcccacacaagatcgccaaccgtaaattcctctggtttgtacacgcccttacgcgaggcgtcggactttttcggcataccaaagttagcatcgtcgtaggaaatttgaacatcccagtaatcgcaatctacttcactgctgtctccgttatccttacgtggaaacaccttcgagtctttgctgcgatgcaatttcgagcttccactgaaacctttgaccttcttccccagagatacgtcgtcgtcatcatgactagactccgtcgactctcccttgcgacggctagatttccatgtaccaacaatggagtccttgaacctagaaggaaccgctcgaactctgccacgcgaagacttggactggtcagagcaaacttgttgagattcttctttgcttgtcaaggagcttgagctactagtaagaagttctggttctttgctacatggttgatccacggttgctctttgtctcttcttatacactataatctcaccctttttcctcccatactcaatttctgaatcaattttgcaccgcttcagattctgattctcgaatgtcgtcaaggtccgtttcaaaatcatatcctacctaagcaatcctcgcctattcaacataaacgactatccaaattccgattccaaaaccctaatttcatcaaacaaaacagatttcgcacttcggacctccggaaggaaaaagaagaaactcgtaacgtttaaattcctctcgcaaattggctcaatagtcaacgaacccaatgcgaaaccgcttctctaaccctaaattcgaaaacgaaaaccaaattctcgtttccctcaacaggatagaattaagaaatcaaacgacggagaaatcgttaaactctaaaacgacggagaaacaacaaatcctcctcgtagattccctggagaaaattatcagtcggtttcagtacggagaagataaaaccttaaaatcgacggcaagggaaaacaaaagaggaggagaaggatctttgtgttctgatgaaggagacacacaccgtccgtcgtcggtttatatatttctccttattattattttatggttaattctgaaattaattcgcctaaacaaataataaaaacgaaaataaaaaaaacgaatatgctgacgtggcggttgaatggaacagtgtttggctccagggattggggacgagggaagactgcgaattttcaggcgtacgagagcgccaagtcgaaatcttccttttcatcaaatctgacgtggcgcatcaataaataactctctcgtttttcttcttgtcacacaacttatttagaaaaatcgaagcttgttgggctacatattgggcctacgatgtttctcgtggaacattttgacaattaataaaagaaacaacttcgagttaggcccaatatgaacactgtatgtttctcatgcaacaacattttgacattaccagacaatggaggaagatgatccttttttcatttcaaataagactcaaaacttatcatccaattatacgttcatgatttatatgaaagatgagagattgcatttgcatacaaaaggaccatatttttgttaatcgctccataatgttagccttagggtctagggacgtctatgcacatttacaaactcataaggaattaaagaattacgtatatttcactttccaggaacaacaaccttcaaaactcaacttacatgacaacaaattgagatccaaaaagaaacaaaccttaaaaaaacaaatatcaccatgttgctctaaagtctaaaccaagaccgatttccacttgaaaatcatattgccgaaccaaaaaaaaaaaaaaaaaattacaacacatatggactataaaatcagtgaccaatgattatggggaaaacaaaaaaagtacctttatgtacaagaaaaaaaaaacagaagatcttgaatcaaacactagtactagaacttggatgtgtctcaaaagagggagggctgcgagaagatggtgagccgatagtgccacgaatcctgaatatttcaagaacaacaaaagcaagtaacgtgactgacagaacaaatccatatccaattttccatccatctcctccattatccgccattcgaattccaagaacaatgttcactgctccaaaaaagagagagatcctcccaatccaatgatgataccaattccaatatctcctcatctttgtctccttctgtggccgtgcaaagaaagccaaaacctgaagagtgctaaggactagaagaaagatcccaatgcctcgatgcgcaggtatatccggctggatcctattgtaaagctgaatcccaagaataactgcggctaaaccgaagataaagcccgtgaactgaaaaccgatatgaagatagtaccaaagagggtctttatgtcttagatatcttgctaggattgcccctacaggaagtaagaaaccccatccgagtatcgccattactccatgttttgtcttctccgtagaagttgtcgtctttatggaggttgctccactagctgcattgaccaagaacatacaactattgaactctcccctgtttttaacatgtatagattagactagtatatacattatattacctttggaaaaatcgacgatgactgtagttttatcatcatgcttagtcaaacggcctagcttggaaggataagcagtgctaaacgctagaatgacagctctccgaggaactctaacggcgaatttcacctggaaagctaagtaaatcattgctccgtgaagagccaccaccggcgggactttttgtagttgcaattctccttgatccggcacaacttggtctctctccgttccttggagatagtattgtttgattttggcgtgaccctttttcgaaatccatccgatcatcgcgcttgatccaaccattcttccttctttcgagaatccaatcccaacccacccggttgtgtataaagccgatactataatcgtcatcacattgtctctgttttctgagtactgcaaaacagagcaagcagcgttgaaaatcaaaattatgggttttaggaaaagttggtttatgtttttcggtttacccgtaagacgaacgtgttccaaagaggagtacagggcatgttatcggagatattgctgtacggtggagggaggaaatcggataatcggtttgcaaaacagagattctgggtcgaatcgtttatgacattgacgtcatctgcagctaagaaaggcagatcttgtccgattaagaaacagaggatgtaaaatccgaccaaagttttcatggttggaatcgaaacagagacgagaaggagcgaggaacaatggaagctttttgggtgatggttacttgaagaagaagaagagtgattgagtttggtggtgaaagtggttggagatggagatcaatcataatcatcaaattgttttaaatcagctccggttggattttgagaaagatacttggagttgatgtttcactggttaagtatcggacaatttatgtcccctctgtcactaaatcgacacgtgaaccgacagaaaaataccaagatgctatgaaattattgctttttctttgccagttaaaacaattggcaattgctatttgaggttgagaaattacgaatagatttttaagatatggacaatctggagttttttactttgcttatttagggaaaaaaagaagaagaagacagagatgggagcgagagagtggggtcgtaaactggaccatagtgggaagtggatcagtcttagtctgaatcattactcattaggtatatttggtcaggatagtgccacgatcaacatcatcttttcttttcttggaggagatattggaagggaacttggaaacaaagtaaacaataataaattaaccaatgagtacagctttacagcttccatgagtaccaatcacacaaacaaacaatttcatttgttcgttgtaaaacacaaactcaaatgagaaaaaaggtattgtgttgcaattgcaaaatggtaatgtaaaacaatttaaacagtattactattacgcatggcgggatcggtatcagtcaacgactaagcgttttatgtaatcgatatcataattcaaaattattcaactttaacataataaaagggattaacataataagttagccaatatggggatgtagctcatatggtagagcgctcgcttcgcatgcgagaggcacggggttcgattccccgcatctccaattttgttgatttttttaattttagtttgctcttcttcttctgtttgctcttcttcttctgtttgcttgctccttttgttctctctttccggtggtttaaaacagagaggagatcacgtcatatgtttcttcagtccatgaaatctatttattttttgaaaaataatttggtcaaccatattctactgcgccaaccatcgtcttacaaaaacttttattcagaaacaatgataactcgaacaccgaatacaatgacaaatggaaaaaaaaaagagacaaaaaaatgtagaaggaaacgtatcctaaagaaacaaaaaatggagtgtgaagagagggtctcgtctctctacttggaccaagcaactgcttcaatatccgtttgagcacttctatacaattccagcctcttcgcaatcgaagtccttcgctgctgaaccgcaggatcctcatccaacaatttcgacaatttgctcatctataatttttaacaccaaaccattttaacattcttactcgtatcttatacaattgtcaatttgctcatataggttttttagtatatctttattgttacctctttctggccaagttcggtgaagaagatgtctagaaggcttcgttttgcttcacggacttgacagtaaacaatggatttcggtatggagtttctcaagccagcgcagaccatgttcacatatgacaacacatttgagccgattcttcggagataagcatcgttgtatctgtcgaatatcgaatgtgtcggattcccacctttttcagaatcttgcgggagtttcctgaagaactcgaccgttaagtaaccagactccatgtccactagtaacagagttgctttcctgctttcgtctctcattcgatccaatgaatccacggctgcacctgatacttctactctgagtgttggatattgcttcagttcctgtagtcatgatgaaaacacataatcatgcttcaaaactcataagtgttattgttgttgttgggtttatgactttgagcagagatattcttacagatgtttcgcccatggatttgtggataagatccttgagaatggaatgaaccgcatcaacagctgcttcagcagggcctctaatggagactaagcatgattctatgagccggcgataaccttgttcaggagctatgagatgaggttgatatccatctgcttcagtgatcagtttccgtacattgtccatggagagatgtttgtcgaattgcagtcttttaatggcagctgggaattgattgtcgaacacagaatttatcttttcaccacctgaacgcctgtaaggttgttagtggttatcaattataaagctagaaaattgaattagcaacaatccagaaacatgcggatgacttacgtgccatccaggtgttctttaaaagtttgatcaaaggcacggcaaatttccatgatcatataaagttttccctgcattcaggagaatgagtattaacgaaggagggatgtgaaatgagacaagaaaccgaagaatgaaaggctaaaaggtccttaagacagaagatccttacaccagcatcagctgctacaggcttcccaagacggcttagctctgtctctaactcggaaattgtctttgtgataagagactgaagtcccgggattctagacttgataacaacttccaaatgctgaaaagttatagctggttttagagcaactacaaaatcttttatgctaaaatcttcatacataccaagctcctcaattatataccttagagagcatctttcctaaatactctgaacccattctttcagttaaatgtctgtactctgggctagtctggaagtaatcacgttcacgccgacgagcagcaatcatatcaacacttttattaatgtcagcttgagaccggtttacaacaccaacccaaggataccttaatttgtatccccttccttcaagtatctgaaatctccaaacatttagaatacttagggactgttaaatattcactaaccattctttagtgagattctcatatttatcttcattgtgtcctttcataatgcagttagagatagattgcttgcagattagacgataatcttgactaatgatatgtagaatgtattactatcatctgaatgtaaacttacatcaacagcattagtgccttggtccatgagatcaatttttgttaaaactccaaaagtcctgtctcctgatagcataaagtgcagcgaagcaaacattaaacaacaagaatcaatcaattcgaaatactatcatcatctaagcattgatgatgctaatcaatcatatatacaatgctccatagaacttaaaccatatttaccatgtcctagtcgcttatatctcacaaaaaagaagctcaaagtgaattcagaaagcagttgtatcaaaatataaaaaaggaagaatctggcacctttgggatcaacttcacgagagatcttaatggcatcagatgttgcaagatcctgatttgcaggggaaatagcaagtatgatgcagttgggctgtcaaaaggtgaatgatcaatctttgttatttgcttgaacacacgacctttagaggatagtagcatcatctttccacaattgaattctgctacatacttgtaatttctttcaaatcatagttaccttctcaataaacgatctgaccatgttctcgatgtcttgaacaatgctttcaggctggccatctacaacataattggcaccatatttcattactctttcactaaagaggacttggggtgtgggatatcatggaaaacaaagactgtctcacttaccaacagctacctttgttagcccaggaagatcgacaagtgtcaaattcacaactacaaacatttgaagtaaataaaatcgttaagagtatggagactggaagacaaatgggaaagatggtagaaaacataaatttaagatttgattgaatttcacaccctgtgtacaagaacctaaggatcctaaagcatgtttagttaatttcttaatgcaaatgtaggaagtacaaaggcttctcttaccattaggagagaagatactgagatgaattgggactgtggatattactttgctgctgcgaccagtttcacgatctgtctcatccgagatctcctgcctcacagcagctacataacaaggaagaagatgagaagaatgtgggcacgtaaacaacactacagatactgcaagcagtcacaggaaaactaaggagcataaactcctcccaaacaataccaaaatctgtgaacttcttctttggaagatgcataaactctgcatactctttcccttcatcaattctatgaagctgcaggacaagaggtctgcgtgtaacaatccctacacggaagacattgttgttctaagtaagtgttctttcagaaaataatcttcagatatttttctaagaaagcttaccagctccacgaggtagaaaatcttttccaacaacactctctagcactgaagactttccagaactctacaatttcatcaaatcgatcggattacacgcattgcatgaatactcaacagtttttgattaagaacaaaggatctcacaacagaaacattatcattagtttcgatcaaatcaatgattcaatgggagccatcagacgattcgttgaaaaatgagatgagattatttctacgcaatgcctatgatctaaagatcaccgattcaaaattccatgccaaaaatcaagagaaagagaccaaacctgaccaccgacgacggcaattgcaggcaatgagtcccagagagttgggagggagcttccctcgccgtgatctcccagagccgtacaggctctctgaatcttgttcacaagcgcaatcaaactctccataacggaatcaaaactaaggagctccgattaatcaacggatgaatcaatcttccggcgagatttggtctccgacgggtccgtatgagcaggagaagagaacgcaaacgttataaccgcgagaattgctatcattcgggcgaccgttgaatttttctcagaaaataaaaatatataagctaaagattcataatacccaaagtacccctattgaaaagtcaaaccttgtagcaagcccaaaggcccactttatttgagcccagttatcctcttttggacacatttttggtatattcgagtcacgatactcgaatggtatttccgttataatttacgaaaacaatgtctcttcttttctctacaaccacacgatttcgatgttaattaccaaaaaagtgtgtttaatttagctaaactaattgttttcgttgattaggcccagttgggttgaagaaaatctccaatctttcttcgccaagtctcccacaacactttgtgttctaatctctctgtatgtcgcaaagtagcagcaacttaattctctcatggagtctcttacatcaaatccttccttcgcttgtttctctaaaaccatttctcattacccttctcgtttctccttcgtaaagctaacctctatccaaaagttggaagcttccaacaacaccttatcgttattctgctgtaaatcatcttcgaatcctaaaccagattgcaatcgtcgtatcaagttaaaccctttatgtgtattgcgtccaatcattcgaacaataaagggtttggtttcttctcaatccaggcaatggatgtctcgttttcgagcttacagagacgacacggcggcgttttctgaggatttcgctggagatttgaagcataacggtggattagggattgcccttttgagcgttactgcttctgctaagataaagattagccctttcgttgcgacgctctctgcgaatccaactttcgtttcagctgtagtcgcgtggttctttgcgcaatcgagtaaaatggttatcaatttcttcattgagaggaaatgggattttcgtcttctctatgcttctggtgggatgccttcgtctcactcagctttatgtatggctttgacgacctctgtggcgctttgtcatggagttgcagattccttgtttcctgtttgtttagggtttagcttgattgtcatgtatgatgcaattggtgttagacgccatgccggtatgcaagctgaggtaaaaagttaaaccaaatctgcttcaagttttgagttttggagatttttacagagtttgactttggtcttattaaatgctttgtctattctacaagttgactagattttcatgttgatgagtgtgtatagtttaatgtattactatttccatgttgatgagtgtgtatagtttaatgtattactagaatctggtgatggattcgactttcactacattgttgaatttttgtgaatgcttttatgtgtaaaagttggcgtgcttgagttttcaatgtgtgcacaattgaagtacatcactagatttggaattatggagagttagatgttgatttctgttcttggttcttgaatcttttatatgatggttttgcattgttgagagcgtaatacaagtttctcgaaattatggacattgggcacatgttgatgatagctgttattggttgtagaatgaccttgataaaattgcagagaattaagagttttgaaagaggattcacacagagtctaagtcatgtttgctcttggttcttaaatcttttagatgatggttttgcattgttgagagcacaatacaagtttctcgaaattatggatattagccacatattgatgatagttgttgttggttgtagaatgatcttgataaaattgcagagaattaagagttttgaaagagggtctgtacagagtctaagtctagtttgttgttctttgtaagataagattaacaatgttttgtatttgttgatgtcaggttctgaacttgatcattagggacttgttcgaaggacatcccatcagtcaaagaaagcttaaggaactgcttggtcacactccttcgcaggttcttgctggagcattggttggtattgtgattgcttgcttttgttgccaaggctatctcgtctcagtctaagaagatgtcttttattccaagtgatctggttggtttttgatttgggtagcctaaaaaaacagagtgttttaagtatcgcttaacattgattttggctaagattcatgttgtagtatcatatgttttgttcagcaatagagaaaactcttgtttcttcttccttgtggcttttatttttttgagtttttgtattccctgagaatgcaatgagagcttcttttgtttaaagcgtttaaagcaatgcatgacatgttcagtgactgctgcagaaacacacacacacacacacacacaaagttaaccataataactaagatttacgtcattagagcaagcaactgaagtgtttagtggagaggatagcacagatatacttgagatctaacggccaaaaagcagtttcttagctcggaatgttctcccgtaagatctaataaatcctaaaccccttgatcattctgctccaattagtttatcgtgttcgtttcgtaatcttccgtctccttgaagcgttagatcttgatctatgcgttgattgatgatatatggtttcagacaataaagatgggagagataagaagattttcgtagatctttattttggggcggttgacaatcctgcaccatcaaatgtgatgctaatcatgggagacatctcacaagaagattgcatcatcacgatatgaaagcggcaaagtacaatgttatcttagcacagcatcaaaacccatcagggttgttactaaccattccaagctcactatggctttggacaagcctatcagctggagacaagcctattgaccaaaccggaagaggacagcttagtgaggcaaaaggattactgattttgtgtagccatatgtgtgaataccttgaacctctctaaatctcttgtttgtagaaaactctttaaattaagtaaactctttatttcttcttccttgagggttcttttttgcgttttttgtattccctgaatatgcaatgagagcttgtttttgtttaaaccaatgcaaatctttatgatgatgacatgtttagtgacttaatgcatcagtaacttactgtaactctcaaactgcacaacagattaagcatgttagagacagactatcttagaacagataatcgacaacaacaaatttttgtgggtctcttagagggtttaagaagaactgactaatacgctttggtgatccaagaactaaagtaggatcacatactctctctctaaccaacctatgatcaatcaaaaaggcaaggtttaaaacacacaacatgtgtctatcatacacgaaaatagaagctatttatttgggggagattgtgggaatgggcattttgtaagcccaaaaaatatggatttgagccttttcagtcctttggatttcttgtgcataaaagggcccaaattcgttgaacgaattaacatatgtaacgaagaaagaagtagcccaaattcgctggacgaatcaacataacgaactacgaaagtaccctcagctatcatttctaagtttgcctccaatctctgtttgctataggccctttggattggtgcctcagctacttttcttgttagaatctttaagagcctgctttgatcgttttcttcttcggccagtaggtttggtcttcaggttaaagacacctttcatcaacgagcttatatccacagatcgttctcccatgatcttatcatggtacatcttgcttcctatctcacagatctcttcctctacttcttctaatggctcgtcaatattcaacttcagttctcctttcctaataaccgttacaccaaatccattcgccttggcttctcgatatgcatcctgtgtaggttaaagagaacaactttgaattgataacagaaacacgtctagttaaagtttcttcattggctaaattcattacctttggcgggcgcggaacaatgaaaacgtttccacttcgtagcatatccaaatgagcttgaataatgtaacagaggtttcgacagtctgcagcgtcctcgaaagcaatcacatgatgtggtttgggttctaactcgagatctgttgccatctccaatgtgtagaaccctacttgctgctctccgttttcatcaactgtgtacaactcaaggcactaaaacatgaaaagacatatcagattttcaaggacttttgtgtttctccaatgtcagtcaactgtttagcaggaaaacataccagtacatgcggaaggtccaaccaccatagataatcttcttccttatcttctccatactcgcggtatttgctcaaaacagcttgaggaccaaacaactccatctctctcttgagtttgttgagtttcttttccatgaacttcttgttcctctctggcagcttttccattatatcagcagcgtctttgatttcgtcttcagtaatccatcggtctaagtcttttcccatgtctctcataacagctttcacttctggatcagtctctgcattgtacaactcaaggaacccacgtgaccacttcttcgtgtgctgccaatactcctttcctgattttttaccaggtctaacagatccatcacttccttctacaacaatctttggctggcttgaggtaatttcagatgaaggggtgagagtgttctcagaggaagcagactctgataattcctgatgagagctctgttcttcatatttcacaggagatacagatgcagctttttcagaaaacagtgcttcacgctgttcatgatagttattgagaaactcggggttcttatcaagtgaaggccctttccatctcggtatgatcttttctagtggatcatacacactgacgccatctgaataataagaggaagggagatggttgagatatattttgacaagctgattaatgcataatttgtgtacgtaagatattgagcaaactgagtctcaatcaaagttgtagaagattacctactccgtagtcaaggttttcaatgtttgaatgaatccactgatgcagatgagacagtttctcattttctttctcaactttcttctccaagccttgcaaaaacatagctttatcttcatcatcaatcaggtgaaatggatccctaccagccagctcattatctcgaacatggaagacaatgtcccttagcttctcgtccttcatccactcaagctcatcattatactcactgcggtaaagttctgcaatttcagcaattgtacctggctcccgagtttcaccctctctagcagccatataattatccctaaatcctgctctcattttttcaacaacaggctcaaattcatggtagttattctctatccaattccccttccctgatggttcttccttctctatatgttcagtaccaccagaagaacttttggcaaatttaaaattgtgctcttcgattttatttgaagaatttatttgcttgctcgatcccttaactgcattcccaggttctgagagtttttggtaatcattcttttggggttgacaatcagcatccttccccaacggttcagaagaagtagactcaagtgcagatttcaaggttccattgacagctgcaccaaggattttatttttgtcaaccaattcgtgttttctagctacaccacgctcttcgtcgctctgctttgagaagatttcaacactatcttgggctatcatctgagaaggttcctgagtaagctctttctcaccacttcttcttgaaaggaactctttagcctcttttacagaccgtatgacccgtgacttacgaccagtgctattcttcatcatacttaactgatccttagagacatcagaagattggatgactccgtctgtaggaactggtggtaccacattactcaccttttctttgtcagatgctgccatttcatgattcagaaaaccaaaatctaccatagccccattcaacatcggaacagcaaaaccagaaagttcagtgttctcactgtcagtcgaagttcccaagcgttcatctttatcatcatcaccttcactgtgtgtcaaagcctcatgtggaagactcttctgtgactgaatgcttatatcttcctcattgtcgcctgtttctttgttcacatcgagcttctgcttttcattaagttctatgccagcttctatctcccgtgctcgtctagccattgctttgatttcatggatcttatcaacaaagtccagctcaacatgaggagaattcacgagttccagtttcttctctgaacccttaactttagaaatactagtcataagttcatttcgatcaaacttaggcttctcaaatgacatcaatggcttttccaaaccctccttgtgcaaaacttccacggtacctttctccgacatatccctttcctgccaagctttcatctttctcctcatcatctccttctccaactctgtacactcaacctcattactcttcctatacacaagcaccgtcttcagcaaccagagtccaatgtaaccacacaaaacagctcttccaatcgccggcaactttggaattaagtcaagacgaagaattgcgttttggactgagctaacgagacgaaactcttcctctgaagaagaagaagaagaaacgaacttgacaagagaactctccttatggatcacatgttccccattctccatttgttcagctaatttcttcgcatatacaagcttagaactcactgattccaaatccccaagagctgatcttcttctactcaagacctcgtcttcatcaacctctactttctctacgtttccaacagaatcctgatagacagtgaaaatgggattcgaaccaataccccaaaactctgcttccttgttataccgagcaacccaatcttcaagctcattcagcaaatttgaatcttgagcaaccctatctttcaatccctcggtgctacttaaatcatcacagtgaccaaacttatggctttcgtttagaggtttcgtacctggttcagaagatttcggagtcgaacgccaatactcatcaccgatgatcttcttcctcagcgaattacgtcgcctcgaggtctctccgaaccgagccgagactcggagaattgaaacgcgatagtagtggaatttggagatgggcaagttgaatcgacgttggttagcgagtctcctgttcgaattggacgagaaagacgagaaattgaagaaaccatcattggagtttagtagaacctccattgatggaaaccaaagggataaagctcacttccgagtgagaaaacccccaaaagctgggtttaacagaacaatgatgaaacgtcgtcgtttcttaaacaaagctaacgcctttgaacaacactacagttgaaaaaaggttcaacattttacattttccagatataaagctcatcacttccaagttccaaaagctgggtttaacagaacaatgatgaaacgtcgtcgtttcgtggacacaacacaagcattacataaatttatgaacactacagttgataaaagtaaaaggttcaacattttacgtttttcctccagatatagcagaattgtaatgaactatatattttataataaaaaaacctccatgacatgagaaagacagagagagatacataagaacaaccccaagtttatcgtcagagaaaaccctaattacagataaccatggttacagagacaaggccaaatcggtgaggttttcaaaatcagtttgattttttttttttaattttcaagacaagtttgggatacaagctcctccaccttcaccactttgttgttgctctttccatatccttccagtgactcgaagtttcagctctttcctatctccacctgagaagaagagagccatgtttctttgtataattagtccatcatgactgtctctaactttcctgtggctgtctcttacgcttcttggtgttccttcccatatcagcttccgaccataacctcccacttctaaactgtaattgtagtttcgagcttctgtctcgtcccccatgaaacgcaggaacgccatgtagactggagccattccgagctggaatgcctcaaagtgaagacagaagtattgaccgaagcagtgaaagacctgattttcatttttgaaccagaaacaaaaccaaaacagaggaaaccttgataagcattaaagtatatcaagtcaacatgtatagcgagatggaagattcacaattcacaaccatagattagataaataactggaccttctctaggaaagctaactcgcaacaaaagcaaaatttgactcagctgatcacattacagtttataccagacagatcaaattttatcacaaatataatcctattactttaaacaaagcctcctaacttatctaagtgtatactatgaagcacgattcatatgtacttacagttaacatccatgtggcgttttcgacttcacgaggattagacttgacataacgatggttgaaagtacacccagaatgcatatccaccttatgatcatccctcagatgagcaactaagaaagggatatcgcccgtaacagaacactcggatccagcataagggcagctataaggtctgaagttacatacagtctcatgtttgagcttactgtaataagggaagatttcaggacatccaagtgacatgtgtttacaaggtagttcaagtgattcggctactttttccagtgccaaacaacggatatcaccgagctcttgtctacaagttgggcagcggttgtgaaccctggctttacaggttgaacacaacgtatgtccattgtgacactgtagggaaatcaaataattgtctatctgttattccataattctctaaagaaacaataagaagaatcttagaaactatcaaagctattgacaaaatttagtgacaattgtttcaattgtagccattagtgaatggataaaactaaatttcaagttacaagagcaacacaaccactgcttcaacatccatgattcacatcattaactcaaaaccctaaacaaaatcaacaaattaaagatccggggaaacgaaatcagagaacaagggattgaaaagaaagacctgatgaatgggagggtacatagaattggtgcagacaggacattcgagaagctcatgaacactggtggtggtagggagaagcccagaagcagcagcattaacgttggtggtgttgttattagtatgatgatgcttggaaacagaagcgtaggaatggcgatcttggtggatctcttcatcatctgtcacatccatggttgatgtacagtccatgctatccaaatccattgaagaaaggtggagactttgattgatcttcgatcgaaacgaaagatcaaaatccggaattgaagaaacaccaccgaaacaggtcaaccctcgtgaagtgttgttaattttcaaaaacaaaaaagatagatgctcttcttcatcaattctctagagagagagagagagatagttgccgtcaaatgaaccggaaacgctgatttaagatcggacggtcacaaaggcggctgtgttaaagagagaatgttatttggaaacaaattgaattataagagattcagaagaatttactggataggggaaaaataatcatattctaataatatacgtacagtatatcctctctcactcaatgatttctttgtttttaattaaagggccatgatccagtagagatgggcctaaatatgtacatggtgcacatgattgcttctttttttttattctagatgtttttctctctagtgggattctgtctatcattattgtgtgttctttttttacttttaattcaaacaatttcttttcctttgtacaagaaaaatgattttcaacttctaaaatgacagctaaattcaaagattcatgaaaaacatgctcatctttctgtttactttaacaaaaactttaagagatgtatttaggtaaaattagacggtttaagaatatgaaattcataagaggaataataagtaatgggatgtggcttgggttcaaagtcacttcaaagaccaatgataatgtaaatgaacattttactcttcttcatctcaagcaaactctcacaatcttaaaagcaaattattcaattaataattgcttctcatcagtgatcggtctcatgagtgatatcatccttaaacacaccacataaaagaaaaagaaaaaagcgaacaacaacgatccatccagcttcaatgatctgtcgttgctttttaacagaacatgtcaattgtactattatctttctgttgggttttgtgacttttgtctgagaaaaatataaagcttcaaagaatctgggacttgacttaagaactgttttcacagctacaagagatcacaagcggatctgattattcattcatcaaatattctttagctttttactcctatttgcatcaaacaatcaaatttaaggcactactggatcaaaactagaaagattttagttatttgttaccactggttagccgatgtatcccggcacttttcatcattgccctgagccaactgctgtggattagtaccttttactcgattactaaacagtctctgggatattctatctttagccgttgttttcttacgccttgtggaaaaggtttgcttcttgtttttcttttcagcaaaaactctatcaaactcatcatccatagcattcgatctagaagttgaggctattgccgcaccacgcagaacttcatgattgtgttccttaaccttaaccttaacaagctttgctcttttcctcaccacttctttgtctttctcccggatattcttcagagcctctttcgctatttgcctagctaactgattaggatcagaatctgaagttgtttcatccatagacacatcctggttggtccctgaagttgaagaagtttggttttcactctcatctaatggagattcctggattatggtgtttccttcatcatcccggggtacaatgggtccgtgaaacggacagactctgagatctcttctctggcaaagaccacctttctttagagaagcacggcatggaggtgtctctgttctctcttctctatacacggttgcctgaagattcaattctgctattttatctgctggaattatagcatcttgatccaccctgccccagtggctctcgatctctaaaccccggtaattagctcgaacttccgtagttgattcccaattagtcaactgtgatccccaattcatcacaggcgcttcagaaattagcttgtctctaagagagtttccactgcttccaacttttttagtgttcgacactttattggacctagcttctgatgtagacttctttgcttcacctgatgatggtaaagatgaattctcactctgctgagttctcatcacatgagccacgttcttgactgaatcagttttaaccttgccatcatcctcctcccagatatcttcttcttcctcgtttgtttcttcattaccgtgaatatcagtcattcttgacattgtaaaaccagcttcttcccatttctttttagctgccaatatgttattcctgatatcaatcaagtccttcaacatggaatctctcgttctgttatcacttacgtcaaccctaatgagaagagagatcccttcttgaaccgagatcagatgctttgtcactagaagcttgcactgttccctcaacacatcaaatacaattctgttttcaccagtttcttcaaccttttctgattgtttcagtgaatcaagacgaatttgcctcagatgagaacaacggatctcctcaaaatcttcctcatctaagatcgcaagtggaacaccatcatcccctctccactgaacaatttccatacactccttgatttcctttatcgttacctcaatctcatacttgaagagtccaaaactaactctcaaggaatcaaacttgttccgcaaaatctcttttgtcttcatctccctctcctgtctctctcgttgaatccgtgcagcattagcctgtaaatcagggaactttaacttgagggtattcttaaggtaatcaaacccaagtctaagctccttgtaatgaaacccaaaagacaaattccacttctccaagaactcaatagcctttgaacgcaacgtagtggcaacagcaggtggtgcaggaagaggcagattgcttctaaacccaatacttaaactcaaaagctgatcaagattctcaattatcaaagttctaaagagctttgatctcatgaatagctcgtcgattatgaaaagcgtcagatatcgaacctgtcaaagaaaattatcaccgcgttatttgaccaacaaacctgatcaatcaacattgactagtccttaaaagagcaagtttcaatgaattgaacggatcagaaattgttcaaataatgtgaaaaaaacctgagagtggttatgtctcatgagctccattagggtttgcgaactaagtcggacctccgaatcagaatagcgaacaatggatttgatcgccttgagaagcctcgggtcaacctcttgagcagttgatttcgtcgctttctctatcaacccaataactttccctccgccgtcatctcttccttccatcgccggcaatcagaaattcagattttcttctcctttctaatttccgaagaagacgatataaaaagaaaaccgaaaaagaaaaaattagatttgtgttggtttaatatttgtacccactatagtcggtttacttggttaaacgaaatgacttatttacccctctctccccaattggttcgaagtaacgtatttgcccctgtttgtctaacctctattcaccaacttagatgggtgttaatgtaattacgataaatatcgtttatatagttgatgtgaagttttcctcttcccaccaaaatcactcaacacagtcgagagaagatgaagatgatcctgatgacgacgatgcaaaacgctttctggattctcttggttttttccatctcaatggcttcttgctccacgattccatcgcttgtaggtaaataatctggtgattctgttatacttttcccgagaaaaaattgattctttttctctcattttccttcactttctcgttcgttttccaggtccacaaatcggaatcaactacggagaatacagctccaatcttgaagatagtagtaatcttcgattccattgtgtgattcacgagaacatcgaatctttttaactctcaatgacttttttttgtttgtttttccaggtccagtgatcggaatcaactatggtcgttacggctcaaacctaccaccaccagaagcaataccatcgctagtcaactctctctccatcaaacatgtcaaaacctttgacttggatccaagaatcaccaaatctttcgccaacactggaatcactctctccctctgtatccccaacgacaagatcccatctctagccaccaatctctccgaagctgaatcaatcatcagaaacttcatcttaccttaccacaagaacacaatcatcacagcaatctccgtcggaaacgaagtctccttactcccgcaattctccaaccacctagtctcagctatggtcaacgttcacaaagcaatcaagagatacagattacacaagaagatcaaagtctccacaacgcattctctcgcgattctttccagaagattccctccttcgactgctgttttccatcaatcgatcggtgattcggttttggaaccactcataaggtttctacaaagaacaaattcacctctcatggtgaacgtttacccttacctcgcttataaacaatcattcccttcgattcctctggattttgctctgtttcagccgatgaacagccccagacgccggagatacatagatccgtacactggagttgcatacaccaatctgttcgacataatgctggattctgttgactccgccgtgaaatccttagggttacctgaaattccggtggttgtatcggagattgggtggccgacgaggggagatccgggtgaaacagctgctaatttggagaacgctagggtttttaaccaacggctcgttgagcatctgagaagaagatggaataaagttccggtgtatatctttgctctgttcgatgaagaccagaaaactggaaacgccgtggagaagcactggggattgctttacggtaacggatcgaggaagtatgatctgaatttctcgccgccgatttgaagtttgaacggcgcaaagatggaagaagatttatgaggtaatgggcctattgttttgttttattatgggtctattgaattgtttttagaccaggccagtattacgacatattaatccaccgggcttacttgtaaataatacaaagttgataaagaaataataaaaagtggagatgattgaaggcttgtgtcatgtttttcctttgtcccatatgtcacgtgcaagatgatagattcgtggacttggagtcagtaatatcaatcaatctaacaaaacatttgtcccggaataaattggaaatgcaaattgtcatcatgttactgaaagttgtcctatattttaaatttagttttaacagttttattttatttttatatgaacgaaataaaaataaaataaaagaagtgagagccactctatttacaaaccaatgaaaataaataagggtggaaatatgggaaaaatggaaagtaacgttttaattgtgttgatggataatgtgtattttatgatagaaacaaataaaatcaccttgttataagttgtaaggctccaaaatcacattaaaacatatgctagtgaattaccaataatttgacaaatatgttaaattcacataatttattgagagaatggaaatcatgactcgtgactcatgactaatgactaatgagtgagtcttgttgttgtatatagagactatatattcatctgaataataagtttctagaaggctgaattttgataagaggagcataaaaatgactgatcacacatcgcccactaaatacgcaagtgagtgagtgatcggagatatttacggaggaaagagcgggaagggagtgggtataaaattggtggctcgttcggtggttgcattattctgtccatgtgggccaacgtaccgcactttgtctctgtatccgtcattgaggatttttttgtttattttattttcccatctcacttatgatttttgttattattaatgattagtgatttgttacttactgaagcaattattttgtcaaaatagagactgcttcacataacacataaaaccaagaactggtgtcggatattcacactctctcattcacatggagaaccaaaaaccaagaacatacgtccatcttgcattaacgataccgtgtgtcgtttacgataggcacaatatatacatatatgtacgctcataccaaaaatatcgagatgcactaaccaatgccatatataacatgagcattgagcacaatagtaggatgagttatgaaaagaaggaaaaaaataatcgctactaatccaaagcaagatgagaagatacattgaatttcactttaaaacgagcacttaagctagtgaattaccaataatttcattttggtttaagaaatttcaaaggacaaaagcacctttaagattcacttctctttgacttttgacagtacagaagtactagtacaatatttaatctagggatcttcatgaatgatgactaatgagtagtatgatagtcgatgatgataacaatgtttgataatttgctttgtcaattttctcccaaaaagtctttgggaataaatcagtcaactcaagctcaaaatctaacacgcgcgagacaaaaacccgacccgtgacccgaccaagtcataagcgacccggaaaccttgttgctgtatgtttccaatgattgacaaactccccatagttccggcaaacgcaaaacagaaccgtccttcagtgttaaccgggatcagataattactcgccggaagcgaaacctctccgcctccgaaatgaaacacaaccgtcggaaccttcacagtcgtcattcccgagagatcaaaacacgtgtcgaacaaagaatacgatggagcacgtttcagcttcgtagcaccaagtctaaaagcgtctctaagcgctacgtaagcaggttgcgtcagccgagtaaccgaagtaccggaatctataatgacaccgccgtttccggtggcgtcaagcttgaactgcgactccgaaacgccgggaacgcgcgaaccaccaacgctgattccaagaagctgcaagtaataaaacgtgtcgagtttcgggttcgttagtaacggcgtgaaaacagaggttttcggaacggcggcgtttccaaacacgattgttgacggtggtttagaagaagaaccggaactcgtccggtcaaccaaacagtaagagaattttccgttataacggtttttcgtctgcgacgggaaagataacccaccacggcccaagcccaaaagcccagccgcaccaacgaacaagccttcgttatcgtgaccgcatcctaacggcacgtgatcaacacgcgctccatgaaacgtcagcgtttcagttgagaaatctccttcggtgaatgatccgtcaccgtacgatacttggtagagacaagtcttgcttcgacgagtgacacattccgacgagtcgtctagtctccggcaaaggcgagatccacatggtacggtggcgaaagttttggatttcttcgggtcaaaaatggcgtcggtctggttgtaacaggctttgcaaggagagcattggagccaaacgacgtcgcttcctgtgtcgagcaccatgtaaacgttagtcgccggagttccaacacctaacctcataaaatactctccgcttccttgtgagaggccagagataactgcgccgctaaatccaccggcggtacgtggagttcttttcgtagcatttcgtccggttgatacggcggcgaggctggtaatagatttgacgcggagagagtctcgttggagacggaggttgaagaggtccgccggagatgcgtcggagaaggaagacagagcatccacgtgtgataaatggacagagagtgaagttgtggactcggataaagattcatcagttaaagattcggactcgggccatgagagtgttgcggaagaaggaagagtgttgacgacaagagtttggtattgggaagaagcagaggaggtgaagaagagaacggcaaagacggagaaggcgagggtattcaagactttgcgctccattggaaatgaaaatatgaggattttaactattgtcacatggatcttatatagactatagtctgtctatctatctactcaaaagtatacaaaggcaaaatgaagctcgtgtgtgaaagcacatagtttactttaattatgtaataacgactttgttttttctttctttttctttatcattaccaaattattgactttattccccatttcctactgacgaagtaatggagttctaattttgtagcttggaatatataagattattgggtgagacggtgcaaattggttccatggtctagtggtcaggacattggactctgaatccagtaacccgagttcaagtctcggtggaacctttaaattagaatttttttgtttccattgtacacttttagtattcttgatgagactttagcccatattttttgggggcagggtggggcttcaagacatagccaaaaaatgtctaagaggccactgagaattatctctaaagcatttgagttatgcaataagccaataaccaataaggatagataaactatgtgggctcgttgagtttatgtacttaaggcctgatatctcccttcatgggttgtaaaatttggagtccatcatattaaggattaccggaactagcagtttggcaatttagttggatttaatagtttggagattttgtgtgaagcaagcatacagaaactatgaagataatacttggggtttgtatatttttgaagggttctttacttattttatagaagaaatacgacgcttgctaaatatagcacgaaatatttcaaaagtctgcataaaattcgaggaaagctccatttctaaaattaaaaaacgaaattttatgatatacttgttaattgaaaaaatcagtttaatttatttgcttaacgagataatagaataactaagaaacttaaaaaccagtggaaggagaagtaggtggcacacatgctccataattgatattaaatttttgccagtattggattttaaaaactctttagaaaacaaaaaaagtggaaacttgaggagaagagatagctaatgaacaaatgagaatgggagcatgaacacgaaagcccctatctactaatctagtctagtttattaattagttacacctaatcgcctccatttctcattgtcatctcccaataatttcggtttctaaagtccatagcctatataactcatcctcacttggtccctaccctctctcaattcttttcatattaatcccctataatttcactgacatattcatgtttctagcacaataatatgttatagttaaacatttattgttagagtgtttagttgctatatagtgttaattttcaatataccagaaaagatttaaacgtttacaagtaaaaacttaaccagaaccagaaggtttatatatgcagggacaaataatgggggaagaagagaaattgaggcccatcttcgcagagtctgatcaagagatcatgtgatatatctatctttatggtcccctctgctcttatattattattcacctttttcacatcaatctaaaactgaatttatcactcactcacggattcactcaaagctacacataaattttaatttatagtgtataattgaatccagaatcaaacatatatatgtgcattgtttttgtcttttggctgttctttactttccatttataatgataacaaatcgatcaatatcccttgtcgaaattgtgatgtaacattcacatttgattaactgaataaaaatgaaaacaataaatatagattggtatatccttggagtcatacctaactatttttaaacaaatttaataaaagagaacattaatggacgaaaacacagaatctcacctaagttagtcctatattggtcagaggaacaatgtttggtttttttcataactactggatttaaatgtggtgccatgcaagtatcattaatgttgttttaacagtgtattgattgtatcaaacattagtcttgactcttgaactcgttcaatgagattgtttttatataaagaaaacgtacggagtcttttaaatagtatactttggtaaaaggatctcgaaaagattctcccagatgggagcttgaccttacggttaagtgggagtgaagtaggtcgaaagcgacccttgggactgtacggacgattttattagaattaccaaaataccccttaataattgacaattcctgcgacctgcgtgagtctccacttcaggtttgggatcgaagaagcggagaaaagagccaaagagtgcgaatgatatgattacaccatttgcatttcttttagatgtgtctaatgcagaagtcccaactttttcatatttggaaagtttctataattcaactcttattcttttttctctttttttttgtgtgtatacactatgaaccatcagatttgagcaaataattaatctgatctataacgaatggataataatacgtatgaaatttctacaaaatatttatggctattttttttttgtcaatgaatttgtggctaatatttatcaacctatatcgataacctatatattgaaaattatatcaacctatatattgttgagaaaataaagaacaaataaccttatcgatatatactacaaaagtaatgatcatatcttatgttccaaataaactgtaatcatacggagtacaaaaaagacatttaaaaaaaaaaacgtaatcatttgagccaaataaactgtaaacatgttaaatatacacacatgcctgtattttacgattatatatacatgtcgtgctaattagttttgttatttaattaataacatggaatataaaagtttgaatccgaatggcgagacatggatatcactaatacaaactactaaaattttaagtaattgtatagtacaaaaatagttttttttttcaaatactttttaagttttttttgcacgtaatgctttcataatttaatttcatcaaaaggaaaacatttccctgttacgtatggaaacaaggaaggatctgattacttaccctaatcgaatcaacggatccgatgcataccgcatggggcatacgcatagagagcttttaatttgtagattagtattattgactataaagataatcataattattggtcattagcaaacttagagttttaagacaccttaccctttaagtggagggaagagtcgtttttatgattttagcacagcttaaaattattgtttactattgtctaacaagacctatgctaagatttattaaaataattacccctaaaatgctcttgttaaggctccaccaaaatcaaaagaaaacaataaataagtttctgcttatataaaactctacaaatttctgatgttacgtatattgtatactcgttataagcaattaggcataatggaagacagggacgaaatgtggtgtacggtcaaatagtaaaattgtacaaaataagtttggtttgtggaaagtttgaaagttcaattattgcaagaggttgaaggtaaatacgacagttggaatcaaatgttatttgcttgactgggttatcaacctaagcaagaaatttggttcttaaaacaatctaaacatattggtttgattagtacttcttaatctttctgcaatgataagtagtgtactgttgataaccataaccttatagtagaagataggaccatgttggtatttttccacaacttttccttctctttttacaattcataacaaatgaatactgtcgattagttcaatatataaatataagtaatacaaatattcctatattcttgtaaaatgacgtggtgactatgactaaacaggtgattaagtatattatcaaatatatcaatggaatataacagtgattaagaagaataaacaaaattaaaagattttgtggaatggattccactaaaccactacgcaatttaaaaataaaaatacttaactaatgtatagttatttattcccatccatgcgttcatattcactttgaatgatcatattcgtaatcctatttatttattttactatttgaaccttttgtgtgtataaataatttcaactagagagaatatccgcagcagctcgttaaattagtcattgaattaaaaaaagatattcaaattttcacccaagaaaaacgaacgcaactaaaatgacgttcaaatttggcatcatctttaggtgtatattattgtgagagatatgcaagcatgaaatctcatgcaggataagaatcattgttaaatttattttaattccgttatatttatggtaatatcatcctattaccttttctaaaattatgtttcactctttagttcaacctttggtgatgaaattcgattctttcatatctcgtctccgctttgcaaggatttgtccgtacaataatcatatgcactattttaattatttttttgttgggtgggattcaaaaaagttttttttacccctctatcagctagttagagaagtgagactatatatgattccaatcaataatacatcacatctatatttcgtcttgtaacgcggccacataatcttcatcaacgaagcttgaatgttgtaatagtgtttcactatcaacaacacacatttgtaggccttatgtaattagcgagagaactctacagtctacactataactttgagtggaaataaatactcgtatatggtaacataaaaatactatgaacttatgattatacaaacttgtaagtaaaaaagagtggtaaggctatgtaatatcgtcgacgttttctaggtaaatcttaagctataaaaaagattttgaaacccaaatagtatcgagtgatagcattagtctcatcgggtggttacaagccaacattgattcgtgttgcaaattttattaaatacaagggtgtacacaaatcaaaacgcaataatatttttggatcatagtctttcttcactatcattgggaaaaataaaataaaataagaaaaatagcgatagaatttcctctgtaaatgagcaaaattggtaggacaagtcagcatttgacacgtgtcggtcatgaatacgactaaacagcgtggcaatttctcttactctgacgtgtccatgtggggaccactttctcctccgacacttcggcatggctttctcaactttttatcactcttcttcaccattctcatttactaagcgcgtgtctcccacctctatccgatttaattttttaaatttgacgtttcaaaagttccttctataaaagcaattaacgataattatatgaaatccgtaaacatgaatttttcaaataatttcgatttttgatttgctaagattaaaagcgcgtgaaagaaaaaaaagaatacagcatgaacaccagcgactcagaactgactcggcacgtggtaacataaaactcacacgcttcccaagacgctcgtcccataaagagtcatggctgtgaccttgtgcgagtgtgggtgtagccatagcctttgtgggtcctaaataaaaaaaacgatcaatggcataatgtgtaattaactcacattccacagtgttaaataaaaattaaatctgtaacggaaaaaacaatctatctgatgttacacaaaaaaaaaaaataacggaaaaaagaaaatgtggccggggtttaatagagaagccgacacgtttgcctgccacgatccagacacaagacgatgtgggtaacggcaccgtcaagtgctaacggcaacggggtcatcagtaaaaagggcaatttagggatatagagtaaagtcataagcttatttattactatcgtcttgatcggacggctgagatttgccctctcctttaaatgcaccgtacgttttttttttacataataaaatgtaattagttcataagcaattcccaaaacgccgcgtgacccttcgtttgcctttgaatacaatttgttttattttagcgcatttaatatatttgagtttcctttttagcgatgacatgataaaacaaaaaacaacaattttagaaaacatttaattaaatgaatagaaaaatagggagattcaactgaagttactgtgggtggaaatgacaggtctccaggatctgaactaagagaaagtctctctatattttgatatatagagagagataaagaaggagagagtgtgaatatatgtatgtgcatgatactgtgagacttcttcagtaaaggaagcagctttggtttgctgcggatcgggataaaaacggcgagaagtttgtgattgttgaagcaaaacaacacggaatctgaaaggaaaggagaagacaaaaaaaaaaaaagattttaagaggaagagagagagagatcggtttcgtggctgacggaaaaaaaaaggggagagatttagttttatccaacagtgcctgaattacgttctgcaatcaatacggacataaccgtccgttgtgtcctgtttataaagttttgctttttttattttctccattgatgggtcttttctttcttctctctctcgtgtttctttcatggggttaagactagtgtttaccgcgtgaaggtttttttttctttctattttctttcatttcctctccttctacttcttcttctccagttctcatctgggttcttcaatggcgagtgttgaaggtgatgatgatttcggaagttcttcgtcaagtgagtagtaaaaggctgagactttagaaagttttgtttttttttttgtttctaacagtgactctgtttggggttttactctgtagaatcaaaatcagctttgtaaagtttcgatttttttttctttcattttctcgggagacgagcttagaaagaaatagaaaaaaccccaactttcttatttttctcgtatagcttcaaagttcacatttttgttatagttttgccgcggaaatgtgactgttagggttttgttgttgtttgattttagggtcttatcaagatcaactatacacagagctatggaaagtttgtgcaggtccattagtggaagttcctcgtgctcaagagagagttttctacttccctcagggtcacatggaacaagtatatacccacccaaaaatcatctctttttaccccaatttttctttttccattctctttctaaattctgggtttttttgcagcttgtggcgtcaactaatcaaggaatcaattcagaagaaatacctgtttttgatcttcctccaaagatactttgtcgagttcttgatgtcactttaaaggtaaagttggatcataaatgttaaaatgttttatttcccctgaatctgttaactaaattttgatttataggcggagcatgaaacagatgaggtttacgctcagatcacattacaaccagaggaagatgtaagttcttaaaaaaaaaactcaactttatttcagtgagtgttaatttatattgattggaattgatttcaatttactgttttgtttgcagcaaagtgaaccaacaagtcttgatccacctattgttggaccaactaagcaagagtttcattcgtttgttaagattttaacggcttcagatacaagcactcatggtggattctctgttcttcgtaaacacgccactgaatgcttgccttctttggtaaatatattcttaaagaaaccttctcaattcaagaaactttagcttgaattctcactccaattttacactttttaggatatgacacaagctactcctactcaagaacttgtgactagagatcttcatggctttgaatggaggtttaagcatatattcagaggtattgattctaatcttggtgtgtttttgtgaaactgtgtttggactaaatgagacattgactcattgagtgccgtttttggtttaggacaaccacggaggcatttgcttactacgggttggagtacatttgtatcctcgaaaagacttgtagctggagatgcttttgtgttcttgaggtacttttgaaattgaaactttattcactggtcttgtttagtttcatgaacctaaatgtaatgcctttgtgtttttcaggggtgagaatggggatttacgggttggagtgagacgattagctcggcatcaaagcacaatgcctacttcggttatttcaagtcagagcatgcatttgggagttcttgctacagcttctcatgctgtgcgtacaacaacaatctttgttgtcttttacaagcctaggtatatagtaatgttctttagatgattttgctttatatacatagatggtttaggactctttgattgaagaaaagttttctctctttgcaggataagccaattcatagttggggtgaacaagtatatggaagctataaagcatggattttctctcggtacccgattcagaatgaggtttgaaggagaagagtctcctgagagaatgtaagaatccattttctctgatcatttcttttttgtcagtgttcttgattctgaaacctggaacgtcttcagatttactggtacgattgtgggaagtggagatctatcttcacaatggccagcttctaaatggaggtcattgcaggttcagttaaccattccacgttcttacattttagtgttttacttattacgtggtctttatataacgtttttgtcttggtctttcttaggtacaatgggatgagccaacaacagttcagagaccagataaagtctcaccatgggagatagagcctttcttggcaacttccccaatttcaactcctgctcaacaaccacaatcgaaatgcaagcggtcaagacccatcgagccatcagttaaaacaccagccccacctagtttcttgtacagcctccctcagagccaagattccattaatgcatcccttaaactgtttcaagatccatcacttgagagaatttcaggtggatactcctcaaacaacagcttcaaacccgagactcctcctcctccaacgaattgtagctataggttgtttggatttgatctcacaagcaattctcctgctccaatccctcaagacaagcaaccgatggatacttgtggagctgccaagtgtcaagaacccatcactccaacctcaatgagtgagcagaagaagcaacaaacatcaagaagtcgaactaaagtaattttctttatcaactcatataataacatagcaacaatgttttgaaaatctgatttctttgatcttggattgaaaaaggtgcaaatgcaaggcattgcggttggtcgtgcggttgatttaacactgttgaaatcttacgatgaactgattgatgagcttgaggagatgtttgagattcaaggacagcttcttgcccgagacaaatggatcgttgtcttcactgatgatgaaggagatatgatgcttgctggtgatgatccgtggaagtaagttctaaaataacagagttaaacatttccggtttagctcaaatcagttaaatgtgaacttaaaccggaactgattttgcaatgttctgttgtgtgggattgtgcagtgagttttgcaagatggcaaagaagatatttatatattcgagcgatgaggttaagaaaatgacaacgaaactgaagatttcttcgtcgttagagaatgaggaatatggtaatgaatcattcgaaaatcgtagtagggggtgagagttttagctgttaattaaggttaattcggcgacgtcgttttagtgcgtaagtgtctaaagactttttttttagtctgtgtatataaagtcttgtcctctttttcatgtcaatttttcaagttggcgatttaatatttcggttttgggacagtggttgatggggcggttttacatcttttatgtgtatgtacttgttccataaccattcaattttcaaaaccaagtacattcaattagttatgggttcaaagattatatttctaatcaataattaaggcttaaaaaaaaaaaaactacagtattagagaagaatacaaaatacgtgaaggcgtggaaatcaacgcggcgggcatcatatgaaagtcatggaaaagtaaaggagtcaaacgactagttaagattctcttttggagttggtaaaaatatttgtggattaatgaacttctaggatatagtgttattagaaaattgaactgaaatcgaaaaaaatgaaaactaaactttggaagttcatgttatcgtgccaaaaataagtctccatgatgttctctataaaaattcttaagttttaatttccaaaccttttagctgcatcagatttttctttaataaaatgcaaatgacaaaagaaagaaaatctattttgttttcggataaagtcacatatgaagtgtatactgtagttgatatttgtcaaaaaaaaaaatattgttttaaacttttaattcagatttgccttataatgaagaagaaaacaatacaattattttcaaacttagtattggtttggtggtggttatgtacttatgtagtatggagcaactgttttttttttgctaaagattaattgtttttggtatggagaaattgttttactttgacaaaaaccaaaaaagcctcaagctaactaaactgaatagattttggagctgtagtatagaaaaaaaaaaaaaacatttttctgtttggataaaagatttgtaaaaacatttctacctttataaatgatataaagtttcagtccgaacaaatcatacaaaacgaacatccataggaccatcatactcaaagtatgagctacaaatatcgtactccattaatataaaatcaaacaaaacttaaattttcatacatatactaagaaattaataggtgacagaaaacaaaattaaacacgatcgtagttttagttgtagtcgaattaaatctgactaattttcctcaaccaaagagtacgggtttgactttcagttcgaggaatggttatagttaaacagcgttgcatcttcaatgacaattacatatatttaatccattgtcttcttcttcaaacgaatcataataagcagaaacaagaaagagatatggttaaaacccaaaaaaagaacaagaaagatacaagttttgacgcagacgataatgagacgatgataatcatcacatcgaaacttcaacatgtattagccgcgaaatcgagaaggctacaatacttatcatcaccggtaacgactaaagacgtgtcattgtcactcatgtcgtcccctgatgattcactctctcgcgcttcgattcctttctcatgggaagaagaacctggcaagcctaaacaccatgttcgtcatccttcttactccaagtgtcttgatttgccaccgaggatgctctttcctgacgaatttaccaaaatgcctcggacagcgaatcatggtcgttatctcgccgggtggaaacggtggttccggtggaagaaagagagagatggtgatgcttatgtggccggaagtggaagttatatttatccatcggaagatgaagatgataccaagaccacaagaacaaaaggtctccattgtttctcttacgtcactaggtgttacttctgggtaaattaaccttaaacttcattctatttctttaaaaaaaaaattctcttgtcttgtcagaaagaacatgtttgtatcttcttttgttttgcacgaagttccatggaagaacaagaagctgaaaatgaaagcttctgtgagagctttttaaaaaaataatacaaaacaatacgccgtcgtttacttgtatggaccatacttactcaattatgggcttttcttagtctatatactggcccaacaccttaataattgtcaaattattttatgatgctcgagctggattcgaatgtatagaagataggatgttgcgaaaaggcaatgtgggccagtaaaatggacaaataatgcataagatgtgatcttccatatgcgataatcattacatcaaatggtcctgcgaattattttttgtataaaaaaaattaaaaaagtttcgaattc

SEQ ID NO: 1097 - DNA, 80019 bp, Arabidopsis thaliana
gaattcgccagacacaaaaaacctgttagaggtaaaccactctcaccaccctttacaccctcttaagctccacataggtcaaccaccagactattctgatggtaaatgtcgtctttgcgcacaaaagattaaagagaaattgttttatcattgttccgcttgtaacttcagcttggatatggattgtcttttaaacccaccaccacagtctattttggatttgaaagctcatgctcaccaactcatctttcgcccaagacttgattcttttacatgtaatgcttgtgggttaaatggagatcgaagcccttacatatgtgttcaatgtgatttcatgatacatcaagagtgtttttcccttccacgcctcataaacatcaatcggcatgatcatcgtgttgctcgcacatctgttcttggtgttgtgaattctgtatgtggagtttgtcaccaaaaggtggattggacctggggcgggtattcttgccagaggtgtcctcaatatgtcattcattcgaaatgtgctactagaaatgatgtgtggaacgggaaagaactcgaaggagtccctgaagagatagaagatataaagccatacgtggtaatatatggcaacataatacaacatttcagccacaaagagcactaccttagattccatgttaatggctttttccgggatggaaacaagcggtgcagtgcttgcacctaccccattggtctccaatccttctatgaatgtattgattgtgattttatgcttcaccaaaactgtgctgaatttcctcgaaagaaatggcatatgctacacaatgatcgacttacattagttacaagcgtagccgaattcttttggtgtatagcttgtagaagaatgtccaatggtttcaagtaccagtgtgggtatggggtgttagatgttctgtgctgttcagtttcggagccgtttgtccatccaagccaccctgatcatcctttgtattacattcgacaagtgaaatatagacaatgctatggttgcaacggtcgaacgtataatgtgctgacgtgcattgaaagttgttgtggatttgtcttatgcttctgttgtgccacattaccacaagtggtaatgcatagagtagacgatcatcctctctcactatgctatggcgaaaaggcaagtggcaaatactggtgtgacatttgtgagaaagaattgaatccaagtacatggttctacacatctaaagatcaccgagctagtttgcatacaaagtgcgtgttaggagactttgcagggctcatgccaagaagcacaataaagtatggcagcagatcatatgaggtggtgctcaataatagtgtatctcgtccattttgcagggtgtgtgagtcgcattgcatgtaccctatcagcttgaagatgcttggaacctctgatccatatatttgctctttaaactgccaaaagcgtctcaactctctggacaacttgacgaaaaaggtgatgatagatcgttaaactttcattttagaatacaattattcttcaataaaaggtttatttcactatgagttgctctccttaatgtatcactagaaattttaatggcatgatttcaaccttcatatgataagttatctagaacgtacatttggaataagattttgtaaagtcttcaaagattttgaacatgtccacccactgaattttaaggttacagacttgttatgttacatattgttttttggtagaacttgttatgttagtatgttacacatatgtagagacatattatcttcccttttttcttaatttcatttccttaatttcacttgcatatatgtcatatcagatctcttatgaatgttgttaccatagtaagcaaatattagtgagtataaacgactaaagagtgagtcttttttttttttactgggattcagctggaggctctatatgttttgaaaacaacaaagaaggagtctgatgatgacgatcgaacgcaggtattttcatttcactggcatatgtgtcattcagagctcttatgaatgttgttgctctgtttcatagtaagcaaatattagtgagtataaacgactaaagagtgagtttttttcttctgggattcagctgcaggctctattacttgccgaggaaacagcaaagaaggagcctgattatgcggatcgaatgcaggtattctaatttctgaacattgaaattagtttgttggattgcaattagggaatgtctatgactatgtcgtgtgtatgttctggatgcagttgcattttgtgcctttagtaagctgctcgatatgcaaacgtttggaagttgtcgtgaacgatatcagccaaactgggcatggagatcgctataaggtttttcttcttttccttaataagcaagataaatacaattaactaaacggacataagaaagagatggtactagtgtgtatatataagccatggacatcttatagattgtaacatcatgatcttcttctcttaggggggaaataaataaatcctaataatcacattttgattttgtttctgcatctagctggtgtgtatgtactgtaaatattgctgctatgcctcaacgaataaggtactaactctgaaaagacacatatatggaggatttgaagaccaacgactcgaaccctgacaacaatcctgaagcctccaagaaacaagagtaaaggggttccaacttttaactttatgtttagagttacgagtctgaattcgtcgaacttggtttcacatttaaaagttgattaaccttatgacaacaaaaataagactttggtcatgggcatatatcaattgtctctctctcttatagaacttattttgatgcaccatctttatcaatcattgtctttttgtctttgcaacattcatatctctaagtttgtcgaccatacattacctaagattccatgttaatggtcttatctcagaggaaaacaattaaacaagcgttgcagtgcttgcacccactccattcatctccaatcattctatggatgtatcgattgtgattttattcttcaccaaaactgcgctgaatctcctagaaagaaatggcattttctacataatgaacgtcttactttagttacaagcaaggatgattactttcactgcactgcatgtgatagactcttttccaatggtttcaaataccagtaaggggatatgaagttagatgtaatgtgcggttcaatttttgaaccgtttgtcgatccaagccatccctatcatgaatcaatgatgctatcggtggacaaggccggaaactcgagaaaattatgaataatatactgaaataaaacatgaaaattgctttacttacactatttttttgttcttaaaacctaatattagcttcttatttttttccaatttatattttgttggttgtccgtgtctcaaaacaagtgcattttggtactaaattttcagaatttggaaattaccaataataaattatgtgggatattaaataattagagaaataaaatgtaatactttaaaaaactattcgtcaaagtgcgccgtagaggatacaaatgcaaaaagtcaatagaagatgcatgatgtagtaaaaatgtggacataacataccaaaaaaaaaaaatgttgacatgattgacatttaaaattttattttaaaagaggcacgcagacaataaataaaataaacttttaagagaacctcgcagctgcacaaagaaatgttgattagttttttttatataaaaaattattgtaaattagctagagaataagttcattacagatataaattaaaaagatttctgaagatgtgggttttagataaatcaaattaaatttaaacgaaattgtatatgtatatacatgtttcccaaatgtgaactgcaaaactagtgaggggcatgaactaattataagacaacgaacaagtaaaaaaatttgtaattataaatctcttaccaaaagtatatgaatggcacatttcatgatgaacatggtagtatggtacttatggaaaacaaatcactagagaacttgaatgttttatatttcagcattattgttaaacacacagatgaatcaaattaagtccggtgtatatttcagcatattataatatgatttagcaaaaactaaatttgagatttcaaagagaaaggggaatcatagtatacgcggtttggcatatatcgaaacgatgccatgttttaggtctattaattcaaaaatttggtgagtgaaatatgcgaagactacactcaacactcatcctggaaggattagttaggtggtattcgtaaaactttggatcacctctgatgatctgagaacaagaagctgagaaaaattaaagttattacatggttgatactaaagtatataaaaaatatatatatatagtagatattaatatagatatctaaaaacaatttggatggacatatatgtcgacatgcaaaattaacgtggcgaggagtttattgagtaagcttggttctacacttctacttcctcattagcaaaaaagtcaacaatactttacgtatataaatactctcttcttctagttataagctgtgaccaaaacagttttaaatacatattttctcttttgaattgtaagaagaacaacatatggcaaagactcaaaactttgtttgcttcaccgccgtcttgctcatcctcattttggtctcgaccggtaatttggtcgaataagtcttttcattctatccatatctaaatgtcatcatatatattggtatatacatacgtttttccctaatgctaataattgttcaattttgatatagagataccaatgattgagggaaaaacatgtaagctttttagaggagaatgtcccgtggatccgtgcgaacctgaaaaatgtgatgagtgttgcaaggcaacgtttgggaaacaaatttgtggaaaatgcgaacaagagagcactgaattacattgtcattgtcgccgctaagcacttgatcataatctttgacaaacaagcctcttatgtactaaatgagaaatgatgcgactttaactcatttcttgttatctttgtttttctttttattttggtgtgttgattttgattcatttcgtgtggtatttccctttttttgtttttccattgtgtgtaaacgtataacgtattcatattgcgtgctccataataattatgtacgttcaatatgattttattggatgtgtgtttgagaataaacttaaacgaataatcattatttgcgaaaaaacaaataataataataaacagaaaacaaaagttgatcatgttttattagttcataagttttttagttgcgcaagaagtgttcttgtaaaacactagttgatgaaatgtatatactaaattctccctaatacactatacatatagtaacatatccattccactatatcatatatagtgttacttgtcaacactaatatatttatggttttcgagtttacacgcatattaattttagaaagaaggaaggtttcacagtaataaaaatgaagtaattatctatttttgtaaactaaacttcagtaattgttcatttatgcaaatcttttttctctatcatgcatgtaatcggaagcagatacttaaaaacgatctaaaataaacgtagaaagtgggtaacgtgtgttcgatacaagttatgtatatatatattgtaagagaagaatttacagttaacatcatgacgttcaaaatcaaagttttagactatcatcttcatttacaatatactttttgatcaaaaccatatttgaaaacaaaatattgtttgaaacaacacattcactaaaatattaagcaacttaataaaaataaacatcataacgttcaaaatcaaaggtttagactatcatcttcattttcattttcataatcagttccatctgatctaggttacgtttgtagtgattagaaaaaaaaccgtgcataacgttattcacgtttgtagttaacagatattttcatcaaattaaatatttttttaagtgtttcgcaattatttctttattacattttaagtaaaatgcaagattttgtcgcgtttccgtgatacaattggaaatttctaaagtatttccaaataagttttttatataagaaacattttatgcaactaatatttttataattgtttttgctttaaatgcgtactaattttggaaagaaagatagtttcacatgaattaaaatggaatactaaaaaccccgtcttaaccgtaaaagacggtttaaaatatatagacggttcacgaattatatttttaaactgcttgtacgtattcgtttttaattccatgcaagatatagtaaagaaatttggtatacatgaactattttaaaattttggtttcagaaatagatagtttaaaacttcatatatgatttttgatcgcaagcaaaagaattattttgttaacaatcatatttctgaaagttttaaactatctatttctgaaaccaaaatttaaaaacagttcatttataccaaatttatttctttcctctatcttgcatggaataaaaaagggatatgtacaagcaattaaaaaatataaactgggaaccgtgtatatatatatatatatatatttgggtaatattagaaactaactatagaattgaaaagaataaagtaactaaccattgtcagtttttctatggataaataactatataacggcataagaaaatacaaaactatccttgcaagttgaaccaaaagcaagcttatgtagatatatttgatgttttttagtaaatcgcatgaaacatgttaaaatagcacgatatttataaaaacgatgatattttataacgtacattttacacaaatagcatgttatataaacaaatatcgtttcgtttgaaaagttgaaccatgagcaagcttacacgaagataaaataatagatttgagaaagttttaacatttaaatcatgtttttagaagaaattacatgtgattttaataaataatgtgttatatgaaaaagtagcatgttgagagagagagatttctagttatcacgtgtaattcgaaaaagtagcgtggtataaaagaaaataacatacaatttaaaaagaaaacataacgacggagattccaagaaataatcaaaatcaaataaaaaaatgacaaatcttctgcaaattgaaggagagatgatctatcaatataaataacgtttggcagcctagatttatcgaaaaagagatcaggtggttgtgatggtggaagatgtggtagttgtggtggtggaagaaagaaagatgagatgattctaagtgttttatatgattttgaaaaatagcatgtaatatatatatataatacgaaaatgggtaaaaaggtaattgcaagtgaagaaagagagtgtgctctgacaccatggctattttgttagttcttttacaatccatagtcatctagtgcatattctctatattaaaccgtcttttatgtttaaaagagtttttttaagtatttcattttaactaatgtgaaactctccttctttccaaaattagaccaccttcttcatttttatttgctattttcttcatctacgtaactatcgtcaacggcatccgtattctctgttagaacatgaaataaaataaataagatttacgcttcttgactacaaacttattgagttacttttttagcaaaaaaaatctctttactcatctaaaaacacaacacccgattgaaacatatcttaacctcagaagagactaattctacatcttttatacctttactttctccaggatcaaaaaattcaatacaatcacgtgtatccagcatcaacgattcataaacataactcgaaaaccacttacttagatcgttctatctaggttacgtttgtgccgatttggaaacaaatttaatgattgatattcatccagctaaagtaaagagattctgttacaaaatacaaactatacttattttttaaaattatttatcaactacgattccaaataaaattcaagaatctgtaatttcaggtttgaaaataagccttgaggaatcgacattgtatatggttgggttaagagatatagacaaggaggaaattctaaactcttttccttttgaatctgtttgtcttcccatccgttatcttagtttcccgctgctaactaggaaatgacgaggaatgactacactccacttctaaatacaaagaaggctaaggtcgcgtggagttgacgtttgtacaacaaaagctgaaggtggtctaggcttgcgatcattaaaggaagcgaaaataaggttagttatctaaaactgttcatttggagaatactgtcagccaattctctttggatacaatggttgcggctctatgtactacgaaagggttcttctttatcaattcaagagacttcaacactacgttcgtggatggatgtggaaaaagcttctcaaatattgtggtttagcttctgattttgtgaggtataaggtgcaaaatggaaagagcattttattttggtatgataattggtttccacttgatcaattaattgagatcaccggttagagaggttgtatagacatggggcttggcattcgagctacggtgcctgaagcgttagcgtcccatagacgagcgtcataggactactcacttaaatcgactggagatcgacaatgctagaagaattttgccataaagggctgctagaaattgaagatatagtgctttggaaagaaaaaaggagatcagtttaaagtagattttagcacaaagggaacttgagagacaacacgcatgtcaaagccaaagatggaatgatacaaaggttttatagttttcacacgccacgcctaaatactctttcttcgcttggcttgtaatacacaatcatttatcgacgggagatagaatgttacgcttgaatgtcggtgtaaactcttggaaactcgaaaccacttgttctgcatgtgtcgctattcaatggaggtattgtttggactcactaccaagctcctttccacgcgattcacaacagtttggcatcatgtcctcaagctcctcatggataattccttgggacatatgatcgactatttctaatgaggtatacgtttcagctttcaattcatttgttgtgggaagaaaaaaacagcagaagacatggtgaaactccaattccatcaaacaaactagtccaacgactagataagcaaattcataacatgatatcgtctattcaagagcaaggagatagaagatatgaaagatgtatgacgacttggtttgcatcaagataaaaatgacgttttaagtaaactctttgtgtaaatgtatcttaaaatcatctaaacaactattgcacttgttgtaaaatattttttttttgaataaattttacattttatactttcaaaaaaaagtttcataaaattactttctacatctttcccgtgtttccaattttccacaaagcattcttgaagctctttcgaaacataaaacagatttcgaacagagtttctaagagcaaacaaaatacatatgcttatttccgttacacattttctttggggcataaatctaataacctttaaacatttacaaccaaatcaaaactatatctaaaagaaatagaagaataaatagttggaaaacacaaattcaacacataaatattaaataacttgtttagaccaccatcttcattctcatttttatcaattccatataaatcacgtttttgtaattagaagaaaaaaacatgaatgactgctattcatcaaactacagtaaatagattcttaagttataaaataccaaatcaaattcaagattccgtagtgtttcagaaatgaaaatcgaatactttatgtagtgtgtccaaattacgtttgataaaaaattggatctcggactaagttttcatgactaaaatacatatatctagccttattactgtacacattttctttgggggtaaggatctagtaacctcaaaacattttctcaagaagatgaattatttctacaaaattacaaaatatttatttcctactaatacatatgcctttgcattaatggatatttgactaagttgtaaaagagtgattttctttttttatgtttcaaagctgttttatttgaaaaataaagtttaaactttaaaattcaatgtttcattagaaggacaactaatatttagcttaatttagttggctggatactaattcttatcccctttacaacccaaatcctaaatattgaccaaaataataccaaaaaatgggatttacacataattacatgataagaaagttgaaaacattaaataattttcaaccctcaaaacatagaaaaaaatcttgtccattttatatacaatttcctacttgataccattttgagaaaccctagattaagcaatctcaatctcaatcaccaccactcgacctctatataaacataaacctagcaatgtatttttatcatatctcagattaagttttctcttttatctttttataacccaaatcttaatattaaccccagattaagatttgttacaaaaccaaataaacaaaaacagacaatggttcaagtgcttgcatgtcttttccattgatctcaaaaaaaaattgtgcctttttgtcagtatttattttgtcacttctgtaacaacaatggcggagtttaaacccataaggtggcttctttaaaaacatatccttttcgcgtctgcaacagaaatctccaggtaaaaccaattgagcaacaacaattcgataaaaaaatcagactttaaaaatccaacctttaggctaatccatgtttgtttgtttgacccatttcttgaaattaactctaattgtatttgtttggcttaggttattgaaagaagagacctttcttgattagagcaatgaaattgaggtaaagggtttaatggcaggatgggaagttttaatgatacttcatgttcatatgttgatgttgagattaagtatgttgatgaatgtgaggagaggttaaggagattgtttgatcaagctttgttggtttttcttgaggaagagggtagtataaagcctctccctgcagttataggtgatggcaaaaatgttgatttgtttaagctgtttgtattggtgagggagagggaagggtttgatactgtgtctaggaaaaggttgtgggaagtagtggctgagaagttaggctttgattgttcactggttccttctttgatattgatttacttgaagtatttgaaccggatggagaaatgggcggtggaggaatctaggattgtgaattgggataataaggatagtgaaaagaaagggtgttatagtggtatgttgcatgagttagggaatggttttaagagtttgttggacaatgggaagtgtcagaaacgtaacagagctgttgcgtttggttgtaaccatatggaagagtcgtgttcagagtttgataggtctaggaagaggtttagagagagtgatgatgatgataaaggagtaggactgtctagtgttgttattagggaggagactgttgtatgtgctgtggaagaaggtttgtcggatttttccttggagaagcgagacgatttaccgggaatgttgaagtggctggctttggttgcaacatctcctcatgatcctgccattggagttataccgcatagttcaaaatggaagcagtataacggtaacaagtgttggctccaagtggctagagcaaaaaactctttgctggttcaaagagacaatgctgaactcagatatagatatcatccatttcgggtaatgccttgagaacagctttattataatctttctttctatctaagtatgctttctttttctacctgtgagacagtttaactcatggtaaactcatgcagggtcaccaaaatatacatcatccgtctatgtatgaagatgatcgaaagtcgatagggaggttaagatacagcataagacctccaaatttatccaaacactgttcgagctcgtgttgcaatggaagcagtttggtctctctatctaaatcaagatctaccaaatgcagaaaactgacgatcattgcttctgagagagcaggccttactgcaggaacatctagagccagaaagcgaaacaaagcagagatcccgagaaggtgtattaaagtaggacatcaacaccaagcccaagtggatgaatggacagagtccggtgtagatagcgatagtaaatggttaggaacccgtatatggccgccagaaaatagtgaagctttagatcagacgcttggaaatgatttagttggaaaaggaaggccagattcttgcagctgtgagctctctggttttgtggaatgcactaggttgcacattgcagagaagagaatggaactgaaacgtgagctcggcgatgactttttccattggagattcaatcaaatgggagaagaagtgtgtctaagatggacagaagaagaagagaagaggtttaaagacatgatcatcgcggatcctcaatctttctggacaaatgcggcaaaaaatttcccaaagaagaagagagaggagcttgtgagttactacttcaacgtcttcttgattaacagaagacggtatcagaaccgtgtgactccaaaaagtatagacagtgatgacgaaggagcgtttggtagtgttggtggcagttttggtcgtgatgctgttacttcgtctggttcagatgttatgatctgtgctcagaatcgtcagtgtgaggactactgagtgaagaagcagaagattgtaacaaaaggaaaatgtgttgtataaggtttaactcaaaaaacttctttggaagatagaagtataggagtttcagtttgtagcttttttcttttgtaaacttttggaatttttaaaagttccaaaaaagttaaattttttaatactacatttctttctttattaaactttgaaaaagttaacttttagtagatttctttattttacactcctaatttctaagagtcacatacatccgagaagaaaagaaaaagagtcaaagtacattttaatttaatttctatctctttttccaaaatattctccatcgtaataaattagttgttgcacgaaactttgtcctttttttttctgaaaataatgggattttttttggtaaaagagtaaaaaatgttctttcacaaagatgaattttctagaaaaaaattttgtcccttaaaaataaaagttttatattttcaatgcaaattttaaaactgtttacctgttttacccttattaaataattagatatatttattattatttttaaactatatttaaaggttaaaattgatattatatattatttgttaaagaatgtgaaattttaaaaaaaatcatctcagtggtatggagaaaatagtttttatctgtaaaagacaaaagcagaaactgaaaagatatttaattcattagtagtagttctagggtcggagtctcaccctatccaaatgttatcttcttatgattttcgaaataaccatttggatatatgctctatgttgcaatatgtaagatatttaaggttgtcttcctcttcttcttctctacaagtcaaagctaccttacttgttggtttggtaactttggtttaattcatatgtgactttgtgctacccatcagtcatggtttcatttctctggcttcatccgacgttcgttttcaagactctccaaactcgttaatctacgtacctaagattatacatgctttgaatttaagtttttaagaggtaaagtcagataattaaatgaaacagcattaaaacaacgtctaaatttcttcagtcaatagaattaacccaatacattaaatatgcattaacttacatcgaaaacacaaacaagaaaaaccctataaaaataggcatggttatggcctatcgtatgaaatcaagtcccgaatgttttatcgataaaactcaatttttttttttaaagttatggagatgaagacgcttctcaaagttatgttcttcttgttctcttacttaagtacgttttcattggcaatggtaccatatcgtggttgtgacgttattggagtagatttgggagatggatcgggcaattacgggaagggagtgtccaagggttttttgtcgggtcgtaagttagtttctggtccgagtcgtagttcttgtggtcactaaccgtcagtaaagtaagtttagtaataataagaactttattatgttagttctcttcatgattattattatgtctctgctgcctttagacctatgaatattgtaatgagttttaacgatgtgcttaatgaaatgaatggcttgcaacttttgttgaatgtttttatttgtagtttgaaccttaaatccttgagaaactcaaagggttgtcactgcctctaattatccttaataatttttcattttatatgacatctctcttaaaatcctaggttagagactcgcattgtgcagcgtggaggaacatttgttaaatttttcatgcagtattttacatatttgtgatatgatataaaataaatacctttttgataaaaaaaaattagatgatgttgatatatggtgtatatatagtatgatataatactatatatatatatatatcatactatatatatatgtatattttttataacaatgttttttattctattatcgatagttgggtttgatactaatatccgcgtcttcactccatatgtatcacaccaaccacaaagaaagaatactcttggtttttacatcgagaatagataagaatcgggtatcagtgccaatttttcgttaaccaccaatcttgttaacctcatcgttgctcatatattacatgatccctaaacaactagattagtacattaccaatagtacttgatgataataaaaaaagacaactatataattatataaaacaatgtacatctgtaatatttaatcggtaagttttctttttttggggtgtaatgtaaagatttatatcaaatataaaaagtttacatttaacaatgaaacccaaaaaacacacttatgactttaagatcacaacacacctatatcgctaacttcaaaacggaaaccctacatctctttctatattctaaataagtctttctccaagcaaagttttttttttgtttttttatcatttaacacttgttgtgatcagtgagaagtgttccggtaatcacttttgaggaaaataatgagtaggaaagtcatgttcctcattgttccttaatttgtttttaccattttacaagaaatttttgttccattttcagacatgtgggtcctgacatttttcctcatcattcctcacacgaaaagaatggtagaacagaatggttcctccccaaaattgtagaggaactaagaggaacaaaaaaataaaattcgtttttattaatgaaataatttaaaaatagcttttatgataatatttatatttctatatataagtattttccatatttttagtatatattggtatatatttttttttaatcaaactttcaatttaaagaatgttatgaagttattataaattagtataaataaatgttttaaagtgaaattattttaaatttgtaatataatttaattttgcactataaataaatcaatgttttgaagagatatttataatatattttattttaaatttataaagaactttaattttaaatgaaattaataaacaaaattcaataaatgatcttttagtaattattatgttaaatattaattcaactttttggttaccatttaccataatcatttggttcaattcctatgttactcttggtttctacttatgactattttctgtttttcttgttccttttcattcatatttctattgttccttttttggtcaccaatggaagttttttttttttttgtatagtttatctatcaggaaatctaggagactaggattgtactttcatttgtattagatgagtacccgcacgtagtgcgggtttatgtattactatttacaaattgttttatataatgtctgttcatataaagtatagttgaatgcatcggttttgaaacataaatatgatttgtaattgtttttgaaaagttcaactatattagttcatctgaaaaacgaatgtgtttgagttgtttttattgttgttctagattctcagttttttttcatatatatatccttgttttttttgttatatgtttagattgtgagacggtgaaattttatttcttacactaaaaaatataacatgtctttattaaccatgtctctgcatatttaatctaatcatattcaatttgatgtttttggaaagtttagttaagttcttgtcataatcttatatcttacgtattagttataaggatagttcctcaaacatctttcaaattacttgttttcttagcctaaatttcaaaaaacttagatatatttaatttgcatattcatttagtttctttcataataaacgtctaatttttaggcaaggaatatgtgtagcatgtttggattttatgatcactttagccactaatggatctcaaaattaaaaagaatatattgaattgaaaaaatgtagaaagaatgatggattaagttctgactaattataccctcatattttacttgttatgttgaattaattactaattatgtattagttattttatgaagtctatgtggcaaacttcatgtgctgatgtgtcaagttgtgggagagagttagcgttctttcatatatatgatttgggtttatccgacaaaaaactattccgaaaatagtgtaatctcaatagaaccttccttaaccaacctccaaatgtataatgcgtctactgaccgttagattaaatacaaattccgcgaaggataatcatttttgtattaataaaagtaaattgatttcttatcaaatggcccgtatagctcagtggtagagcgtcagtcttgtaaactgaaggtccgtagttcgatcctgcgtgtgggcactttttgtcattttgtacaaaaaaattactcttgagccaatgaggctattgtgcaatagtttgccacaagaacagagacattggcctatgtggtcagtgttccaagactccaaaccatgtgcaatgaaaaaaatcccttaacccggaacctctggtttatgatatcacattacaacaatcctacgatttcaaaccaaacttagaatacataaaaaaaagggtcgattgataatgaaaaaaaaatcgaactttatattcataagaattttgttactaaaccatatctctttatctgtaagagtgtaagactgtaacttcgaaaaagtatctatgattcttcttcaccagttagcctcaagctaaactcccatagttttttggccagatctttgtctttaccctgagaattagggtcagatatgttgttgtccatcaagtattctccactcactccttttgcctgaggatgaagcgcagcataacaggtagttgccgctccctgcaattaccgtatcaaaaaacacagatacaaacatttgtatgtgtgagttgagacagaatgattaagttggaagcaaattagatgaaaaaattaagaaacctgacctgtggaatgctcttcagcacatacttccccaccgcattaccaattgctgcgtcaaacaagagaaagaaattcatgccgttatcggttggttctctgatgcatctattgttagatcataaacattcattgacaagcttactagttactacggaacaacattttgaaaatgtgtagattaacacagggttaaacttatactagttaattataatacaggatcaaacatcacctaggatatgagtcacagtgcaggctcaaactaaattttacaaggcgacacaagttaatccgttgtttatcgagtgtcagtccagtatgcagtattaaataaacaaaggaaagtcagaaatgatatataaggcgaaagaggatttactatttatgaagctgtggtagcgtaaaagattggtcataatggatccaggatgaagtgaattagcagtgatattcacaccttgttcctgttttaagcaaaacaaagatgaaccaaacctaactcctctagctttctctttgacctttggaattgactacgaatcaactgcgaaatactatcttaccttgaatagcctagcgagctcagtagcgtgcaagatgttaccgagctttgactgaccatatgcttgcaaagtattgtacctgtagagaaacagtgagagcaatagcagtatgttattagtttactacactagaactcaaaagtaataaacaatactatcacataacaatcaccttgcttcatcatttattttgtcaaactgaacaccttcccggtaagcaaatcgatgaccttctgatgagacaataacaattcttccttctctattgctttcactagctgttttcttcatcctctccaaaagaaggtttgtcaacagaaaatgacctgaagcattgtacaaaacataaaccttataacatagaaaatgttcctcatcatacttcaaacgatgaagcaaaagttcaaacaaagaagcaaaaagggaggagatcataagttcttctaaactaaacatacccaaatgattggttgcaaactgtaattcaatgttgtcgctagaaagcaagaagggacatgccataatccccgcattattgctacaaaaacaagaacaaagattaagccgactaacacatattaacattcactaatccagcaattactgaaacaaactacaaacttagagagactttacatgagaagattcaagggaaggtccaaagactgatactctgatgcaaagctcctgacagaagccatagagctaagatccaacttcattacatcaatcttagcctgaggtatttccttaagtatcttatctctgacttgattaccagaatctgtattccttaccgccattacaacatgaacaccacgaagagcaagaacacgagtagtctcttccccaataccacttgatgctcctgaaatcaaataaaacatatacatcaaaaaccagcaaaatcttctcctttgcttcaagatgtgttcttaacaagcctgataaagtttaatcctttagtccattaacagataccaacaacaacttgagttcaagggcaggatcaaaaccaagaaattaaactatagactgaacatagatcataaaaaagttgaaaacatctgcacgaagaagaagaagaagaagaagaagaagaagaagaagaggacctgtgacgatagcagtgagaccagtaccatcgattccatgagtgacttcttcagctgtggaacgagcagagaacccagatgctcctttccaccaaaaaggccacatgtttgttttgtttctatcttctgtaccacaaaattaaagtctaatctcaaccaaaccaacgctagctgatgatcaaacacacaccctagtaaagttgaccaattataaaatttctttttccgagagcttttgcaatgtgcccatgctctgttctcaaaacaaggcactgaagaatctcgtataaaagtattaattacagtttcatttgttttcttccttaatccagagataagaataaagatgtttgtatacactatttacatttttgatacaaatgttgttaaatgtgaaatttggtattcgtttattgttcttcataaactaataataagcaattaacaaaaagtttgcttgaaagagaagctgatcaatgtcaaaggtttttacagcagaaagttggaaataaattggacaaacaaagaaagatccaaccgaagaaggaaataacaactctctctgggtgtgtagagcaaaaaacgagtctaacatgttttaaaatctttcataaaaacttataaaagatgagcaatcttcaaaagaagaagagacaggtttgggctaaagaagagtgctgtgatgttgaaaatccagagataacctttttcattcattcccatggagattgagaccaaaaaaattattattactcaacgctgtgttggcctgggcctggagcttccaaatgtggatcggcgatcatcactgcctctaggaccagaaccccaacggtctcctccttcagctggaggtccagatctttccctattactagtccaccggtcagtattctgagcggctcctctgttgcttccccagtggtcatctccgggaggcggcccacggttggaccgtcggtcagtttctgatgatgttggtgctgatgggcctgagacctcagtagtctggcgcttccacttcggaacataaggtgctgctggtgctcctgctgctgctgctgctgctgctggtgcggtagttccaacaggagtaacagtaggctctgcaaggcgagcaggtggtgcattagttcctctcaacagctcttctcgttcccgcctacttttctcttccagctctatctctctctgcctttgcttctcaaaagctttatccaagtttgctttgcgttcagcttctaccttcttgagcctctcagcttctacattagaggaaaacccaaaaaataaacagaaacaaggggttattaagaaaaacttcaatatcaaagtcaaaatgatgtggatttatggaagcaagtccacaccttcctgcttgcgagcttcctcttcttcctgcagcttcctaatcctttcttcttcaattttcaaataatatatctgcttcctcttgatatccctttcttgcttcttctctcggattattttactgatacgctcctctctctccgtcctgattctgtcaaactctgcttgtcgacgactaatcacttgtgcttggaatatttcctgggcacagaaagattcgattataagtacattggaaggaaaagttacaggaaaaatgtaagaaactagagagctttaaaattaattcaataacgaaaagagattcagatcaaagatgaacattaagagaaacaacatgacatgtcaaagactgaccttattacccaacattctggacaacctgttcttctccttcaagtcactctcatgacgctctttactgagttcaacttcacgctgcataggagaagagcttttaagacctcatatacttccaacacagaaccaagttgtaagaaaagaaaaactactgaaacagtaagtacctgttgttcacgctcataaaactctctttcctctaccagtcttcgctgatatgcagcttcaatcaatggagcagcctcttctctctttgctctttccaaataatccatcgttttggcaagcttttgaagcttcttctccatttcttgcctttccttgagctgctcagttaaggccctttccttcacagattgctttgtcaccttctcctatatttagtttaacccaaccgacattagtaataagttaatcagtgaactatataatagctaacatattggtaaacttactccgtctaaaagtggcttcttctttccctttttcatgcgcttctctgtctcttccagtaaagcttgggcttcttcaagctccttctcctctatctctctaaggattctttgttttcttctctctgcaagctctgctgcaagtctcttttgttctgcctcttcagttagcttctgaagcttaagccgtttctgctcctcttcacgttccttcaaaagtaaacatcaaataaaggaattttcataaacaggtacagcgtaaaaggagagctgtgcaaataaccatggaaaagtaactaccatttctagttgctgacgctcttgatcctccttcctcttttcaatgattgatttacgagcaagcagtcttttgtgctctttctcaacagtatctgctaaatttggtataacgccagctagttttgatgctttacttgggacaggatacagcatagctcttactttgctcaaagactcggcaaaaacagccagatgatccctcagtccatcagactcaataccctaatatacaaacagttgatcaaatagattagtatttagtcaataagttaaaaattatattactcaactacatatgatataatcagtgttgagctgaagctttaacagaggcttaccaaatttccaaaaattacaacacccttcatgtgatcaactttcatggcaacaaaattgttcttcacagcatcaacagaaatcttctctacctctgagaattgaaagaagggtaccaactgagataaactctcaattcttattgtctgataaatcttagacacctgaaaataaaatcggaacatagaacatttagtatgcagaaaaagggataaaccaccagaaaaatccaaaatggttgaatgggtattgacctacaacatagagaacaaggcttacctgttgaagtagcctcagagtagcaagcttctccagagaaggaacatattgggaaagttgcacttctggtaaagaaggagctgaggacagtttcccaccagatttggaaatcttttccagcaaaggctgaatcttggagccaagatcaagtgggtgaaattcatgctccaaaacatggaaaagatctttgacctcctgagatgcacagctcaaaacaccttttgaaacctaattgcataaaaatcagcctccaaatcagatatttgtaagtcgacaaatattctaaaccacagacagggtaacagctagagactcaccagctctgacagaagagctgaccgggaaagctgaaacaggaaggaaatggaattagaatactaaaccagaaagaaagggcgcaaaataaaaatgaagcaacataagaacctatgttaccatatctttgccctcaaatttaggttcaagattgaatccaatgaggttagccatcctcaaattgcgttctttctcattttcaagttccatatgggatgcgctctgagcccgatcaaatggtggaatggacaatgccgccaagacaacagatgacgctattagctgcaaatccttttggcttaaattcttgttgaaatttttctgcagactaaacagcttaaaccatgcataagcatgataaagatggctagaagaaatccagaagatctcagtcaatttggaataataaaccatcaataaagatgacttgggcgtttttttgaccatgcacattaatccatagatatcttcaacagagcgaaaagcttcctgcaaagatacatcacgaaccatactaacttatttccagtaattatacagaggataagctatatacagccaaactaaatatggaatagagaaggtagcatcagaaaaatacacatagaaaacaaaaacgcacctgccaaagtccaagctcagtagcaactttcaactgatcaaaccttgtgtccagatacagctgcaagctctcaggggctgataagtcaggtcggtccctttggtctctgtacttgttcaggtttgccaaatgatttcttataatttcacaaagcctacggaactctgttgttcgcttgtactgcttacagaactggaaggctttatgtgctgtcatctacaagattataaagtacaagtcttcaatctcaatcaacttaaaatcagaggtatcaccaataagcttaacctagaagaaaacaaaccgcataaagtgcttccaactttgagttgtttcgcaatatctcaaggactgtcctgtatgtctcccacagaaacttaaaccatggggtgaccaactcacggtcagacctatcttttcccttctccccactgacaatacttagctgtaaatcctcaggcttcctatcagcttcaaggtcatcaacatcaagagcctcctcaagggcatccgcctgagaccgagcttgctcagctttgtcagtagcaagatgtaggaagtgcttgataacttcctccaaggaactgacattcacttgctggcaaacaatacgatactgaatcaatccatccttagcgaatcgacccctcttcaagtcaacacaaagatcaagatacttaaacatgatcttctcaagcggtttctgccaagctctgtatctcttggaagtaatgagatcatgaagcgcctgaagagcatcttgtttctgtccaacattgatcaattctacacacacaaaaaaaaagtgtttaacacaatctcaattcatacacaccctaaccacatccatttgaccaaatggatgttaaaacgaaaacatttcgtaacttaccatcagcacgcttcaacgcgttctctggtttggcaaaattcgccatgtttcagacgaaaaaagctagtaacaaactctaacgcaagggacactctcaattagcctgaaaaacacagagaagcgattttgttacagagatcaccagaatccgaaaaacccaatcagatatctcagaaaaggatggaagctacatagaccagaaaaaacttgcccaaaccctaaattcatttcatagaatcaaaataacacagaaagattcgataacctgacccaaaccctaacccagatcaattcaatgagatttgattaaaaggcagtagagatccaatcactgatgcaagaacagagccgaaacttaggactaaccttgtagccgtgaaaagagaagactgataagagagacgagaagcgaagcggaagcaactctagggtttctggtattaatattatcgttctacatatatattacccatatttgcagaaatcatcctattttcttacggtttcgaaatgaccccgttttatcttcttagtgtttataaaacccaatttgtctaatactgggatgtgattcaattgagatcaacaaaatttatggatttcattttcgaattatcatttacaatatactctctatattttgtttaataatatttttagcaattaactttgatatttctatattattaactaaacatacatttaagtaaatagccaacaacatattaaatattacataaaatgccactacaaaaattcatttcaaaaaaacaattgatttacataaaatcatgaaaggtaaaaaattcaactgtaaaagggtgttattggtttatgatttcaaaagagttttaatgacttaaagtgtaatatagaatctgatgttattcaattaaattttttttaaagtataattgtgttaacccgctttaatatttataattgggcaattataaattcatataaaaaaaattaattatgattattgcatttatataaaaaaattgaaaatttgaatatgattttttctattacaaatagggattgttagcttacttttaactgtttttttcttaattatactaggtaagtaacaagagtataagaacattatacagttcaaaatatatatttaagcaaggcattggaaatatgtgatggaaaattaatataacagattatttttgaattattttactatcgacgtattttttttgtcggaactgtcgctcacgatttgcaatagaacatagccatatgtaatcattttgatctatatttttgagttactccaagattcaaacaatttaaattccgttataatctacaattaaccttccatccaattccaaaatcaacaatattttagccaatttgtgcgatgatcatgaatttgttttgttaaattcattgattttctagaatccaacatgtacataaaaaaaattagtggaaattgatatatttttttgggaaatttgcagaaataactaacaaaaaaactataattcactaactaaccatcctaactatgtaattataatattctctgtattatatgtaatattactcaatttgcccttgttgcctcaataccttcagtagcaaccaccaccgctggccaccaccgccggccaccaccgccggtcaccaccgccggccaccaccggtcaccaccaccggtcaccaccgccggccatcactgcctgccaccaccgccggccaccactgcctgccaccaccgccggccatcaccgccaacttcggccaccatctattccggtcaccaccaacaccggtcaccgtcactgtcggccaccatcaaatccggccaccaccaactccggccaccaccaacttcggccaccaccaccaccgccaccaccactgtcggccatcaccaccaccggccaccaccaccaccgccggtcaccaccaccaccaccaccaccaccaccaccaccgccgaccatcaccccgccggtcaccaccaccaccgccggccaccaccaccaccgccggtcaccaccaccaccaccaccaccaccaccaccaccgccgaccatcaccccgccggtcaccaccaccaccaccggccaccaccaccaccggccaccaccaccaccgccggcaaccaccacaccgatcaccaacacttccgaccaccatcaactccatccaccaccgccggccacaaccatcaccaccactaccatctccaatcaaaaagactaatttagtaagtttactaccctctagtgttagtttctacattttgtatattatagtgttagtttcttaaataaattatcaaaaacagttagttttgcaattcacccatatttttttctcgtaaatgtttttttattgatcgaaagtctacggcacaaggtattcttacaagacaatattttaagagctaacaaaacgaatatatagtccacaaagatagacccaagattaaaccctccaaagaaagaaaagagacagcaaagcaaactatcttcatatcacaagacgcgtcagacggtaaagatgagattacgacacatgttgatttcacaacctccaccgcaagagatccaacttccgatgaattttagatcgtcaccggaaaactaagttcgagcaatcaaatcttctgtttctcaccgtaatgacaatcgcagatcaccatactgatttgctcacgactgattcttaaccaattgaatctctgattccttgacaacaacgacgaaaaggtaattcaagatctacacaacaactaaagcttttaattaggaacctaaagcacattcaaaccatgaactgttttaaccgagtaacatccgcttagagattaagccaataaagcttccaaccaacaactaaaaacataaaagaaagcaatcatcttcatagatcggtgggaagaaataaccacaattatgttgaactcaatccaaaggcactagaaaaaaccatcatccacaactccgatttgtttcttttaaaattgaaatcgataagcttgaaaaacaaaacgagccttttaatcaaaggaggtttaaggaattctaattccagatctaagaattgaaacacaagagggccaatcaaaccaaatgtaaagaaaactaaagaacgaaaagataaatttaaaccggaaaaaatccgattagaagctagacgagacacaatagaaggacgatgaaactctagatataagccagtcaaccgcctttgtaaaagccgacagatgccagacgctagccgaccaccaccgtaaagagaaacggacggtgtcaaaactaaagctggccaaacattgccataaaaacgaaagttatcggataaaaagccaaaaagtcaaaagccaaaagattctaaacggatagttggacaacggaactaccgttgccagagaaaaaactctaatgacttcctttctaaaaaaatataggagagggaagtccacccgattagtggaatttgattattgaacaaaaccagtttttccattttttcgcaattgtaacaaaaaaacaaaggtaaaaataaaaacgaaaaagtaaaacccttcgagaagaagaagcagcgcataaacccccatcggccagagaaaatgagcaatttgggatctcgatcttctaccgacaaagagcttatcagcttctcaaggttttggttaatttgagctacagatttttggattatcgatgatatctagcttcgagaaattttcgaattttctcacatgaggcgttattttggaacagatctttgttgagctattggctcgaactagttgactaagatttagaagtcgattttttgtgtatattgtgtaagataagcaaatgtcttcttctacgaaaggatctgttaagaagagttcgattaaacatagttgcaacttagctgaggttaagaggaagctttcaaagatcagtgatcatcattcacatgtagagtatgcttatgccttccagagggacaatagagaaagagtagatactaggttgagtcaaatcctcagtagggatgcgttgatatcagccgttgatttgttgtgggatcgctcgggttttgtttcactgaaagaagggaattttgattatgtagatagggatgaagttagttcagaaaaggctaagtctcaattgtcatcgactccacagtctagggttagattattgggagtggctgaaaagatgtatagtttcgatccgtataaccgaaaaagtttgttgaatcagactgatggatctaagtctatatgtggttcttgcaaagggattggttttccgttcgaggctagatggaagacgttgtatagctggatggaaggagtgcttccaagttctactagatatcatgaagaaggggctgagattgagaagagagaaaattttgaaggctgtattcttaatccagtgagcagtaaagaagaactcgcatcaagaaatggcgatggttgtgattgtgtctttgatgccattggtgccaaggaccaatcaactgtaattgaaccaaggagtcttctattagcaacggttgcagaatcagtggtagacactagagtatctagatctaatgatgtgaactatctctttttgctttacaaagataggtgtgtcaataataaaggagtgaatatgataagttcaaaatgtagcacggattgtgatgctgaggtttcttcttcagggaataacttagacgaagactgcttatctatcgttgaaaataaacagttgcttgagaaagatagaaatgacaaagagactgaagtttgtttgtcctctccagaaacgactacttacgcttttgctaaacagagacatgcttttgctggtgcgttggcaggcataagcgtcagtctttgtcttcatccacttgataccgttaagacaatgattcagtcatgccgcttggaggagaagtctctatgcaatactgggagatcaattatatcagaaagaggtaaaatgttttacttgtgatgatcaaaaaagggagctttctgtatttgtttgtcactgcgccttgttgcttaacataattacatcccaatatgtattcaggtttttctggactttatcgagggattgctagcaacattgcctcatcagctcctatctctgccctctatacgttcacttatgaaaccgttaaaggaactctgcttcctctttttcctaaggtctcttttttctcgcatgtctccattcttctgatggcctgtttcgcagaataagtaaagtcatattactaaattcttgaaatttcaggaatattgctccctagcccactgcttagctggtggttctgcaagcattgcaacttcttttatcttcacgcctagtgagcgcataaaacagcagatgcaagtcagttcacattatcgcaattgctggtaaatatttgcaagcttaatctaaacttttgttaactgcttcatatacttccatgttctcttgtctcgtaaaggtttcctagcttaataaaattagttcacattgagatttgtttcccattaccctttctttaatttcctcttgtgctttcaatatgttctaatgatattttcatcacatatgaatacaggaccgcattggttggaatcatccaaaagggtggtctgctttctttatatgctggatggactgcagtgctatgtagaaatatcccgcactcaatcattaaggttcgttttgcgcacactataatgtgttcctaaaatgctctaattaggactagcgtctagatcgtccacactcttctgctattctttttctctgcttgtattgaattctgatgccaaatttattggaaatacagttctatgtctatgaaaacatgaagcaaatggtattaccatccccaggcccttgtggtgaaatggctcaacccacaacattacaaacggtgtgtttcttcactgcttcatcccataacaatgtgcactttatgattctcttcaatcttagcaatctgtatttttatttttaatatggagaacctgagaccacttagatgatattctgataattgctcctaacagcttacctgtggaggactagcgggatctgctgctgctttcttcacaaccccatttgatgtagtaaaaacaagattacaaactcaggtttgtttctcgtttaggaaccacgttaacaattgtcgtcaacatctaacttatcccatggctgcagattcccggatctagaaaccaacatcctagtgtctatcaaactcttcaatcaatacgaaggcaagaaggtctgagagggctatacaggtctctgctcgctttcactagtcatggttattgcaattgtatcatccatgtcatgcttcatcaatttaccagcatgctactctcttcttatatgttgcagaggcttgatccccagactagtgatgtacatgtcgcaaggagctatattctttgcttcgtatgaattttacaagagcgtactctctctagcagcggcgcagcctaatacgtcagctctctctggcacaaaacaaaagatggagatagccttaaatcgttaaaggacaaagatagttcaaccccctatgaaaccaccaagactgcaacatatgtaatacaaagaatggaaaattgtacatttgtttcgtttttgtaactattgatttgattaaattcatttgtgcaaagttctttttgactggagagagaagaagaagatccattattcactacaagttacaaaacttttttttgaaggatctaccaactctacgctcataagacttctaaccaaataggcacctcccacttgctaccttacaatatgaacagtgtggctttttcttttgcctagatcctaagaagaataaataaatgatacaacaaagaatgtgacgccttcctttctcagtctgaaaatcagagaccatcccatcttaagctctctagcttgtccggcgagtctactgcttcatggttgcgctttatcggggaagttggagaccaaccttctctcctcttcttttcttatcgccaactcaaatgcacctgcaatagtgatagcatcacagactacactcgggagattggcgagaaaggaggattcggcatgtaggattgaagagcggtcacagcttctttcagaggcttagggacttcttcttcctctgttactgcttcaactaagaactgaacatcatcatcaatcagcattttcaacgagttgcaatgcgaaaactgttgtacattctcgccatttctgtaactatctgagacttccgtgttatgtaatatggcaacacagatggagaatgcttgcaatgttgataactgcgcgtggaaatgaacatcgtactgtccttcctcaacaaatgacatgtacaatgctggtatatgttctttagcaccctacaatatgaagaagatatgtgttaaaatgataaacagaagaagagttcctttaaagtcttcaataattttacctggacaaatagttgcaaaggatgctgattttctacaagaggctgatcatgagaacatgagatacgaggattaccaagaaccataagtggacaagccatgtcccaaccaccacagtcacaaccgcctcctgacctccatcgctgaatcaaaggcgaaggacaagagttttcggtagttggtaacccgtggtttcccctcgggattacaaccttcagtttttctaaacttctgctgccaaacaactcctttttctcctcttctattggagaaagaccaagaatattagttttctccatcagtcttttgtcacctcttctatattttaagctttctctcttctcaatagtgtcttgaataattatagctgcgatctcaaggtcaggatgcaaatttgcagctgaccacgggtttgttccatttgaagcctcaagatcatagctttgagatgttcttttaggctgagatctctgcttcattgtatccgaagcatccccggacattgagttatttcttatctctgagtctgatttaacagagttcttggaggcattattaaccgtatcaagtggtagtgattgatcttcctttgtggagacacttcttcttgcttgtgcaatatcatacaaaacaaactcattcaccatcaaagtttctggatcttgtcccttttttcttacttctgaacacatcttacaggtaacttgcatctgagccaccagcaaagattctttactaacatcggtcaaaccccgcacgctagcactgctcctctttctgcttccagcagatgaaaatgtatatacccaagtagaaccattgtcagatttccacgtctttgcagcgtaaacttcctcaggagaatctgaaacaaactgaaaaaccggtaatccattcttgctttccatcttgagacggcaatgtagatgaaccggggaagatttcagcaccgaggtataatccttattgacaactggaggaggacaaagattcgatcttttatgaatgtttgagtagtcactcaacatagatctgcaacgctcactgttcctccccaatttgaactgatcacctgattctcctatataaccaagaggacttctcaaagattttgatttaacaaatggatcaaacattttcctaactcttgagctgtccttattgtaactggtttctactgagtctacctttgcagaatatggcttaggcaatctaatcttatggtcattatcatctgaatccaacactacagctctatctttaatacctgacttcaaacaaatgtcaatgaagttgctagaggtgcaaggttcaactaatgacttctgaccatctaaaaccgtcttatgcggtcttttctcagtacttcccttcctcgaagaatcaacaactctaaaggagaaagaagcatcactactacgagacaactcaagtttcgcctttgaatctttacgtccttgtggttctctaagttctttaaacaactcattagagctttgataaacagaaccgcgccttagctccgttgtatctcccattgcaagtggtttagaaggaaagttcttacatgatgtgctacggtaacgcctgaaacttatctcggtgaaaccttctttgactctcaatatctcatctctacgaggcggctttagtcttgtactagtcctcttttctgattcagtgaatggacgaggaggaggaagaacactattggggctttgttccatatcaattcctttaccaaattccatttccactccaatcaccacttcaaaacatctgtaaaacattacacaatacaagaaaacagtttagtcctcctaaataaagacactttcaatgattagtagatgaaacatgctaaaatgaaatctctgaaaatttactaaacaacttcttgtaatgatagtaacagattagagttttaatcagtgattagtagatctaatgaatagaatgtcataaaagcttcaaaaggattcaaattaagcttccaaaacacaaactacacatgcaaaagtaatgatcttttgattcatacacaatgtagatctcatataaggttgatagagcaaacaaaaaacccaattagtagtaaagagtgtatcaaaacaaccctagaaaatcagaaagaacccaaaatagcagtcaaagaagaacaacaaaccaaaagaatcagatagcattaagcaaagaatcaatttttattttttaaagatttagagaaaaaaagagatctaataagagacacagatagagacataagagaaaaaaacaaaacatacccgagttacagtgagaaacagagtgtgtaaatctcaaacatttcttcatcgacatggagaagaagaagaagcaatagagattacaaaacactgaaggtggtaataagagaaaccgatcatgttctttgtaatgtaaacaaaaagatagagaagaaaaaaaagcaatcaattagttttctccatcaaggcatcattttgtttctttatttccctcttcgagtgtgcaaaaatctatctctctctctctctctctctcgcagtcactatctctcacacactgtacttttgctttagcttttttgttgtctgtttctttttcacttgttctatcaaacaaaggtttttttcacttcaatgaagtgttgtgtgtgacctaagacaatcttaccctttgtcagaaattgtcgctaaaatatatagaagggtagtttcgtcatttaagtaaacaaatctggtgagacactgagagagattaattaaaattttggatcggttcgtgaaccacaaaaaatattatttacttgtttctcgggaagttcatgtgggattcctatccccaattaaaatctttcgactctatgttaattttaattttatttcgaaaagagtttatgaaattaatacttgtgtgatttattggaagtggtatacttaatttttttaagattactattaaacaatatactctgatagctagttttctatccataatgggccgcatcgtaattgggaagacccacttttgaccaaactttcaactttaaaacattttggtccaaattggtaaaagacaaaaattagtttatagggatttgggattgaatgactcgtcactcgtataaattaatttggtgactccatttagtattttggagaagaaagtttaaagtttgtgtttgtgtttgtgtttgtgtatgtttgccctttgattatgaacggtgaaatctagactaattttgacagtatgtacaagattaatctagattattgcctgcataggctgcattaaaaaaattggtgtgtttaattgaacgacgccgtgctaaaatatcgaacggcgagatttatagcttcagtttttttatttgaaacactgtcgttttgcataaataaaacgacagcgtttaggtcgataaatgactgcgtattggtaagttgagacgacaacgtttaaagccggcgtttttaaattataaacggcagagttttggttaagggaacgacggcgacgatgaatatggtgtttccgaagtagtttcaggcgatgatggtgaataatattacgaaacgacagtgtttagatagattggcgtttggatttgcattactcgaaaacattgttgaaggcgatggtgtttccgacgttgcgcgatacccatgtctcttgaacttttcgggtatggccatgtctgggaatctcacagatgaagtttctagtgaggaaagaagtcagagcaaatgatataacttgtcataaagaagaacaaaagggttttcagattggtgggattaagccaaagggttttgctcatggaagtgtttgagaaagactgcttcttgtgaagatgcttcttgcgacatagctaatgagggtgaggtttctttggatctgatattgattcggagtatctggttttagaaatgtttgtgatagagactaaaggagccattgttggccaaattaagaattgaatcgtatatagaagacatgagacatgacttatataaagagtgtttcagtttccgaatcatcttctgcttcaaagtaaactgttattaatcactttgagtaggtggctctttttcttttctcttcaggttaagattgatgtcttttgtgttttgtgttgtttctttctgatttttggaattcttttggtcagctgcactgtttaatctgaagcaagcaaccactcgctttctgtcaattcggtggaagtgtatgctgaaacttccgggaagacttgaagttgcagagacattttaaagcagtcaatgtatctaacagctgttctccgcttctcaaatcactactttgctcggtaaggccgatataccaaacaaaaacacaaatgttcttctgttttggcctttgatgatgaaacattatgttattagattacttggatgctacggttctgtacttctgttcatgtttactagaacctctctagttatccgtgttgagtcggtatattgtgctatagttaatgcgtttctttctggttcaagcgagcatgttttggaccaaaaaccttttggtaaaaagaaactttgcaaagtgcaatgaagtttgcattttgtttgttttctataatttacaaaataactcaagaaaatgtagtcctcagatttatcacagtgatcatccatttcaatcaattgcttcttcaagtactcagagagtcgcgttgatttagaaaatgttattcatgatactccaaaaagctattgattgtcctgcaacaacatgttcagagtcttgttatggcttgaagtagtagttgagagtcacagtgacttgttggaataactctgagtggtccagttcataatttctttctaacaagttgccattgttttatttatattctctatccatataataaaataatgtttacaacttgctcttatgaaaggcatggttgtgtaagttagtctatattcagcttgagacactaaagaaactcatctattccttttttggaaaatgcgtcaaaataatctcttctcattgatcttctggcttgtccctgtgagcttaattattgttgtctctgcacagttatgctcggagaagtttggaacttttacaccaggtggtacatttgacaagaaccgccgaatcattctctcatctcttccatctgaagtcacagctcaagatggcttctacaacgcttcgattggaacagatcctgaccaactctacgcaatggggatgtgcatcccaggtgctaaacaaaagctttgtagggattgtatcatggacgtcacaagacagttaatacagacatgtcccaaccagacagcagcaattcactggtcaggtggagggaaaactgtatgtatggcacgttactataaccagccgtcttctagaccattggatttggaatcagtttctattggttataacgttggaaatctcagcacaaacttaacagattttgatagattatgggagcgattgatagctcatatggtgactaaagcttcatcagcatcaataaaatatttatcatttgataacagtagattctatgcagctgatgaaacaaacttgacaaattctcaaatggtctacgctttgatgcaatgcacgccagacgtctctccttccaactgtaacacttgtttaaaacaaagtgttgatgactatgttggttgttgtcatgggaagcaaggcggctatgtgtatcggcctagttgcattttccggtgggatctataccctttcaatggcgcctttgatcttcttacgctagcgcctccaccctcatctcagctgcaatccccacctccagtgaccaacaaaggtatgtgatttacttaaataaatgatagaaataacccttcttgtattcaactctaagaagagctaggtgatttggtcttgcacagatgaaaaaacgattcatacaggaactatcattgggattgtcattgtcgttgcaatggtcataatcatggctctgcttgctctaggggtttctgtttgcaggagtagaaaaaaatatcaagcttttgcctcagaaagtgagttcctcttgttttctttcttatcagctggtcttgctgctaatttacgaaagaatttcaccgacctgaccataaaaccacctacattttcattgtgcagctgccgatgatattacaacagttggatatctccagtttgatattaaagacattgaagctgcaacaagtaactttttggcgagtaacaagattggtcaaggtggtttcggcgaagtttacaaggcattttctccccaactactcttaagttgtatttgtgttatgtttgaagatattgagatagtgggatgattagttagattcagttgtaatatgcagggtacgttatcaaatggaactgaagttgcagtcaagaggctgtcaagaacttcagatcaaggtgaattggagttcaagaacgaggtgcttcttgtagcaaaacttcagcaccggaatctcgttaggcttctcggttttgctctgcaaggagaagaaaagatactcgtctttgagtttgttcccaacaagagcctcgattatttcctcttcggtagtactagtagtctaattttcctcttgatccaatattcttgaaatcttaagcttggatttgcaaatggatgtgcagacccaacaaaaaagggtcagctggactggacaagacggtacaacatcattggagggattacacgagggcttctctatcttcatcaagactctaggctcaccatcatacaccgtgacatcaaagcgagtaacattcttttagatgctgatatgaacccgaaaatagcggatttcgggatggctaggaatttcagagatcatcaaactgaagacagtacaggaagagtcgttggaaccttgttagtattctccttattatttacaatgggcacaattctctgatgaacggtttttgttactgactaacgtaaacattgtcatgtatatatttgcagcggttacatgcctccagaatatgttgcgcatggccaattctctaccaaatccgatgtctatagcttcggagtattgattctagagattgttagtggcaggaagaatagcagcttctatcagatggatggttctgtttgcaacttggtcacatatgtgagctgaaatctaaaatgctttttttactttctaactgtgatcatcgattctgaatacgagtttgtttgcaggtttggagactttggaacactgattcatctttagagctcgtagatccggcgattagcggaagctatgagaaagatgaagtcactagatgcatccatatcggacttttatgcgttcaagaaaatcctgtgaatcgaccagcattgtctacaatattccaaatgctcactaatagctccattactctaaatgtccctcaaccacctggatttttcttcaggaacagacctgagtcagacacattacgccgtggattggagccagaccaatataacaatgaatctgttacttgttctatcgacaatgcaacaatcactacactcctcggtaaaactcttgcttctgcactctgttgtattacctcaactctattttcaaagtcaatgtatagaaacactgaggattgaattatttttgaatattaaaagttatctcattttgattctggtttatgtattcacgttcattttttgttaagaataaatgcttggctcacctgcccaataacatctttttttgaccaaatcaaggttctcaaaatagtacggtgaatgaaatcaaactaggctatccactgttttatcctcacatgtttctgctttgtgtcttccttcacaaagatgcagggactcagtattttagacccaacggtactcattccttaatggagactaagagatttttaaaacaataggaaccgacgacttaaatacttgtgtttggtcattgcttgttgcattgtgttttggagtaagttagaacgttttggtgtcaaatagggcctagaagagctacagatcaagaattggtctacgttcactttcatcatatttacctaacgtgtttataaagtattaaattatccaaaacgttgacctaggtgacttgtgcattaatgcacgtatccactacttgacgaaaattctacacgcgaaagctgttttgaccaaatcaacgttccaaaataaacatttccttttaaagattcaagttctaagatctgcaacaagtatctgagcaaagtaaaatgtcaagagaaaaaatgtgtttgaacactctctgtgcaatcctctgttttgtccttaccgttagtttcggcttcgtctctgcccaaaaatgcggggagtctgtgtttttcagacctaacggtaactatgacactaaccgtcgtctcgttctatcaacgttagcttccaacgtcagttctcaaaacaaccgcttctacaacgtttcggtcggtgaaggagctggaagaatctatgccttaggtctctgtatcccagggtctgatccaagggtgtgttccgattgtatccaactcgcgtctcaaggtttattacaaacctgtccgaaccagaccgactcattctactggacaggcgacaacgccgacaagacgctctgtttcgttcgttactctaacaactcgtttttcaacaagatggctctagagccaactcacgcagtttacaatactatgaggttccaagggaacctcacagcttatacaagaacatgggacgcgttcatgaactttatgttcacccgagtcggtcaaactcgatacctggctgatatatcccctcggataaatcaggaacctttgtctcctgatcttatatacgcgctgatgcagtgtattccggggatatcttctgaagactgtgaaacctgtcttggaaaatgtgtcgatgactaccagagttgctgcaatgggttcataggtggagtcgttaacaagccggtctgctatttccggtgggatggttataaatattatggtgccttcggtgatgaagcgccatctcaaccccccacgccgcttcctcttcctcctcctcctcctcgtgatccagatggaaaaaagatctctacaggagttattgtggctattgttgtttccgcagttatcttcgtggtgctagtcgctttaggattagttatttggaagcgaagacaatcatacaaaacactgaaatatcatagtgagttactttttttgtttttgtttttttatcactctcacattacttattggaatgcatattagtaaccatgcatatgttatatatttgcagctgatgatgatatgacaagtccacagtctctgcaatttgattttacaacaattgaagtggcaacagataatttttcgaggaacaacaagctaggtcaaggcggattcggtgaagtttacaaggtatatttgagctgagctctacatatatctatgactgcttgatttgctgtgaaaactaagaacttataagtttttcatatgtagggaatgttacctaatgaaacagaaattgcggtaaagcgtctatcgagtaattcaggacaaggcacacaagagttcaagaacgaggttgtgattgtggccaaacttcaacacaagaatcttgttaggcttcttgggttttgcatagaaagagatgaacagatacttgtctacgagtttgtttccaacaagagccttgattatttcctctttggtaataaacaataacacttggtttaatttatgttcattcatcaaattttcttataattatagtgtaatttagatccaaaaatgaaaagtcaactagattggaaaagacggtacaacatcataggaggggttacgcgaggacttctctatcttcatcaagactcaaggctaacaatcatacaccgtgacatcaaagcaagtaacatacttttagatgctgatatgaaccctaaaatagctgattttggaatggcaaggaattttagagtggaccaaactgaagaccagacaggaagagttgttggaaccttgttagtactccgataatctctttaaaattgataaacctttttctatttgtttgtttctgattaacataaacctttttatgttgtatatttgcagcggttacatgcctccagagtatgtgacacatggccaattctctaccaaatctgatgtatatagctttggtgtattgatcttggagattgtttgtggcaagaagaacagcagcttctttcagatggatgattctgggggaaatttagtgacacatgtgagcagaaaacaatttaaaattttactttgtttagattgtgaccatcaaggatttggattctgaatatgagtttaatttcttggcaggtttggaggctttggaacaatgattcacccttagatctcatcgaccctgcgattaaggaaagctacgataatgatgaagtcattagatgtatccatatcggaattttatgtgttcaagaaactccggcagatcgtccagagatgtctacaatctttcaaatgcttaccaatagctccattactctgcctgtgcctcgaccacctggatttttcttcaggaacagacccaatttagaccccttaacctatggatccgagcaggggcaatccagcagcatgtctgttcctttttctatagatagtgcgtcaatcactagagccactcctcggtgagatgattgcttttgcactagtcagtagcattttacttgtaacacaagcaactccagttttcaaaggtccagttaatttttatggtaatatgggtacatataaaaccaaacttatgtgtagccgtgtaggtagagtattcctttcttgttttttcccatggcaagatgagaatttgtcaaacctcaaatatgatacattaacctctaagaacaaccacttacgaacccatttttttacttcttcagtcatctatgatagtcaccagcttgcttattcagctttttgctcccccagattttctataaagtggcaacaaattttattatttcccctgaaatatccatgcaactacacttatattatgatgatgttccaatgattttgatcaccaacatttgtagatctctaaggtttttatgtttcatcaaactctatctagcagcttcacatgtgctagtatatttgtaacgtctctcatccaagtcctctctttcaaagactggttttcgctatttcaagaggctataaagacttccggaagcacacttaattaactgtgacaggatgtttcaccgaaaagataagtggactttggtgacatagattgcctctccgaagcactatatacaccactatattcctttaatagaggtgttacaatatcatcttgataaatattaccaacaacatgctattgcttgaacactaaacgtattaactcataatcgctaacgaatttgaacatacgtcttgaaataagaccaagaatcgacacaagctaacgagttctcctatatcacgcgtggtgtgatctttagcgtacatgtcaatggaattaaacacactatctccagtataccaccagaacagagttttaacagtactgcaagtaacaaaccctttatatagtactgtttgtattataatactttaacagaaaaagtccgcaacactaacagaaaaagattttatatttatcgcattgacttgactatgtttgtctcaacaactacttaacgaaaattcctaccacccatactttttgactaatcaacatccaaaatgttctagtaaaaccattaccgagctgacttgaatatgctttcctcaattacttaacaaaatttctaaccaaccatgctttttgacaaaatcaacgaccctaagtgctacagtaaaataaaatgtgtacattatttacaatctgtaacacatacctgaccaaagtaaaatatccaaaaaagatatgtgtctgcaaaatctcttgtcaatcctctgttttgtcctcgccattagcttcggctacgtgtctgcacaaaaatgcgtggattcaatgtttttcagacccaacggtacttatgacacaaaccgtcatctcattctctcaaaccttgcttccaacgtgagttctcgagacggctactacaacggttctgtcggtgaaggccctgatagaatctatgcgttaggtctctgtatcccagggactgatccaaaggtctgtgatgattgtatgcaaatcgcatctacgggtatattacaaaactgcccgaaccagaccgactcatacgactggagatcccagaaaacactctgtttcgttcgttactccaacagctcgtttttcaacaaaatggatctagagccgacaatggttataggagatctaaatagtggactattccaaggggaccttgcagcttatacaagaacatgggaggagttcatgaactctatgatcaccagagtcggtcgaactcgttacctggccgatatatcccctcggataggttctgctcgtatatatgcgctgatgcaatgtattcgagggatatcctctatggaatgtgaaacttgtattcgagataatgtgcgtatgtaccagagttgctgcaatgggttcataggaggaactattcgcaagccggtctgctttttcaggtgggatggttctgaatatcttggtgcctttggtgacacgccatcgctacctccaccatctccagatgggaaaacaatatctacgggagctattgttgcagttgttgtctccgtggttatatttgtagtgctgctcgctttagtattggtcatacggaagagaagacaatcgtacaaaacactaaaacctaaaagtgagtttttttttctctcttaattgttacattgcttttttttggaaccagtagtagaaaccatatataagttattgcagctgatgatgacatgacaagtccacagtctctgcaatttgattttatgaccctcgaagcggcaactgataaattttcgaggaataacaagctaggtaaaggtgggtttggtgaagtttacaaggtatttttaagctgagctctacatatatctatgctagcttgatttgtcaaaaatactaatcacttaagaagcttcgatagccgcttcaccgcaactttggtttcattcgtcagtaattgtaatattgtatatttgtagggaatgttaccaaacgaaacagaagttgcggtgaagcggctatcgagtaattcaggacaaggcacacaagagttcaagaacgaggttgtaattgtggctaagcttcaacataagaatcttgttaggcttcttgggttttgcttagaaagagatgaacagatacttgtctacgagtttgttcccaacaagagccttaattatttcctctttggtaataaacaaaaacacttacttggtttaattatgtgcattttaccaaatgtttttaaaaatatttgtcttatgcagatccaaccaagaagagtcagctagattggaaaagacggtacaacatcataggagggattacgcgagggcttctctatcttcatcaagactcgcggctaaccatcatacaccgtgacatcaaagcaagtaacattcttttagatgctgatatgaaccctaaaatagcggattttggaatggcaaggaattttagagtggaccaaactgaagacaatacaagaagagttgttggaactttgtaagtattctaattaaaattctgcttctgtttctgattaacataaaatatttcatctatatatttgcagcggttacatgcctccagagtatgtgacgcatggccagttctctaccaaatctgatgtttatagctttggagtattgattctggagattgtttgtggcaagaagaacagcagcttctataagatagatgattctggtggcaatttggtgacacatgtgagcaaaaaccaaaccaaaatattactctgtcttgattgtgaccatcgaggattttgataatatgagtttcttggcaggtttggcggctttggaacaatgactcacctttagatctcatcgaccctgcgattgaggaaagctgcgataatgataaagtcataagatgtatccatatcggacttttatgtgttcaagaaactcctgtagatcggccagagatgtctacaatatttcaaatgcttactaatagctccattactctgcctgtgcctcgaccacctggatttttcttcaggaacagatccaatttagaccctttaacttatggatccgagctggggcaatcgagcagcaaatctattccttatactatagatagtgcgtcaatcactagagtcactcctcggtaaaatgattgcttttgcactagtccgcagcattttccttgcagcacaagcaacttctatgtgtaaagaagttgaagatcaaatttgttttgtactaaactactaatgggtacatatatataataccaaacttctgtctaggtagagtactactagtcctttcctgtttgtttccatggcaagacaagaatttggcagactactaatctgataaattaacctccactacaaccacttatgaaccaattttgtatagaaggatctagaagatcacaagaataataaataatatattagatccttctatattttgtttagacttcttcagtcttttatgataatcaccaaaaacatctaatcctacgtgagactagatattttctacaaattgacaacaactttgttctagcacaattaccatgtgtttatattataccaaacgccaaaacccaaaagttaaaattttctacacataaattttgacaaaagctatataatcaatgtttaaatgattttgtggttaatagacaaaattttgtaaacgaaggaattgacaaaaacaaaaaaagagtctatgtaattaaaaaaaagtgtgtggacaaattacatttagacaaaaaaaatggagttttttttctttacacggtggattaaccttaaaatcgtttcagaaatgtgcccatgtaatgtaattggaggaagaaaaaatcatcccaaaaatagttctaacaatagatcacattaattacaatatttgtaactatggcttctctatttttctgtaaaatataaggccgtaggacattgtttttttttttttttttttctttttccaagtaggcacgacactgattatgccttagattccccctaaatattttagcccatgcacatcacatgtataattggtttcaagtttggtttttcttgcaagagatgcttccgattttataaacttttaaattttactctttgtttactataaaattccctgaataatctcccaaaatgtgtttttcttgtgccccctctattttgagggctagctctttttaaaaataaaaaataatatattaatatatgtgatgataattatgagatacaatttatggtaatttattttttgataatttagtttttttttttactttgaaatttatttctcgtatttgtaattctgatatacaaggtttaaagtttaacaatagatattaaacatatttcagatagaaaattaattaataaactatcaatgatgatcaatagaaagttatttaatttatagtttaaatcatacattatatgaagacacacatacaccatagcacaatagtgattatgccatggtctacttatttaatatatttacaatgataattatttatgtagtattgttaaatacaattattatgaatttttcttatataaaaaaattgtcgatgaattgctatcatttgatcttggttatctgattgtctcataaatctatgtggtgtgcggggttccatccgatcgacaccaatatctgcagttacatactggatttcctttcttggattgtcctgtagttgcaataggcttgcaaaaactaactccttgaggagatatcttttcacataaagaggtacacaatttcgaatcacatgttgatgcacccttagatacatgtgaagcatttgttagaactttaatacaaagacgttgttttcccactgttcctttcaccatcatccctaatatagtaaatatttgagacataaaaatatcagtttcttttttttgaagattaatgtttaaatacttttgcatatattaattaataaagtattggacataatggaaaaaagctatccaaaaactatggatactatggttttggaatgactttgatctttaacactatttgacaaggttttgatataaaaatattgaatttgctattaaataattaaatttagctatttaagtgagatatagaattgacattattcagatagattgcatgttcttaatatctaattttattttcatatgataaaatatataaatattttttaagaaaatatgtttgtaaatctaactacaaacctattgcaaggacgatgaagatagttagaatggttgttgatagttgactagctttcttcatctcatatactctaaacaaattgatgatgttttttttttttttttttttttttttttttttttttgttttgtcagatgatgtttttggttaatttgtttaatgaaaaagtgaacaaaatttaaagtatatataagaaaagttagatgtgtctatttttttaatgatacatcttagatctatcacctcctgaaatttaggttaaaaaaacgtggttctccattaattccatttttttgttaaaggattgattccaatttttttccttatctaattaaggagtcttagaagttagaaccacacaataatttcagttaacaccattaaattacaaaaaaaaactttttgatgggtgatttaagtaagaggagaaattaaaaaaaagatatatgttcgccttaaaatttgttgaaacaatgtgaaattcaaaaataataataaaaaatcaaatgtatttcggagactgcataactcgtctttggataatacattaataccatacattttttcttttattctagtctcttttctatatatatatatatatatttatttatttatttatttttaaaaacctatttagataaaacatagaagattttaaagaatagaatgtatttacgacaaaaaaagaaaagaatagaatgtatttacagcaaatgaaagtaacatacataattacatacaaaaagctagtaagaaccttcacaccaaaaaaaaactggtacgaaccaaactgatttaccaatcaacagagccgatcctaggttgtggggcttaaaacatttttagtatgtggtctttccaaaatatactaacaataaacgtttaatattaataatctataaaacatgaaagggaaaaaatactataagcattatctgaacgtgaaacaaaacaaacactatagaaacgtgaaaagaaaaaaattgctaagaaaaagggtaatttgcagcaaaaaaaaagaaggaacgaagtaagtagaagttgtggtcgtttgatcccacgatcaaggatgggtcgggcctgccaatcaacaatagaaaaatatattgtgaaaacattagcaatgaattgtcactagtccaaacagattacaacttttcaaagttctttacaccctcataatttcttgttttatgcatccaactctatggtttagcatatgtggtccagttgtaggagggagctttggtaaagggttttgttgtaatcttaaaacttggggcctatttatagaagaaaaaaaataattgagggcctattttgtaaagaaaaattttctaaaactttgggaatcacattcaattgtttctccttgctccgttgagttaccgcactaatgctcactactagcaaacacactctttcagtgcgacagcctcatgagcttgaagttgtttagcaaatcggttcctaccaatgtactaaaccggttatataatctgattatgtataaccaaaccggttattgtataaatgtccaaccggggttcacgattctaccgttgttccgcctaattctgatttgttaaacgacgagaaatttcttatggaagttagggtttcctggccgttgattggttcgttccctgttaccttgttccattccaatcagttctcgtagagcttctaatgtcacggctcgtgatggcttcttcaattcttcgagtgggaggatgcgtaatccatgtgccaatagcagagtcgtgctcagattgtaccaggggcggatctaggtgtatgggatgtggggcacgtgccctacattaaattataagtattagcttgtaaacttatgcagtttaaatgattcagcacaactggttaagtgttttcaatattcgtccatccttacccaggttcgagactagttgaagtaacttttttctttttttgactttgctcattttttcccccaattttatcaatttaatcacttatttcttcctttgatttatgaacatccacttttaactttcttttaaaatttctttattaattgattagatagtatatgtgtattgatatatttctaaaatgtttgatatatctattcatttacttttatgtgaaaatgaataacaaagttatatgaacacaatttcatagtttttttttgggtacctatataaattgtgagaaacaaattacagaatttattgaactacatattttatcacaaacttatagtttaataacgaatagtatatataataattttgataaaaaataatatataataagtaaattaatagtgccccagattaaatatttttctagatccgccactggattgtaccatggaagcgtctgatggagttgtcttaattagacatatgccaatggaaatgtaatgctgtccgacaatcgtcttgatgcttcaagtagcctgtatttttttttccgtgggggttcgaaacttggattcagtcaggtcattctttaatctttactttaaacccattgtcaacaatgcctctagtaaaacaatggttttgtattactgtttgtgctgagaaagtaataagataagctattgaaattgtcaaaatattactaatttgggtctttggattgctcaatttgttggttatttaactcatatcactctgcttcgttgtgttacgttgaggagattcattcaacaagcatagtgggcgtgtagtctgggtgcatctcacatcattaacatttttgaaacttcaacattcttttaataaacatataacacatcagctcattgctttgattggttctctgattttgtctatgctctgacttagcttttataatgccttggatattttaagtttgacaacttgctgagagaactcaattgctatttaactgatatgaagtgtacggatatgtacatactaaccccaaacacatttgtaaaatcatgagaaagaccaagaagatttcctttttgatcttctgggttgttctcataagcataattggtgctatttcttcgcaacaatgcaacgaaactgggtattttgaaccttggaaaacttacgacaccaaccgtaggcagatccttacatctcttgcttccaaagtggtggatcactacggcttctacaattcttccatcggcaaagttcctgacgaagtgcacgtaatggggatgtgcatcgacgggaccgaacctacggtttgctccgattgtctcaaggtcgcggccgaccaattacaagagaattgtcctaaccaaactgaagcgtatacatggacacctcataagacgctctgttttgctcgttactctaacagttcattcttcaagagggttggattgcacccactttacatggagcatagtaatgtggatatcaaatcaaatttgacatatttaaatacgatatgggaggctctaacggatcgtttgatgtctgacgcatcctcggattataatgcatcattatctagtcgtagatattatgcagctaatgtaacaaatctgacaaatttccagaatatatatgcattaatgctatgcactcctgatctagaaaaaggtgcttgtcacaactgtctggaaaaagctgtttctgaatatggcaaccttaggatgcaaagaggaattgttgcatggccaagctgctgttttcggtgggatctgtatcccttcatcggagcttttaatttgacactttcacccccgccaggtaattcctcaactaaaagaaaaaatatgattctaagaacgtatcattctgctaagttgctgaccaatagtttgagaaaggtttgaaacagattcaatcactggatgatgcattttctctattgtaaactatcctctgtgattctactatgcccaggtagcaaaaggaatatctcagttggattctttgtggccattgttgttgccaccggagttgtcatctctgtgctatctactttagtagtagtacttgtttgcagaaagagaaaaactgatcctccaggtgagttgattcgtattttactcactgatttctttttctttaagaacaataaggcatgcatgcttaatcaggaacactgcatgatgccgggacaagggaattttaactaggaatagtttattcagttcaatggtcaactatctaaaacttcttattagctaaccaatgtttattagaaaaatgaaaaactttggtgaatatgaaaacatatcatcatggtttagatttgttatgtgtacgtacttccatgttgcaaggaataatatgacatttctgtgtagcagaggaatcacctaaatattcactgcagtatgatcttaagacaattgaagctgcaacatgtaccttttcaaagtgcaacatgcttggtcaaggtggatttggagaagttttcaaggtaaatcttctcaacttccattaatgaatataggtggtgtgatgatcttattctctttattatttgtagggtgtgcttcaagacggatcagaaattgcagtgaagaggctgtcaaaagaatcagctcaaggtgtacaagagttccagaatgagactagtctcgtggcaaagcttcagcacagaaatttggttggagttctcgggttttgtatggaaggagaagaaaagatactcgtatacgaatttgttcccaacaaaagcctcgaccagttcttgtttggtattttgcatataacactcagctcatagtttttgaagttctaatgatgaagttgcagttcttgaaacttattttaattgacttacacagaacctacaaagaaaggccaactggattgggcgaaacggtacaagattattgttggaactgctagaggaattctatatcttcatcatgactcacccctcaaaatcatacaccgtgacctcaaagctagtaacatcctcttagatgctgaaatggaacccaaagtcgcagattttggaatggcaagaatttttagggtggatcaatctcgagcggatacaagaagggtagttggaacccagtaagtaccctttcttcttttttgcctttcaatctctgaagttttgatgacctttttgtcactggtaaactcaagaattattttttgttttctttctagtggctacatatctccagagtatttgatgcatggccagttctcggtgaaatctgatgtctatagttttggagtcttggttcttgagattataagtggaaaaagaaacagcaacttccatgaaactgatgaatccggaaagaatttggtcacatatgtgagcattaaaaactaaactttggaaagactctacttttttaaccatgcaatgtaacgtaaggttttgactactagtgatcattgtggtaggcttggaggcattggagaaacggatcaccattagagcttgtggattcagaactcgaaaagaattatcagagtaatgaagtcttcagatgcatccatatcgcgctattatgtgttcaaaatgatccagaacaacgtccgaatttatctactatcatcatgatgctcacaagtaactccatcactttaccggtgcctcagtcaccggtatatgagggaatggacatgtttctaccttctatcaaatctcttcctggttctgtcaacgattcattgattgatgacttagttcctcgctgaagatgacagttacttcatatccgaggtgtttctataatttctcttagcactttttacttttgttgtgttgagtcatacagtgttactaaaatacattgaaactctctcttacagggtttcctctgttcaagcgaagttcgaagataagctgactcaagcaggttttatataactcaaagattggtgtttttgaaagttctaaccggaaatcaaattggtttgtatgattttaaccgatttctgtttacggttttataatgatgtctccttggctatcttttgttggggtttgaatttgtttcttttgtattggttggaggattgaaaactaatgtacatgtaaattttggctagtcaagtttggctgctgactccatttgtctccaaatttggtctgctgacttctataaggtctctcaattggctaacttaatgcacgttttccttttctttttttttttttgtttggatctctgcaaatctaatgtaaaatggagcgacataacatgggagttttctgaccaattcacactctacttgcttctttttttggcagcacactctacttgtttagttattatattgagtattatgaatccatattattggtggggaatggacattgtggttttgattattacttctaactcttttttttgtcaaaatcaacggtcctatctgtcatggaaaatcttcggaggataaaccttctaactttgaacatttaacacagtctttggttctgatcttgagagaagaaactcaagagttcatttgttctaatcttttgttctttccttgtaaggttagatgttgtttctgcacaagtctgcttcaatagctactttaaacccaatgctacttacgacttaaaccgtcgcctaatcttttcttctcttgctactaatgtcacaactcacaagggattctataactcctcgattggtcaagaccccaatagaggcttcatcaatagtatgtgcatccctgggactaaacaagagacttgttcagattgtatcaaaggcgcatcagacggcttattaaggagatatcttaaccaaacagaagcttagacatggccagattgttgtatggtacgttattccaacatttctttctctggattttgtttggaaggacaagaaaaaataaacgtttacgagttaatttgtacctaacaaaagccttgactatttcctctttggtatgttatgagcttagatacttttaagttccaagatgtccttattgttgctaatgagtcatatacttgcaaatgtacagaccctgcaaaacaaggtgaactagattggacaagacggtacaatatcattggggggattgctcgaggaattctatatcttcatcaagatttacggcttacaatcatacaccgtgatctcaaagcgagtaatattctcttagatgtcgacatgaaacccaaaattgcagattttggcatggctaggatttacagaattgatcaaagtcatgccaattacacaattagaatcgttggaacatagtgattttttttttctcttaacttataaccttacaaatacaaactatatttggtggttacttctaggctaaaaagtctaatccttatttgcagtggttatatgtctccagaatatgcaatgcgtagtcatttctccatgaaatctgatgtctatagctttggtgtaatgattctagagattataagtggtaaaacgaatcgcagcttctactacattgatggttctcctagcaatttggtcactcatgtgagtatatgatcgttcaagttatatgagtgtatatgattaagccaaaggatattaatttatttgatcacttttgttaggcttggaagctttggagaacagggtcaccttttgaacttgtggatccgacaatgggagagagttctcggagtaacgaggctattattagatgcatccatatcgcacttttatgcgttcaagaagatcctgtagatcgaccaatgttgcctgcagcaatagtcgtgatgctcactagtaacatagacaattaccgtttgcctctcaaacatgaatgaccaatccacaagcaggtctattccttgttctaattaacaatgatgtatcaacacagttctagatcctcgttgaagaatggtttttttcttgatattggaactgtattgaatatatggaagtatctacatcatctcttgttcttctcattactctactttatgagacatttaaacaagtatatcagatagtaacattgtacaacaagattcacgttttaaacatattttcagtaaccagaattggttcagacataattaggcattggtgtttcatgtttgtgaagccaataactgaattcatagtttgtataatttaggaaatagacataagaaaatagtttgaactaaacgaacgcaaaacattagttttttttatccatggggcttggttacattgttataattgaaactgttttttagtttttgttgtattatatcatctttcgaggaagagctggtggatctggaccacgacatctctttgatttttcacatcctcgatggtacggattcgccggttgatcgggtggacagttgccatgatcacatcctggttggcgatcgccgcgtcccattcctggatagccaatctcatttgcaactgctacgttcatgttgttgcttatgaacacacatgctatgaacattgccacgaccataaacctttttgtttctttcaaaatgctcatgatgattgatgcctttttcttatgtcaaatatgagtttagatagttcaagagtgttttatgagtgtaatagaaggtttcactttgtgatatttatagagaatgaaaattctgaaagacaatgatccatacatatcaaaacagtgatatttgttgtataatatggaaggaatctcggggagtttgatttgtcttaatctttagaagcattgtgtcatgaaactatttgttggtaatactaaaaatattatgatgatatcttttcgttttagttttacttaaacagagatttgaataggataactgaaattggcagtagaaataaactactaaatatatagatgccataatagttaatagtaaaatttttacttttatattatataaagcttgatttggttttcaaagttgttaattcacgtgatcgtgacacgtctcacatctgtcagttagattatgacacatgttgaaagattttaacattttttaactaaatagaaaaattaaaaagaaaaaagtacatatctacaaatactatttctaaaccaactgagctctattatcttaatccaaaaagtatactagaagaaattaacatatactaatttacatgtgtgttatagagaactcttaaaattgtgttccttaacccaaaaaacaaaaacgaacaaaaattaacatacatactaatttatgtgtgtatagaaaactcttaaaactgttttttcttaacccaacaaaacaaaaactgaaaaaaatgtttttactaatgtttctaatttttattatcggtttacacgtggaaggagttatatgactagaaaccgtgtgtaaaccgataatagataaagagtcatattttcccaaagatattagagaaggagtcatattttgcagttcttttttgtgctagttttactcatttcataatcaaattcaagatgttcaggtatcaatatttgatcaaattaccagtcatgattctataacttgtgtactgaatgcaaatggcaaattctgactagtataaatgggtttgattaaaatgtgttatccggttgggttttgttggttttgtgtggtctaagtttgtttgttgacttccattagagctattgactcagtcaactttaatttttcaaaggcatttgcataattttccttagaccatctctttcaattaagaatgtatgacaaattcagtgaaccagtcaaatctgccaagagaacctacatagtttgagttattgatgcccaaacaaaacttcttgattctaatatctaaacacaatcttttttttctgatcttgagagaatgatgctcaatactttatttttaccaatcttcttgtttttcctcataacctttgattatgtttctacacaaacctgcttcaatggatactttaaaccaaatggtacttacgacttaaaccgtcgtcggatcctctcttctcttgcttccaaagtcacagctcacaacggcttctacagctccaccatcggccaaaatcctaaccaaatgttcatcattagcatgtgcatccctggaactaaaccagagagatgttcagattgcatcaaaggctcaacagacggcttgttacgaagctgtcctaaccaaacagttggttatgtatggccagattgttgtatggtacgttattccaacatttccttctctggatcactcattatggaaccgtctcaaccagtgtctgatcccgcacctatcggtgttgatttgacattgtttgatagaatatgggacgagttaatgtctcgtacgataactacagcttcgaggactcatggatcattatcatttgggcataagtactatgcagctgatgttgcttcattgacaactttccaaactatatacaccatggtacaatgtacaccggatgtttcttcaggggattgtgagttttgtttgaagagaactgttcttgattacaagaaatgttgtcgcggtcacattggcggtgcttttgtaagaccattttgttttatccggtgggatttgtatccttttgctggagcttttgaaaatattacgttgccatcgcctccaccaccgctttctttgactcctcccgtaagcaattaatgggctacgacaaccacacaagtaatgtgggactgctgatattattcaaaacttaaatgggctcgtttattaaaaggcctctttctatttcttcttcggcccattagtaaaatgtctcattctggttactaaaattacggtttggtatggttgctcaatttgggcattacttttttgtgttgcctgggaaagtttgaaaatttaggtttcgttgcatttttgttgttgtttggaatctaatttgggattctgatgtatgaattgaaaacgatttttatgtaaatttttgttgttatactccaagtttcttctgttgacttcataacaattcaattctctaactgtatgtttccgacaacagtttcctctgttttttttgttggttttcaacgaatctgatgtacactataatagagtaacataacaaggaatcgtcagatcatttcataatatacttgtttgattatctttatcattatcattagtggggtctctatgtctttgtcttcttgttatctttaccagcttataagggtttggtaaagtcaacgaatcagtctattgttcatcttttacgccatggataatcttcagagtagatccaaatagtatttgaagttgactctctaacttctaacatctaaagcacaatcctttgttgatttttgagagcatgaagctaaagatttcgtttttaccaacttcttgatttttctcataagcttagattctgttactgctcaagaaatctgtttcagtggattctttaaacccaatagtacatacgatttaaaccgtcgtcaaatcctctctactctttcttctaatgtcacaagtcacaacggctttttcaactccaagtttggtcaagctcccaatagagtcttcatcaatggcatgtgcatccctgggactaaaccagagacttgttcagattgtattaaaggtgcatcagacaagatatcagagagttgtcctaacaaaacagatgcttatacatggcctgattgttgtatggtacgttattccaacgtttctttctctggttcactcgttatggaaccttctgaaactctctatcatacgggagatatcgaagatacaggcactaatttaacagtgtttgatagaatttgggaagagttaatgctccgtacaataactgcagcttcattgagtagtagtaatggatcatcatttggacaaaagtactttgcagctgaggttgcttcattgactactttccaaaccatgtatgcgatgatgcaatgtacgccggatgtttcttcgaaagattgtgagttttgtttgaagacaagtgttggtgattatgagtcatgttgccgtggtaaacaaggtggtgcggtgataagaccaagttgctttgtccggtgggatttgtatccttatgctggagcttttgaaaatgttacatttccaccgcctccaccgcagtctttacctcagccaccggtttctttgattcctcctccagttagcgatagggcaaatacaaccatcaaaggtaatttccttcatatgatttgtaacaagactctgttgaaaccttatataattgaatcactcatttgcggcttgtgtagatggaaaatcattttctacagggattattgtggctattgttgttcctatcattgttatcttggtttcacttgttgtactactcgtggtttgcagaagaaagaagtcatataaaacaactgaggttcaaggttggttggtttttcatgttttgagtccataagtaagttatgtacaaattctggaaaagtggatgatgaagaagatgtttttcactttctttgtgcagctactgatgagatcacaacaacacactcactgcagtttagttttaagacaattgaagctgcaactgacaagttttcggacagtaacatgatcgggcgaggtggatttggtgaagtttacagggtaattagttctttctcttcctggtttgctacttctctgtataaagtttgactcatcttatttccgtagggaaagctttcaagtggacctgaagtagcagtgaagagactgtcgaaaacatcaggacaaggcgcggaagagttcaagaatgaggctgttcttgtgtcgaagcttcaacataagaatctggtcaggcttcttggattttgtttggaaggagaagaaaagatactcgtctatgagtttgtacccaacaaaagccttgactattttctctttggtatgttatgagcttagatacttttaagttccaagatgtccttattgttgctaatgagtcatatacttgcaaatgtacagaccctgcaaaacaaggtgaactagattggacaagacggtacaatatcattggggggattgctcgaggaattctatatcttcatcaagattcacggcttacaatcatacaccgtgatctcaaagcgagtaacattctcttagatgctgatatgaaccccaaaattgcagattttggcatggcgaggatttttggagttgatcaaagtcaagccaacacaagaagaatcgccggaacattgtaagctttcaattaaaaaaaactccgtttggtggttgtttgtagactaaaatgtgaatctttatttgcagtggttatatgtctccagaatatgcaatgcgtggccatttctccatgaagtctgatgtctatagctttggagtattggtactagagattataagtggcaaaaagaatagcagtttctacaacattgatgattctggtagcaatttggtaacacacgtgagtataatcatttaagttacatgagtgtatatgattaagccaaagaattattaatttaattagcaacttgtgttaggcttggagactttggagaaatgggtcaccgttagaactggtggatccaaccataggagaaagttatcagagtagcgaggctactagatgcatccatatcgcactattatgtgttcaagaagatcctgcagatcgtccattgttaccagcgatcatcatgatgcttactagtagcacaaccactttacatgtgcctcgagcgcccggattttgcctaagcgggcgtgatctggaacaggatggtgtagagtataccgaatccacaagcaggtctattcctggttctatcaatgatgcatcgattacagagttctatcctcgttgaagaattgttatgaatctgtggaagtatatatcaacatctgttcattgttcttgtccctgctctattttatgagatatataaaattataaatcatatatatgttgatgtacttgtaatacatttactgacattctagaataagaaacatgttttgaacctagtttcagtaataagaactggttcagacataatcttgtaccgtgtagcccaattttgctgacttttctttgcagggtctgcacggtccaaataataccatcagctaatgacattaagaccctatcatcaaagaaaaacactgaatgcaactgaccaaacgagaaaagattgaggctattgctcgggagatacttctagacaaatatccgctcttcttccttctagacaaaacccgagaagtctaactagatttcgatgctgaaactttgcaagtagagtaccctcgttcctgatgtttttgccaaacctcttcaactccactgaaaagtgtagcatacaaatacaacaaagtgcatcaacatcatcatcacgcaaaatggacgagatatactataatttagcaccacctcatatgatctgctggaaagagatattgcgctttttggcatgagccctgcaaagcgtcccaacacgcaatttgtatgcaaactagctcggtgatctttacacgtaatgtcacacaatagaacccaaatcttgaatctcttaaaaggtaaagtctttggaaatgggtccaaaggaggaagtaagagagagaactgaccaggtcccgggaaagaagacgtaggtgggagatggaggagagaaagtaatgttactgtcaaacgttgttgtattgggacggccatgacatgagcaagtaaagttttgagttgaaggaatgaagcttgtgagaaagacaaaaggaggaagaagaagagagcgatcttaacaacaacaacaagacatgctttgaataacttctcatgcttcaagatccttctcgagaagaatgatagtacatactcaaattaatattcctaaaagaagaaaaggaaaaatgtaattatctctcactcactcaactcaaaaggtgagatatttttaaatgaaaaatcgccttcattaagtgaaaaataattgaaagagagaaattgtttagtcttgcaataatacgaaacaaaacagaatcaaagtgttgatataactcaaaaggtgacacattctgaaaaaccatttttgggttttaacgatctatcttcactttgcttgtagtcttctggatcctgtaaggtatgcgcaattcaaagagcaaatgtgatttgaggttccaaggatcttcaagctggtaggatatatgcaatgcgacttacactccatgcaaaatggacgagatatactatatattgaccaccacctcatatgatatgtcataataatctattgtgcttcttggcatgagtcctactaagtctcccagcacgcactttgtatgcaaactagctcggtgatctttacacgtgtaaaaccatgtctttggatacgtttctttctcacaaatgtcacaccagtatttgccacttgcctcttcgccgtagcatagtgagagagggtgaccgtctactctatgctttaccacttgtggtaaagtggcgcaatcgaagcataagacatatccacaaccactttcgatgcacgtaagcacacgaacctcccgattgttgcaaccattgcattgtttttcttccacttgtgggatgtaatataaaggatgatggggatggcctggatggatatacggctccgagactaaaccgcacaaaacatctaacttcataaaatcacactgatacatgaagccattagacaatctactacaagctgtacacgagaagaagttggccacgcatgtaactaaagtaagccggtcattgtgtagcacgtgccattcttttttaggagattcagcgcagtgttggtgaagaatgaaatcacaatctttacaggcatagaacgattggagacgaacgggatgggtgcaagcactgcaacgcttgttttcttcccagagaagaccattaacatggaatcttaggtaatgctctttgtggctgaaatgttgtattgtgttgtcatcaattaccacatatggctctatatcttctatctcttcaggcactccttcgagttctttcccgttccacacatcctttctagtagcacatttcgagtgaacgacatattgaggacacctctgacaagaatacccaccccaagtccaatctaccttctggtgacaaacaccacatacagagttcacaacaccaagaacagaagtgcgagaaacacgatgagcatgccgattgatgtttatgaggcgtggaagggaaagacagtcttggtggattatgaaaccacattgaacacatatgtaagggcttcgatctcccttcagcccgcaagcattacatgtaaaagagtcgagtcttgggagaagggtgagttcgtgatcatgaactttcaaatccataacaaattgtggtggtggatttataacacaacgcatatctaagctgaagttgcaagaagaacaatgataaaacaatccctcaatctttcttgtgcaaagacgacatttttcatcagaatagtctggtggttgacttgtgtgtagcttaagagggtgtaaggggtgggaagaaatgtttacctctgattggttttttgcctccggtgggttccatacgcaatccatatcgaacattaaatgacattctagacatttgtaaggaaacccataaaacttcttaccacatttagcaatacagttgaacttggtccacttcttgatatgagtgagcttgtggtgatgcgtctcggaaatgtctataacatctggtggtgggtacttgacacagaatagatccacatagaagtcacagatcttacaacaatagcataaattctcgatccacatgcaacataaacgacatctatcataatctggtttactttgaagcttaagagcgttgttggattattgagagaaagaagaaaaacagagtaagagagacatatctcttctcttgtgaagaagacaagaacaaaactttgttttattgaagctgaaacttgttggtatttacatgacgatacaaggggtttatatagaaaacaaatagacacaacacataatgagttgtgtctcttcgtacttgtgtcccttgacaagtaaccacttaatatatgaaactttaatatagacagaactcaattatcgaccaacagtcccccttaattgagtttctgtcttcttccaaacttctcttcaacccttgaccttgtttacttctcccttgcaagtaaaacacttgtgtccgactttctccatctcaatggaaaaatcttctgcttcctcttaatatcaagtctccttcttccttgaggatcgttgatgagacatctattgtcttcaaataagagcccttagccattggaaatcatttgagaaacactcaaccaatttctcgctacaccggaactagaaaacacctctttgatgatcttctctccttggcttgttatcacttggatatttcctttcggtgtcctcttgatcaccaaatctgtgcgtgaactcctccacgtcttcttcggtgtctttttttttttttttttttttatcaccataacgtttccatgacgtcttgtgcgtgaatcttcttcacgtcgtcttcggtttactcttcaaccgacttatgctccatttttctccgaggtaagcatcatcttgtgctccatttttctccgaggtaagcatcctcttatggtgtcctcttttgatcacctccacgtctttttgacgtcttgtgcgtgaaaatctcttcacgtcttcgtcggctatctttgcaaccgaactgaactctgctccctctctcttaggtaagcagcttcacactcgtaggcaagctaacatctctgtgttgctttctccaacaatcacctcaatgtgatcgtcacacgtacaaaagtcacactatttcttggccttcttttgacttttgtcgccccgtttgtttcttccttttgaagcaaacttttctccacgttttcgtgttgtagtcatcttcacaactcaacacaacgttttgataataagccttgctcagtttgttacaacagcggctttcccgtcttgcgcttcaccaagacgttgttgaacaaattttcagaactctccttccacaactccaaatccacattcgttttctccattgcctctagagaagatttcctatcttcttcatcgcttttggagccttcctcttgaaggtacttcatgtgaatgtgtttgtgaaaactgatggtactttctcttgttaccacctcttatttcttcttcttccctcttcttcttcctcttcatctcaccatagatttgttgtctccatctctctttttcttttcgcagcagaagacatcttatttttgtagagacaaccaaggacaaccatcggctctgataccatgttggattattgagagagagaagaaaaacagagtaagagagacatatctcttctcttgtgaagaagacaagaacaaaactttgttttattgaaactgaaacttgttggtatttacatgacgatacaaggggtttatatagaaaacaaatagacacaacacacaatgagttgtgtctcttcgtacttgtgtcccttgacaagtaaccacttaatacatgaaactttaatatagacagaactcaattatcgaccaacaagcgtgaactgtgtgagatgggtgttcaatatattctaagcactcatcaacacatttcttgtggacataaaagtcacatcttttgcagtaatagccaccagtggtaaatccagagcgtccacagcaatcacctctctttagatcattccaaggcatcataagatgcttgtggatcaacggtagtgacactccctctaactccatggtcgtatactacaagatttgataagaagaagaagtgaaaaaaagaagaagaaagaagaagagaaaatggaatctgagatcttttttttttgctaagaaatctgagatctcaaaagtcaaaactatgctcaatctgagaaagtccatggtcgttctctctctacttaaatgtctttgtttaatctgaaagatgctcgtagtgctcatccaataacaattctattaaaaacatttatggtttattagttaaataactaagcaaagtacataaattgactagaagaaaaacaaatttttttttgtatgaatgtcaaatttattcaccaaaagaatgcatcagagtatcaaaaatctgaaacacatttgagatggatagtcacaacatgaaaaattcaaccgcgagtatgggtactaaaccaatattgcagccctatttcgaatgatgaccccagccttaacgaaagactaagccggttcctcacattcttattaatttgctttgagaacgtgggagccggtgttggtgtctccccgtgccttcgtccattccgttctttcaaaatcagaatctgtcaaaaggtagaaattttggaaatgggtatattctgaggaagtgggagaggtaaaaggttaaaagagttatgatgacggtgaagtatatggtgcaagtgacaatcgtattgactactgagacagtcatgatttaagtaaggttttgagcacaagagaaagacaataatagattatgggctttgtgtcttgtgccactaacttgtgcttctctctctatccacgtacttctctacttggccatgttgtggctgccttagatcttttatggtcgataaacataaagagacgattattgataaagatagtacacggaaataacagggaaatgataaccaaggtcttcgttttgttgtcatgataagctttacccgacttaaactatacggttaatcaactgttaaaagtgaaacccagtttgaattcagactcgaaactctaaacataaaagttaaaagttggaaaccctttactctagtttcttggaggcatttgttttttttttttgaatgtaatgttaaattaaactcaaaagaaaaatagcgtttgtacatcaagtgcgacttttgccgaaagagtttaaaaagagattttatctatttgctagttagttcccattctagattgaaaccaatattggagggccttgtcataccggcagtctccacttgcgttgattactgagattctgttccttacttgtttatcgatccgttgaaccagatgagtacccgagttaggagactccccatgtcttcgcccattcttggaggcatttgagtcattggtcttcaaggcttcgtcttgaggtttctcggtttcaccagatctggtcaaattcttctcaatatcctccttctctgtgccttgggcaggttttctgtgcttattgtcagagttgatgcctcatcccttgaagcataccaggaatagccacagtcaacagactccagctagatgcaagaacagaatcaaaatgtgattattaggatgcctcatcccttgaagcataccaggaatagccacagtcaacacactccagctagatgcaagaacagaatcaaaatgtgattattaggatccctagatttatttgcacagagaaggaggatattgttcaaaatctttgcaggctctaactcgccattgagcagtcgtctagccagcagtgcagtgttctgcagacacaacaaaaatgaaattacaattcaacacttaggagaaacgctaaaatgatgtttacgacaacctccacacaagctcacaaatatagacaagcatattattgtttggatgtgaagtacagtaataaaccattcctaaggtattctaatttaaccatgtctcatgaaactcatatataaactgtcataaaaacggagcatacaggcacaaacattctagtatggtcacagtctaatatagtttcctgttacaaaataaaaatattcacttctcgagcatcaagatccttcccaagaacaataatattattactcaagttttaagaagaaagaaaagagaaataaaagaacgcgacgatgactgttaagaagacaagtaacaagaaaatcatcttaatacattgaatgaaaattaatacacttttggggttttaatgaacagaattactggaagtacatacaacatcacaaacataacttttggattttaacgagcaatcttcactttgctggttgacgttttttgataccagaaacgatcttcggataccaaaaaccatctacgcagtttaaagagcagatgtaaagagctgaggatccaagcaccttcaagatgatagggtacatgcaatgtgactcacacgctctgcaaaatggacgagacatactattattgcgcaccacctcatatgatatgtgggaatacgttaatgtacttcctggcatgagccttgcaaagtctcccatcacgcactttgtatgcaaactagctcggtgatctttacacgtgtagaaccatgtactcggattcgtttctttctcacaaatgtcacaccagtatttgccacttgccttttctccatagcatagtgagagaggatgagcgtctactctatgctttaccacttgtggtagcctagcacaatcgaagcataagaaatatctacagccactttcaatgcacgtaagcacaagagatgaccaattgtcgcaaccattgcattgtttttcttcctctggtggaatgtaatataagggatgatgggggtggcttggatggacaaacggttcagaaattgaaccgcacagtacatctaacttcatatccccacactggtacatgaaaccattggagagtctatcacacgcagtgcagtgaaagtaatcatccttgcttgtaactaaagtaagacgttcattatgtagaaaatgccatttctttctaggagattcagcgcagttttggtgaagaatgaaatcacaaacaacacaaccatagaaagattggagaccaatgggctgggtgcaagcattgcaacgcttgttttcctcccaaagaagagcactaacatggaatcttaggtaatgctctttgtggctgaaatgttgtattgtgttttcatctatcaccacatatggctctacatcttctatctcttcaggcactccttcgagctcttttccgttccacacatcctctctagtagcacatttcgaatgaacgacatagtgaggacaccgctgacaagaatacccgccccaagtccaatccaccttccggcgacaaactccacataccgaattcacaacaccaagaacggaagtgcgagaaacacggtgatcatgccgattgatgtttatgaggcgtggaaggtcaagacactcttgatgtatcatgaaatcacattgcacacatatgtaagggtttctgtctccactcaacccgcaagcattacatgtaaaagaatcaagtcttgggcgaaaggtgagttcgtgagcatgaactttcaaatccataacatattgtgatggtgggtttaaaagacaacacatatccaagctgaagttacaggcagaacaatgataaaacaatctatcacaaatcttttgtgcgcaaagacgacatttaccatcagaatagtccggtggttgacctatgtggagcttaagagggtgtaaagggtggtgagagtggtttacctctgacgggttttttgcctccggcggattccatacgcaatccacatggaaggctaaatcacattcatggcatttgtaaggaaacccatacataacctccccacatttgctagcaccacagtcgaacttgatccctttcttgagaagggtgagcttgtggtgatgcgtctcggaaatatcaataacttttggtggtgggtactttgcacagtatagatccacattgaagtcacagatctcacaatgatagcatagatccacgatcctcttatcacatatatcacatatatggtctggtttactttgaagcttaagagggtgaacagagtgagacgggtgttcaatatattcagaggaatcttcaacacatttcctatgaaccaagaagctacagctttcgcagtaataaccaccactggtaaaaccgaagcgtccacagcaatcagccctagttagataattacacggcatcataagatgctcgtggatcaacggtagtgacacttcctcatattcctcatattccatggtcgtctacaacaagattgagcagaaaaggaagaagaaaaagttgaatctgagatcacaaagctatgctcctttcaagtctatttctctctctaattaaaagtcaatgtttactctcacagatgctcttagtcaggagaaaaacgattttaaaagtcactagccgttgatataattataaacaaagagacaggacccacaataataattgtacattgaaaaagttccattgatataaaatcctataatcgaagtctcagttttgttgtcttaattagcatattttttatcaagataaataattcctcaagcaataactttgatgaacttgtaccttttcattgcagcataatgacataaagcattgtatcatctaatgtaaacaatgaaagcaaatcaatattcaaaacaggaaccaatagaaggttttgttagcgcataaacgcattgatgtatacgagacaatccaagaacattaactaatttgtttgatgaagctttgatcaagaacaaccttgtgttcttcgatgatttcaacaacctcgctcttcactgcaaaatcatctgaacaagatgaagtggagttaaagatcaggggtaatgtcatctcctgtttagacaatgaagaattgagtagtaagacaatcttgaaacccagttatagattggccaccaatggagtctaataccatcaagtgtcctcatgatacggacaccattaatggaaagcaaaacagcttggggggcacacacatactggccgtgtaatttccatcttacaagatgagataatggcacacaaatatccaaatctcaagtctctcaaaaggtagaaaatttggaaatgggcatattctggtggagtaggagaggcaagatgataaaaaagggttatgacgacagtaaagtgaacggtgttagtgacagtcgtatggaccttgtgtctagtgccactaacttgtgtctatcgattcatgtccttccctacttggccgtggtccaactgcattggatcgttgataaagacaaatagactattgtcgacaaagacaaatcgacaattattgataaagatggtgcactaaaataaagttccataagagaaagagacagttgatacattgcccataaccaaagtcttagttttttttgtcatgacaagctttatccgacttaactatacggttaaccaactgttaaaagtgaaacccagttcgaattcagacccgaaactctaaacataaggttaaaaagttggaaaccctttactctggtttcttggaggcttcaggattgttgtcagcgttcgagtcattggtcttcaaggcttcgtcttttggtttattagtttcacgaggactggtcaaattcttctcaatatcctccttctctgtgccttgggcaggtttatctgtgactattgtcagagttgatacctcatcccttgaggcataccaggaatagccacagtcaacacactccaactagatgcaaaaacagaatcaaaatgagattattaggatccatagatttatttgcacagtaagtgaagcttgtacacacatactaccatctctttcttatgtcggttttagcaaattgtatgcattcaaggctagattgcgtattaaggaaaagcatacaaacctgatatcgatctccatgcccagcttggatgatatccctcaggccaaccgtcaattgactgcatctcgagcatcttacagaagtcatctgcatccggaatataaacacaacatagtcacagacgttcacattccctaacaattgaaatccaggaaactaaataaaaacttcaatttccagaaattaaaagacctgcattcgatcagcatcatcaggctccttctttgttgtctcgtcagcagttagaccctcctgaatcccagaaaaaaaactcactctttaatcgttttgacatgtaagataatactcactaatatttgcttactatggaacagaacagcattcagaagagatctgaaatggagtctatgccagtgaaattaaggaaaggagactgaagacaaaaaggggagagactttggctgcagttatgtaacataacaggttcttcacctttaactcagtgggtgacatgttcaaaatcgttgcaggctctaactcgccattgagcagtcgtctagccagcagtgcagtgttctgcagacaaaaccaaatgaaattacaataaaatacttggaagaaacgctgaagtgatttttacaacaaactgagaaccttcacacaggctcacaaatatagacaaactgagaacctccagtaataaaccattcctaaggtattcaaattttaccatgtctcatgaaattcatatatcaactgtcttaaaaacggagcatacaggcacaaactgtatgatcaaagaatcaagagtagaaaattaggggaaaaagtaatgtaatggcatgaatgcagattctataaccttgagattgaaaaccagtgtcctcatcttttggttatatttctgaaaatccgatgcaagagaagcatgtgaagcattctcaagagcacacacttgaggaacagcagcatctggccagagaaatttctcatcctgtcaatcagtttaaacaaaagagttattccaccaattactgaattctaaatagcaggtaatttggtcaattttggtaggaagaaatgtgaaaggtgactgtatgaagagggagaatatttagcgtgataaaaatgattgaaacgtttagctaagacctttccattttccggctttgtgtctttctcatcctgttcaagatgagatgcatctgaacccacctttgcttcgtcgccagcctgtttgttctcagggatataacatatgtgctggactgcctccagaagcttccccaaacacttgtcacgatgagcatcacctgttagtgaatcaaacttctctaagatagcataatgctctgatgaaatacccgcaccacttccaggagtttcagcctttaaagaggcgtcttcctcccttctaacatccacaggacttatgtttactttccgaaaagatcttttggccttcaacacattttcctggtcaacaagcatatcctcagattcaaggtccgggagatcacccaatacgttcatggtctttttgacaagaacatcgatttcacgttgttttgagtcttcatagtctttgtcagtcagcttccacagcttcttttcaacggtatcatagacctttcgtacaataaatccagggttatttttgcgttttggaagttgtttatgggccgggacaaaataaacaacacatctgtgcatcacagattctgctggcacttcatcacgatggaaactgtagaaaagttctcgtgtatcacttgattgccagtttccaccaccccttttctctgcttcttcggggcgataaaaccactgtcccagaatcatcatgcttccatctttagtttgggtaatatcctgtcaaagaagcatgtgtcattatttcaaagcggacgacacaacaaaaactaaaaagatgaatacaaaatttagcacaccagcaccttaataattgcaacatatggtttttgacttttgtcctcaggaaccagcaacaccggaacctcctacacaaaaaaaagattataagagagactagaagtaaatggtttctaaagtttcaagctttaaatcaaccagacactatgaacactcatgaaaaacaagtatacgatcctaaacattcaggtgcaagagaaatcatgatgcaaaagaaaaacttccgaagtctcaagacacggtgcagtcagaactagaaatctaaacaacataagcgagagagaaacattcctctgacacagcaatggatgttcaacaaatgacaacaaccatgagcgtataagaccagttattgacaaaagtttctgttcaaaacccataaaaacataaactcttccagcaaacccaaagcgttgatacatcataatgtcacagagacatcaaaaaatccttaaaaccctagatttcaatatccacaacaatgtaatagcagcaagcaatgcagactcaattgtaaaaaaaaatctcaaaccaaacctcaattccaaatccacaacaagaaaaccctgtaatctcaacatgatcacagcaatcaaaacccaaaattcatcaaactcaaccaaaatcaaaaaccctagagataaaacaaaactcaccagatcataagtgttaccatcataagcaaattggttgaaatgagttcttttcccttttcctttacccgtaacattaaccgaatcaccaacaggacacgcatcatcaggcttctcttcttcttcttcgtcttcctcttcttcagcctccggatttgtttcttcctccgcctgatcatcatctccctccgccatatcctcatcctccttattcccctttctcttcttcttcctatccgcttccttctcttcaaaatcttcgtatagcttcaccgtcttacgcttcctccgtttccccaaagattcctcaggactcgccgagtttcttcccttagacctagtaatcggtacatcgtcttcttcgtcactcgacacttgagcaaatcgccgagacaacaccattgcttcctcttccagaattatcaaaaaattggatctttttatttgtttaatatgagaagtggtttctctctgcctatttataatgttttcacttttcacttttcaccctatctcttttcttttaccaatttagtgagaaaaaaaattgtttacatctatgactatttcgtaaattagtcccttttttaaagggtttactagaaaattttcattgttagcttaaattatttttcttatacaatgaatatgaaattttttataattaattaaataaatgggtaaacttatgtggttaattgattttttttttttgtattttcatcaaatatattaaatgtatttacacaccaaaattatccactaacttgaaattgatgattaaaattaattttatacaaatatattttctaattatttttatagatgatattctactaaaacttatgactgaataagactcctaaaatcagatgggctttataaaacatattgggccggaaaaaaaagtgtaacagacatcatctttgtacccagcacaaaggaaaatggccataaactacaattaatgggcctgaacctaaatgggccgatattctgctttttgataactgatacgtgttgtcttaaaagacacgtgactttaaaagattcaagagacgtggcaaaacagtaatctcctctcttgtaccgctatttcagcgtagaataatctttttcgtagacatcacagattttggacacgtggatgatttattaaccgtgaagattaaaaaaacgagaaatatctggattaacaatttcctgtgaataattacgatccacaaaaaagaatattaaaatcaaggaaaagaaatagtataattgaagaaaaaagctcgaatttaagagaatcacaattaaacccaattcaggaaaaagatttcatctttgagtttttcattcatctatcggttgtttccattctcaggtttcagtcgaaaattccctctctttcttttcgatttgatctgggtttcattgtacatagctcgatcttcaagtttcgtcatctgggtcttgtaaagttttagacttttagggttgttttacttgtgaagtttctctcttttctaatggattctctgggtaattgatcgattagggtttaagattttagcggtggggaaagctgtttggttctagaattctatcttgattaacgtcacttgcagctttctcacaggttttggaattgtactaggttttgattgataatcatagattggtagtgatttgggagtttcttgattgtgtaatcatggcggaggctattggtgctgtatctttggtgggtcatcgaccttcaattgtgaggattacagtgaagaatgaattgaaaacgcagaaatcacagagcattgttcgctttccggtgaaggtagattatagtgcgaaaggtgttctctctcatttgatgacgcagagtgtgaaaaagaatcgaatgtcggtgtttccgatcagggctcttgctatggaattgacgaaagagaagaagaaagacgatcggttaccgaaaacttggaattatcttgattctggtgctgatgataagcctagtttatggcctcctgagaacaaagctgataagccttcattgcataatcctttacttaggcaagagcggatgggttgtggttggttaggtgctatatttgagtgggaaggagtattgattgaagacaatcctgacttggataaccaatcatggcttactttagctcaagaagaagggaaatctcctcctccggcttttatgctcagacgtgtcgaagggatgaagaacgagcaggccatatctgaggttctgtgttggtcgagagatcctgttcaagtgagaaggatggctaagcgtaaagaagagatctttaaagctctacatggaggagtgtatagactaagagatgggtcgcaggaatttgtcaatgtcttgatgaataataagatccctatggctttggtatcgactcgtcctcgggaaacattggagaatgcagttggatcgataggtatcagaaagttcttcagtgtgatagttgcatcggaagatgtttacagaggtaaaccagatcctgagatgttcatttacgcagcacagcttcttgatttcataccggaacgttgcattgtatttggaaactcaaaccagaccatagaggcagctcacgatgggaggatgaaatgtgtggctgtggcgagtaaacacccgatttatgagcttggtgcagctgagctggtggtaagaagactagacgagttatcgattatcgatttgaagaaacttgctgataccgatttgacagagttcgaaccggaattggagatggaaaaggaagatgagcgtgagctgccttcatcggctgtagcagttgatgatttctgatggaagtgatcttctgtaatgttgtacagttttatggatttggattcttcctcgtgtaattcacaaaatgttatagtttctgtgtataattggaacaagttaaacgagggataaatataaaatgtatactcctagttttaatgttgtgtacgttatatatcatttgatttgaacattttagctgatcattcgttcgaaacaacaaacaaagcttttcaatattttagtacatttgattaatttttcaagcttctgagtttgcgaagctgatagtcttgagcgatgattagtgttttaagattcttccattgactaaacgcaaactgaaatgagtcctcagttttatagcaccagaccggtaaaacaagcttctctatgtttggcatcctgagaaacaaaacaaacaaatgagatcctcctcttgtatacgactttaactatgattcattaaataaaagatgaaagttacctctcagcagcaaacatgagatcctctgtttgtacataggaattgaagtgaaagaacaaattcttcgggttcatgcggctcaaacggaggttgagatcaccaagctgagccgcatgaacctggagaatttgttctttgttgacgttttcaaaacatgaacataattttatcaaatgaaacatatagtaacatacacatcttatatatagcagtgtttttatatgtaagaggcacatatataagaaaaatattgcttgtgaaatagaatcggtaacgttttctgaaaaaacagccaacaaatcttttcagaaatatcagaattcaagttcctttatctcatcattccgccaaacctcagcgagataagacaatgagtagcgacaacgatctttgcaaatcatacaatcgtgaggacatgtgataaatttctcaagcttctgagtggcggctgttataacataattgtctatagatttcgctataggaagaaaataatcatacgggtttttgcaatgtgaaacattaagaatcgtgaggtttggaaggccggtgataaacctgtaaactgctatagaactgaccaaaaagcatcgtaaactcaacctcttgaggctatggaggtaagacactatttccctggacgtgtattcttccaaacgacccaaatattttaagttggttaggttactacagctctcccccacagctttaaagtcgaatctcccgctgaaagagtgttcatgagcgatgatcaatgttttaagattcttccattgactgaatgcaaaccgcaatgacttctcgttttgatagcaccagattggtaaagcaagtttctctatatttggcatcctgagaaacaaaacaaaaccaaaaaaaacaaaattgtatgagaggcacgtcattcaagaaaatctgactagatggttggtgaggtttacttctcagcagcgaacttgagaccattttcctgtatataggaattgaagttaaagaacaaattcttgggggccatgcggctcaacttgctgatctcaactaatagattcatgagacttatgctgccttctacttcaaaaaagtcaagaaagaaccgagagatgatcttagtcaaaagattcgtaaggccatgtttatggtcaaccgggtgcttgtaaaagaaaattggtctttctttatccttaaagttgaaaatgcgggagacatctaactcttggagattggtgaggtcgaccgtgttccacagagttttattgtgagaagcaaggaaccaagagatgcagacacgtgaagctcccatggtaatgtccatcacgtcgagcttattgaaaataagttcaagtatgtctttgtttagatctgcccattctgaaacttctcctgaagtactttctaccttc

SEQ ID NO: 1098 - DNA, 114759 bp, Arabidopsis thaliana
gaattcgattacccgttttgaaaaccctaattgcaatggggaagacaacgaagctctcctcaccgcaccactgagactggggagtgctcttctctctgtctttacagttttacaggcaggaaattcacagtccactccatgttgccggaaccaattgggccattttataatatgggcctttttagtggatactaggcccattatatccataaagtttataacccaatggaacgcagcttgaagaataaataccatcatgtggggatcatggcgacaagaagaaagagtagccgaaagagagatgaaagggtttgtttagggtccctacgggatcttggtgagatgatatagaaaaggaacggtaggtaggtacttcttgctatgttgtttggtaagctcgtctacttgatctctctttcgacagcaactcaaacacgcatcataaagaatatatagcatcaaggaaatggccaaggttcatcccaagtcactagaaacgggcggggacgcgtctgtgttaccagtttggaagaagttatttatagcgatggtgagattgaagatcgagagagaaaagtttgttagacaatttctcatcttatttgataaaacaatctgtacacagtatagtatatatacaattggtataatgttaaccggtctgttgaaataaataatattctgcataaccaattaaactggtgaatactcaaataaagtttacgtgtgatatcataatagtaagagaaaagaaaacaaaagtagagtccttttgctttattgagattattgacaatatctaattggatcacagctcaaagtgctcttttttttttttttgctaaaaggttaatatcatataaatgaaagatagttttggatttacattttgattaccataagaaatagacccttgccaaaaaaaggtaaaaaacaaggaaatataaagatggaaaagcagaggagtgaagcttcaaacaagccaaagtcccatgagatttctgaactttttccggtgccgcctcgccgtgatgctgtttagtcaaacaaattacaagctcctcgtgcagaaaaaaaaaacatgatttgtttatccatcaacaattagacatgtaaaattgtggtggcatacatgtgcaaatagcaacagaaagttatatatatacttcataatcaagtaaagattagcatctatgatctaacacagattatttttttctcgtcgtcgacatagaaaaaaacttaaatacagattaatattgtgtttatttttgtcatcacatattaccgaaaaaattattgaagtttctaaagccgtaacggacaaaataacaaaagtagaaaaagtgaggaaaagataagaaacttattactgctgatgtcagcactaatttgtgtatggggattcgtaacgaagagagaaacaaaacggaagtctcctaataggccccacctctttcaacaaataaatatcaaccacacgattaatcttacgtcctcaacaactattaacgtagaccgtacgattctcacacgaaggcctctctttctctttctttcttcctctaataagcggcgaaagagattctctgcaacttgttcgattccttactaaggctttctcgatttacgttaatctgagaagagattgggtttagtgaatcttgatttccgtggttgtgtttttcgattttgcttctactccacgttcttgttgttgttcccttttagctccagattatgcttttctttttgttttcttctcttcgacgatatctgccaccaactcgagtctcagtttaatgaaatgtttgtggatttttggtaaatagtactaatgggtatgtttcttttctcctctatattcgttttcttttccgagaacacaagtagtgtctagtgaggcttgctttgatttggtgaataagaaaggttaggattagagcagcttaaatttagggtttttcgagcttgaatgctgtttcctctattactttatcggttgtgaaactgtacgacatttgtttcgaaatctttgctaataaaggtttcatttttcattttttttgtcaagagttggaattgaattagtcttttctacattgtggtcaataatatccgagtctctcgtgatttagtttatgcataaatctgagagtgtgtacgtaatcatagtgaaagtttctttatttattgctatatttgtttaatggagataagtttcattgcttcttctttgtagatcaataatggctacaagaattgagtttagagatattctgtagcagggctaaagaacatcagagatggcagaaaaggagggtaaagcaagtggcacagacaatgacaatcgggtgaaaacgaaacgttcaagtcatagtcgtcgaaaggaatgtgtcaataagagtttggaacataatgatgagcttgtgaaatatatgtccaagttgccaggttatctccaacgtatagagagaggtgaagaaagcgttcatcaaagtaatgttttgaatgttggagtcttggattgggaaagtctacagagatggaagcatggtcgagcaaaaggcggtgaaatatcaggaagaagtgagagaaaagtgtctactattgctactacttctacttcaggagtagtagttcccaatgactcggctaataggtgtaagattgatgaccaagtgcatacttgttcgaatctcggtaaagttaaagcttcccgggatcttcaatattctctagaacctcagctggcttctagggattcattaaataagcaggaaatagcaacttgtagctataagtcctctggtagagatcacaaaggagtagaaccgaggaagagcagaagaacgcattcaaaccgggaatccactacaggtttatcgtcagaaatgggaaactctgcggggtcacttttccgggataaagagactcagaagagagcaggggagatacatgcaaaggaagcaagagaaagagctaaagaatgtgttgagaagttagatggggatgagaagatcattggcgattcggaagctggtcttacttctgaaaagcaggagttcagcaacatttttctccttcgatcaagaaaacagtcccgaagcactctttccggtgagcctcaaatctcaagggaggttaaccgctctctagacttttccgacggaatcaatagctctttcggattgagatctcaaattcctagttcctgtccactctctttcgacttagagagagattctgaagatatgatgttgcctcttggtactgatctttctggtaaaagaggtgggaaaaggcattcaaagacaacttcaaggatatttgatcgagaatttcctgaagatgaatccagaaaggagagacacccttcaccaagcaagcgatttagttttagttttggtcgtctcagccgaaatttcagcctgaaagatatttcagccggccaacctttgagttcttctgaggataccattatgtctggttctatgagatttgatggttcagtttgtccatctcagtcaagtaacccggagaaccagaacactcattgcagatctcgagttagccctctaaggcggtttcttgaccctttactgaaaccaaaagcctctgaaagtgttcttccatcaaaagcaagatcaagttcttccaatccaaagccaataaccaacagcaacgtaccacttcaagatgaaaagaagcaggatgcatcgagaaccctagctatttttcagctcacaatcagaaatggcatccctttgtttcaatttgtggtcgatgataacagcagcagcagcaggagcattctcggggctacaatgaaaagctcagattcatcgttcaaagatgattctgttcagtactgcacattctactctgttaatgaagtcaaaaagaaaaaaagtggaagctggctaatccatggacacagagagaaacattgcgggttcgtctacaacataatcggtcaaatgcagttgggaaactcaatgagcgtagatatatcagagcagaaatctttgatcacagagtcagttctgtttgacgaatcagagcaagtaaaagggaggaaggaggttgcagctgtagtgatcaagaagaagcctgtcgaaggaagctataccagcttcgaggaaactagtgtgataattccaggcggcgttcacagcttccccgagaaaggagcaccgtcgccattgattagccggtggaggtctggagggttatgcgactgcggtggctgggatgttggatgtaaactacatgtcctctccaacaaaacagtcctccataaattcaaccaaagcttcacacttttcgatcaggtaatataaacataacttaaccaaaacctttttctaagattttcctgcaaacccatttcatataaaaaatatgtgtttgcttttctattttttatgccgtgttcttgagagtagtcgttttacatttgcaggaagtgagtgaacaagactcgagtccagctttggcgatgacagagctgaagacagggatctatagggtggagtttggttcgtttgtttcaccgttacaagcgttttttgtgtgtgtgacggtactaacatgtgcttccaaggcaaagaccaccggaaaatcttcttctcctatggctccgccgctatctcccgttggtagagtctaaactcaggacacagatagagagtatctaatgatcgttatctttcttataaattcctaacgttgtatgctcttgtgttgtgtccaaaaagacttaaatcataagagtatacactactattaaagttacactatcaactctacacatatattgatttgcttagagttgaagaaatacataaacaaaaatgttcaaaaataacatttttatatagataaaataattgtctctcgtacaaatcagttcaagcattgtagtgcactggtgaccagaatttttcataaatcaactcaagaaaaatactgaaattttaagaaacaatgatttccaaaaatgtgaaaattgtaaatgtattttttttatttaaaaatggaaaacgaacctaaattacttttagtaagacaaatcaatgttagtcgtccgagagtcatagatcgtaggatcccgagtgcattgcggaagattcgacggtggagatggcaagctcgtttccggagttggcccgttttgaactatgaaagcactcataatcccgtatggtaaatgtgcatccatgtgacaatggaacagccatacacctgcaaatatacaatttcatattcatattaacccatcgattaacatatatttggcgttgatactagatattaaatatatatatatatatatatatatactttataaaaaaaacatgttactaaccaggattattagcgataaatctgaggacaacccatccgcctggtggtacaccaacggtattatgcatttgcgggttaaatagattaagctttcttgcatcacgaataggatcatagttaccaaatccataacctaacacatagaagttgaaaccgtggaggtgcatggggtggctctccggggagattatagccgtgttctgcaaaacgatctcgactgtagaattaaatctaattttcttgacgctagtctttctttccggaaacatcatcttcatgtcattattggtacgttgttcgaattttgtgtaatcaaatttaagcggtggttggttgggaaaatcgtcggtgtagatgccactaatgttgtaaaaataagcctcttgcatagagattctctccgggatcataaaagtgcggttgttgagagaaccagcatacctttgacctaacggtccaatacacttggtgcccgctggacatgggtctaagccaagccccatggttatgaacatcttctcgtccacgtgacgagggactggtgtccagtgtggtccaccaacgaggctagtgatgtttgaggtgaacctatgagcggtggacatgtcattcggcacaggcatcaacggctccgctggcgatgatgatgacgtggcaccctggtagacgattaagcctctggtgggtttgatgtcgggggttggtatcccaatggcactaatgtaagggagggtggccatgtagtactttccaatggcctggtcggcggtgagaagtgcgtcaacggtctgtcccggcgttaagatcatcacatcggtgaggtacggcgtcgagtagacagcatctacagcgacaactgtgacgttgtgattggctattttgaagaagaggtgagtgttgagtgctgcgtttacgatccttagcaagtatgtttttccttgtacaactttgaggttaaacattcctaccaaagccaaaaataaaaataaaagttaattctgttttttgtaaacaatttacaataaaaagtaacttttgattcaagtaaagagtgagtattactattctcagagcaaggatatgaatctccggcgaggccattgatgaggtaagcatcagaaaccggagctggccgtaattggagaagtctaacatctgtgtcccaccattgttcttgcataataaaaaaattcaaacaaagttaattgataattatgaatcctatatatcataatttctttatattgtatatatatataattatatttagtggatatttattaaaaccgaaccaacttggtcataatactcgtcagaatgtggcgtagatcgagaaagttgtatcaacttgtaaaagacagctgtttgaaaaaactatattttttttgagatatgttgcttttactattatattgaatcactataatcgagaattgtcgctgtcacaaaattgatttcgactttgcaaaaaaaagagggaaatacttacgaaaaacgataggaacttccttgtagggtttaggaaaagggtaaggacggccggatcggggacggatgactagagccccgtgaagagtggcacgtagattaacgacgtgtgcgtgccataacaatgtaccttcttgtccagtgatatcaaattgatatgtgaagttgtaacctggttgaatcggacattgagttatcatattcgcaccgtccatccatacgctcttcaactggaaaactccatgcctatacatatatgtgtgaaattaagaaataacttttattaacatctaaaaagtcagtaattagttgatgaaatgatattgaaatcgacttccattataaagaaaaaaaacaatagtaatgagatcaataagttatctaattaccagtggatggttacattgtaagttgagttgttaatgacattaaccacaagagtgtcgccttctctaacgtttatcgttgggccgggaagacttccattagctgccggtattatttgctccttgcataacggtttcaccacgacgtcttggatctgttggttagacgtcgttattagtattgtgttactattaaatgttttttaccggcaaagttaaaaactaaaaatcggggctcatagattagagatccatcaaatacggtattaatttctgaaatcgaggaaaagaaaacacaaacacacgcaattcaacaactttccgattttaagaaataaatgactagtatataaaatggaaattggtaatataatatagttcccacagtaataaaattaatagttaatatttcgaaaattttggttaggttattaaaaaagggagagaaagtggtataagagtaaatacgtggagaacatgttcgacaacagctgctgaggcaatggaagagaagagaagaaggacgaggaacgcttgatttgagagataatgatgaagtcgaggcattgttaatgtaaggataatttgccccacttgtgattttgtgagagactcgtacgcgtatttatagaacgaactaatagagagagatggcaaaactaaaatactatattattattcaattattaatttgccagaaatggcaatctagacacgattgaacacgtcgttgaccaaccaaaaaaaaaaaatagcaaacttccctcagggattagtcattatatactgtaattttctttagggttatgtcacatgttaaaactagtattaatactacctcaaatttatttagttttgttttataaaatttgcttttgtatttttaatgcagaattttcaacaaaatttgtaattctctctttcaacttataaattggaggttatcaaaaaagaaaactagttaattggacaaaacttatgaattgaacaattaaactcatcataagtgtttaaatagatgatataatataaagttaaacaccttttttatgaaacaccccaaaaataaggtaattcgttgcaaaagaagctgttagatttataattatattgtaacaactatgtttttagtttatatacaaatttgattgcactttcagtgttgtaaaaaatatactccatctgaaaagaggttatatatgaaaaagtactttgatcatcccttttttgataaaggatcatccctttttatataacaaaagtgtaatcatttatgcccgaacggaaccaaataatcaaatgtccacccctaatgattgcttctaaaatctaatttattgtttttctgatcacgaacaaatatataactacaaatttaatccaaatttctttgttttcgaactaattcaaccttatattcccgttcttacatgaaaacatttgaagcttacatttagtaattaacattaccatattctatatttttttaaaaaaaaatcttctcgagtcagcggcacacataaacattatacagctaagtaactctgccatgtgaatcacgagatcgatttaatttaaaaggcgaaattgtcatgtgtaccgttgtgcgtgcttagtaagactcaggacttaagagatcaatataaatcaggaaaactaatatacttaatgccagttgcatttgattactgactccaacacatctttacccaccccttacatattaatttataaataaatgtaaagaataaaaacttgattttttcatgtaaatattgatggacttgtcattactcattagctttattaatcaaaagaatcagtcaattatattgtatgacttgccaggcgaaaacaatggattagctaatgataagaaaataattacttttcttttctataacgacatttttcgccacagttgcttcgattgaagattattgggctagatgataaagtttaacccattaggtctaaagcgtatttgtagcccatttatcctttttttttattgttatgaaaaaaaaaaccttatacataaatctctgaaccgatcgttccattaatgcattaaccactatagaatataatgaaaaaaacttccatacattgaatcgcgaacaaacaaaaaaaggggttaactattacctacgattttttttttgtgaacaattattattattattattttttgtgaacaattattactacgatatatttcgaaaatagtgttaaattaacaataaaattatagcaagtatgattcatgacctaacgacacaagtaaccaacagatattatatccgtttgacatttttttttttgccattgttaaatatataaataataatcttattaattttcgtatcatagccagtgaaatatatgtccaagttggcaggttatctccgtatggatagaggtgaagagagcgttcagagtaatgttttgaatgtcggagactcggagtcttggattgggaacgtgtagagaaatggaagcatggtcgtaaataaacacaagaaatatactgaattttaagaaacaatgatttcgaaaaatgtggatacaatgactacgattgatagtcaacagtaaatgtaatttattttcttaaacgaactttgctacttttagtaagacatatcaacattagtcgtccgagagtcatagatcgtaggatcccgagtgcattgcggaagattcgacggtggagatggcaaactcgtttcccgggttggcccattttgaactatgaaagccatcataattcctaatggtaaatgtgcatccatgtgacaatggaacagccatatacctgcaaaaaaacaatttcatattcttattaatccatcgattaatatctaattggtgtaaatactaaacatatagaaatgttactaaccaggattattagcgataaatctgaggacaacccatccacctggtggtacaccaacggtattgtgcatttgcgggttaaatagattaagctttcttgcatcacgaataggatcatagttaccaaatccataacctaacacatagaagttgaaaccgtgaaggtgcatggggtggctctccggggttagtattcccgtgttctgcaaaacgatctccactgtagaattaaatctaattgtcttgacgctagtctttctttccggaaacatcatctccatgtcagaattggtgggatgctgttcaaattttgtgaaatcaaatttaagcggtggttggtcgggaaaatcgtcagtgtagactccagtaatgttgtaaaaataagcctcttgcatagagattctctccggaatcataaaagtgcggttgtttagagatccagctaacctttgatctaacggtccaacacacttggcgttcgaaggacatgggtctaagccaagccccatcgttatgaacatcttctcgtccacgtgacgaggcaccggcgtccagtgaggtccacccacgaggctagtgatgttcgaggagaacctatgagcggtgggtatgtcattcgccggaggcatccacggctttgttggcgatgatgatgacgtagcaccctcgtagacgattaagcctctggtgggtttggtgtcgggggatgccggtaccccgatggcactaaagtaagggatgatggccatgtagtacgttccaatgggctggtcagcggtgagaattgcgtcaattgtttgtcccggtgttaagatcatcacatcggtgaggtacggcgtcgtgtagacagcatctacagcaacaactgtaacgttgtgattggctattttgaagaagaggtgagtgttgagtgctgcgtttataatccttagcaagtatgtttttccttgtacaactttgaggttaaacattcctatcgaagcggaaaaaaaacgaaagaaattatgtttttttttgtaaacaattgtgttgtgtcaattaatatggaagtcgatcatttacaaaaataatttaagtgaagagtgcgttttactattcttagagcaaggatatgaatctccggcgaggccattgatgaggtaagcatcagaaaccggagctggccgtagttcgagaagtctaacatctgtgtcccaccattgttcttgcatgatcaatatttaagaaaacaaattaattaacaatttgaatactatcataatatatacatatttggtggatgtttatatattaaaaccaagccaacttgtaatactcgtcacaatgtggcgtagaatcgagaaagtcgtatcaacttgtaaaagacagcttttgaaaaaacaatatatttgaacaaatattgaataactataatatttagaatttaaactatagtcgagaatcgtcgctgtcccaaaactgatttcgtcttaaaagagaagagaaatgcttacgaaaaatgagaggaacttccttgtatggtttagggaaagggtaaggacggccggatcggggacggataattagagccccgtgaatagtggcacgtagattaacgacgtgtgcatgccacaacaatgtaccttcttgtccggtgatatcaaattgatacgtgaaattgttacttggttgaatcggacattgagttatcatattcgcaccgtccatccatacgctcttcagctgaaaaactccatgcctaaaatatatatgtgtgaaatcaagaaataacttttattaacaccaaaaaaaaaaaattccctaagaagttaattacttgatgaaataatattgatatatataaaatgatttctagatgatcaataagttacttttaattaccagtggatggttacattgtaagttgacttgttaatgacatgaacgacaagggtgtcgccttctctaacgtttatcgttggaccgggaagacttccattaactatcggtatcatttgctccttgcacaacggtgtcaccacgacgtctttaacctgtttcttagacgtcgttattagtattatataaaatagttttttggcaattaattttttagtggtaataaaagttaaaaattaaaaaaaatagtattttgtttaatataggttccactgtaagaaaagtaatcggtaactttttaaaattttatttatagtttatagagcaaagaaaagaaaaggagaaataagagtaaatacgtggagaacatgttcgacaatagctgctgaggcaatggaagagaagagaagaaggacgaggaaggcttgatttgacagagaatgatgaactcgaggcattgttgatgtcaggatatgataatttcctctacttgttgatttcgtcagagactcgtacgcgtatttgtagagatgtggcaaagttttgatgaagtttgcaaaacttttatattataataaaaatattaaattattaatcagccagatatggcaatctcaaacgcgtttgcacacgttgacaaaaaaaatatcttttttctgtcaattgaaatattaaatgaattgtgttgagatgtcgttaacctctacaacacctcaagttttatgctttgtgattaacaccaactctttttaataaaacagagaaaagaacagagactttaagataagagagaaatgtgagaagggaagagagaacacataacatttgttaccccagttcacatcaatagatactatgtctgggccaagtcacagctggggatccattagaataagtaagttacaagacataatccctcagagaaagagtctcacacttgagatctcttctccgtatcccctctgttacactctcaagagaaacataaaagtttacactttttagtggctatttctttctctagcttactttctacattgtatctctctcttttttactcccctcttagctgcgctcacaacatagctctagggcttctccaaaacgctccagttttaatttgaattcacatcgagacaaattgtctttctttggccagtttcttgtgcttccaaaagatgtttaacttaacaagagatgaattacatttaactctagttaacatctcttgtttacttgaacataaggttctcatctttacaaattggatcgtaaagaaaagttatttacaaatgcaaccataatttcaagcaagaaccttgaaccatatcgttggaggagagctgcaagtttcggtatagtaaaaataacccgattacgtacggactgtcttggtgtcaatggtacagactagatgactagaatcattttggtgtctcggtctcctattgttgttttgaatataatgctaatctagtgagtataaaggtaataatgtcgaatttgctgaagccccaagtaaatcgccactaacctccaaccagaccgtgtatacatacataagagcatgtaaagaacatataatcacgatcgagtttcgtcaggttcaccatataataaacaaggttgaaattgaatacaaccccaaccacgtattctagcaaactttcctattggattataaaatatctgatgttcctcttttagtctcctattttagattctatttatgttgcttggcaaagtcgtaaagtcgagatctcgtattacaatgtcaatatatatttttctttattatgtcacatgttaaaactagtattagtactactacctccattttatgcattgtatgactttattttttgttttgtgaaaaacatactttttgtaatttaatacggaattttcaaaaattataatactctttcaattataaataggaaaatattaaacaagaataaaattattttatattccagctgtttagcccatttaggtccaaaaacgtacttctaggcttatagcccatttactctctttttttaagaaagaaaaaatcatatatattcccgaaacgagcgtcccattaactaattaaccacactaaatcaataataatactagaaagtagaaactatagcatttggttaaagcttttacgaaagcatgattcatgaccaaacgacacaagtaactaaaatttctccggtttgacatcttttgccattgttaaaatatagtatagcattaaattattttattaaatttacataccattataaaagatgctaataaatatttgataatttgaattttgtttcataaaaaaaaaaaaaaaggaaattttgaaggcgcgggggactgagcattatatcgccggcgataatgggatgcatttgcttcaagtcttggcgccgatcatcttcttcaccgtcgattacgtcaacggtcatagatgatctcgaaaacgtcagagagtacgatgccgacgacgacggaggacattatccgttgattttccgtgagttcagtttagaacagctgagaatcgccaccgacggtttctccgccggaaacatcgtatcggagcacaacgattcggtaccaaacatcgtctacaaaggaaaactcggcgatggtcgtcgcatcgccgtcaaacggtttcaaagactttcttggcctgatcctttcgaattcatcgttagtcttttttgatctttataatgtttttggttttgctaacaagtttttgatatctatcaatggtggaccttttttcagaatgaagcacaagctgttgggagattgaggagtgaacatatggcgaatttgatcggttgttgttgtgatgacaacgagagattacttgttgctgagtatatgcctaatggaacattagcaaaacatctttttcactgtaaaatatctctttgtccttttttctcttattgatgattgatgatatcttttggtttgatgattaagagtttaatgtgtgtttcaggggagaaaagacccatgaaatgggaaatgaggttgaaagttgctctgcatactgcaagagctttggagtattgtaatgataaaggaattgatttataccatgatcttaatccttacaggattatgtttgataaggtaatgaaagctaaactctgttttgatttgtgtgtttctcttaatttttagcaaatctttattaatcttcaagttgttgaatgatagacagggattcctaagctttcttgctttggtctcatgaagaatagccatgaagggaagatttatagcaccaacttagcttttgctcctcccgagtatttgcgccttggtactgtgatagcggagagcgtcacatttagctttggaaccttgttattggatcttatgagcggcagacatattcctccaaaccatgtaacaatagtggcaaatttttagttgcattttggactgattcttagcttttttatatgtacatgttaatgagatattttgtgcaggcacttgatttgttccgtggcaaaaactatttggtgctaatggattcagctcttgatggtcagttctctgatgaagacaggacagaactaatacacgtagcttctcgatgtttcaagactgaaccagaagagaggccaagtataaagtttcttaaggcgactctttctagacttcagaaacgggccaagttgtgccctattaatgtcaaaagacctatgtctgtacgtgtcactctctccatatattcaagaatcaagaatagtctctcttgaaactacacaaatttgaattaatggtaccaataaatcatattatttgacagcctccatcaaaaaatctgcctgaaaagactaaacctgcaacagagtcattgaagttgactcctttcggagatgcatgttctagagcggatctaagtagtatacatgaactactagagaaactagggtatgaagaagataatggggttggtaacgaggtatattgatgatgtttatttacttgttatctgaatttgagagttggatgttgctgattctgataaatgtgacagttttcattccaaatgtggaccggcgaaatgcaagagaatatggactacaagaagcatggagatgccgcgtttcttgcgaaagattttgatactgccattgaattctacacagaggtaaagaatgtcattgacacactctgcaactctacatcatcgagaagtataaataaaaggacttgattcattctttcattattttttgcagttcatgactggagctcctacggtatcaccaacagtattggcaagaaggtgtctttgttacctaatgactgaaatgttcagcgaggctctaagcgatgcgatgcaagcgcaagtagcttcaccggaatggccaattcctctttacttacaagcggcttgtctcttcaagctagagatggaagctgaagctaaagaagcacttagacatggttctgctcttgaggcttattagtctttgtaaaaaaacttattttgagaaattgtgattacacacaacaacatgtactactataagccaatgtgaataagtgtgtacccattcagattttttaattcaattatgaatgttctttccaattgtttgatatgattgcactcgtgcaaaaagctaaaacaggaatcaaattccacacaaagcaaaagaaataagtttttgagaaaagaaaaaacagaggattttaatcttctttctcagttttcatttgtgtgaaggcaagttaaagtgaaagaaccatgagattacaaatgcacagaccatacatgttaaaaggaaattaaggaatctatttcctctacataatctccgatcatcggaatcgcttgtagccaccatcgtgggtgtatttccggcctctacgtcatctacattggtttcaaccgttgtttgaccaatctcattgtcaactttaaaaaagttttgagctatcgaacgacaaatctcgcaagtcctaaaataaaagttacgattctttgtaaaatctaacaaatgtttataagattaatgaaaagaatgattggttttagtttgcttacttattacccttgatcttgaaccaagtatcggcacattgcttatgaacataacccaaatcatctttacaagaacatccaagaaccattggatctccacattcatgacgactactctctaaacccaaatggcaaatccggcaatctttctccggagaccctctgattgatccagaggctactgattctgtatctgtttcgtcgtccaaatcatcagcaatctcaaactcgccgcaaaagctacgaacagctgagtgaaaatcgtagtcgtaatcacaagaagaactatcttctccgctgacgtcacttggacggtattgacgctcgccggaaccattttctaaatcaatgtgagagatttcgtaagatgacattattcatttgagagagaaagagtgaagaagagacttttctatatgagagattacaagacttttgttacaagtaaacgtgaactcttggatcaagagatttaaaaaagcaaatgaaaattaaggatttttaaaaaaacatctgaagtactaatgtttttgttctgtctgtggaccaaagcgatgaaacattattaacatacaactttaatttatatttgtttatagagaagaagcaaaaaaaaagaaagaaaacattagtacaggctttaagctgataaatactcgattgttcactaatccgcacgctaagtatcatcgtgttatttgtgtttttaaaagaacatgtgtttcgtgttattagctactgttatctatttctgatcgttgatttaggtcttcgtagtaacaaatgtcaacttgttggacggtggagattataacatgcgcgtgggaggcacgtgatggaactaagtgtcgtagtgcggccaccacctttggctctcgctttctctctctctctcttctcatacttctctttcacgccaccattcacttctttcatgcttcttttttttttaattcactaggaaatttttagtaaagtatttgatcaattaattattctaagaattgacagaagaaaaaaaaactgaaaatattatgaaaacgaaaatcaaacaaataaaaacatactgtcttgagacttaagaatcctttttttttcctcgagacttgagaatctttgacagatgttattacgcagtcgtggtggttaccgttaccgtgagtgttggtttgggtggcgtgagtatcacacgctttctcaattagcttttgaggcccattaataacaaaacttggtcttatctgaggtccaattatttatattttttgggccattctaacccatcatcatctttgcaaatcaatgagactttggattttatgccacctaattcatacattaccacaattttttagatatcaatatgcatatgtttagatttaactatttgaaactttgatttggaatgtattttggtatgcatatgtacagagctaagagattgaatccacaaaataaaaatattaatagccgaaattcccatacctcaaaatggacattactaacacacgagctggcagataaaggaaattaattaacgtagcgacgacaagacaatgttagtacaaaagagagataaagaaagaagaaaaaaaacgtgggaattataactacaaacagtgcgtagatcacattcacggggcaaataaatcagagaaaagatttggtgttatccaccgtcttgggattgctgtggaggaggagacgaagaaggagaaggaggcttaggaatataaggattgagaggagttccatgctcaataggacctggttttatcgaagcttttgtcgtcggagttggatccactggaaaattgtaatcctccaaccccactttcatttctgtgtgtgttttcaatatgtaatcattaatgtatacaatgaaaaacatgaaagagagtaacaaggaggattgatttgattaccagaagaagaagctagtagtgagaagcttaggattattacaaccaaaaggaagacaaagcttgacgtcttcatcttcttctctagagattgaggaagaggaggaaacaatgaagaaaggtttcttaaagacagagagacaaagagagagagagagagagagagcaaattgtaaaatgatgtgtgttaatattgggaaataaggccatgtggggttttggatctctgtcttgaatgtgatgttgtgggttaaaatcgagatcatagttattgctctctctctatctctgataatctctgtacaagagaggaaagcatctcaaacagctcaaagctcattcattggttacactttaatgctctccactattatttttcttgtaagccacgtgtcctgaattctctattttccattagcagtgtcttctcgtcgatgtatctatttgatcaccattgaatcattgatagaaacgagaatgagaaaatggaagaaaaaataacaaaagataatgtggatggagtggagagacaaatatggtgaagaagatacagaggttgaagcggcgccttttctataaatactagatagtatgtggttgttgactatttatttcttgggcttttaatgttttttttttaattttttaccttatgtttttgaattacgcaataaatagtgtgtaagagaagagtagtaaattagtagtagtataattaaccgtctaattgagtttcatagcagtcacgtatgaactggtagtaacagaaacgatatagtaaacacacaataatgtattgatgttattgcaaaaacaaaagttagttagttccaatttttaattattttcccccatttaaataattaaatgccaacgaaaaatatagcatttattaatgtgcttttttgtctttagatcgatctctaagcgatattgttgtcttcaaatactaaacaccattaggcttaatgtaagttttgttgccttagattttctttttttttatcagtttagtagtttttacttattcgtatttgttaagaattgtcacatccatacttccagatgattttgatcttcattttgttttcgtgttttgtggacttaatttgggggtttatgatgagtatgtgtaggtatctttttttttttttttttttttgtcaaaacacaactttcattcattaaggcctcaagagaggaaagttgatacaagctacgataatacaacagaaagaaagatacaagttccatgagttttccaaagggatgttcacttttaaaaagtttgcaatggttgaaaaatctgttgaaactatagcggattcgaccatgaagacgagcttcgcgaaatcctcgaccaacgggtggtcatagacggctcgagcaaacaatgcatacaagcttttagaaacaaactccaaagaggaggctgttggataaaaaagattgagaatactacggtaaccacttttccatggaaatgcggttataatgccgttcttcttcaagcttttaaaaatttgagaactatccttgaacttgatgatttgcacatgaacgagctcgataatcaaaggaagcggggatgaagagttgaaaaagctacggtaatcaccgctctgtggagacgggatcatagtgccgttcttcttcactcttttggttttatgaaaaatctctctaggtgcttcgaaaggcagggttctcgagatataattgtaccaacaaagcaacattgaccgaatatgttccaattgttgtccatgaaaaactggtttcaaatatcgacaccaacgttggctaataatggacaaataagatttttgatcaaacctggatttttgcagaaattgattaggatcacacctattggagttgggcttcaaacaccttaaaggcccaaataaatgaatttgccaagacaaggaacttgatgggccgaactggaataggcccaaaatcgaaaaccctagttttcttttggcgtgggcgatgagactttgagtgtggcggctagacgacggcgagcagaagatcggagttgaaagagttatcgccgagggatgtggcactggaggagataaaggcgagagacaacggtaccaattggtttgatggattagggttgatccattcgtcgacaacttcgtcactgggaccaacgattctaaaacccaatgagaacgttggtcgatgagggtagcggagcagctaggcttcatggatctaggcgcaggtgacaggttaagctcgagatcaaccattttcgcagatttagcttcaagcatctcgccaatagcacaacgggataggtttcatcaagagtatccagcagattagaggaccaaatgggagaagaggttctgggcagcctgaaaagtggatctctgaccaccaaaaccgaaagcaaaaaggaagcgctgtggtggtcgggagagtgacaaaaggggacaaagagtttgcgagatgcggaactgagacaagagaattggaggagcttaagtacatcccgacgccggcgagcaaaagctccaccggcgtcggaaaatagattcatgaggatgtcttcgattttcgtgcttgggagagttcacgggtttttacgtttgagttattcgtttatatgtgtaggtatcttgttacttgtttttgttttgctgtttgcattagggggctatatctattttccaatttgtcgctacgttttgtaacctacacatacatctaatacacacacaatataaccctatacatacatctacacgtcattcatgatctcttccataccttatacatacatctatacacacataataaccttatacacacatgataaccctatacatacatctacgcatcattcataccctctatctatatacgtagtaatctagtctcttgcaccagtttagcaagagatggaaattctagactaagacacgtacttactatacataaacgaatcaacgttctctcgttccaccgccatcttccaaatggaacgaatttcaatttccgtgacaatccattttcctccttttttctccagcctctacaacacaaacaaaaaacaaaacatttcagatatcagtttgataaattttttccaattaaaactaacaattgttctactatcataacataaatgttttcttaggcataaatagaggacattatatatcaaaccaatttgtttacttttctactccatcttaacacatcgcatacaacatttatgaagacaacaacatttcaagccctcatcttatgaacacttttttttaacacacttatataagagcagtatctaaaagactaaaacatggtcatggttccaaaaactatactattaattaagccaaacaccatagctaaacagaaaaaaaaaatgatggaaccagagtcttaccttctacgatgatgatgcctttatgtttgtctctgagaaagtgagagaactaaaaagagttttgagttggatattcaagtggaataacatattaagaaacaaaaagcagagttttagacatgtgaaagaaaaggaaaaaatgaatggaaagaattttgaactttgaacgaagatgtaaggggtcatgatccacattttttaatttagaaacaaaattcaaattcatattcataacggtaagaaaatcttaattgtttctaaacacgttcatattttctttcggcgcccaacgttcggttgtcaaattggcagcattatggacttacaatttcgatagatactcattaatatatagttatacttgatggacccgaattggccgcagtatgggcttttatcgtatctatcaaaattgtaagcccgtagcatcattcctgaacaattcgaactgaagcccgtagcttcaaagtcaaacttaaattcaaaaattaatcctacagaacatcttaaaagttcaaactatactatttcaattaaaaaaaatctggtagaattgaactgaaatcaatcgaagtgttaaattaagaatcttttgggagaactaaaagtttatgttgttgtttttgtgtggtcggtatagattttatggattagattatttgtggaagacataatgtaacaagagtcgggacagagcattaatggtccatggtttaaaaacattaaattgaacgcacaaagtgtcagcgagtacttttgtcagtctttgaaataaatgcacccccaaatttatttctatttatctttgagtattgattgagtctctcgttttttatccttatatattttcatttgcccaaaccaagcatttaattatattcgccggtttgttttgccacatttcacacgtaaccattaccaagagtgagaaactacagtatttcatttacactacatgcatctctcgtaaacatcctttatatgaactctcataaagtttgtaacccaaacaaaaatgatctctcataaagttaaaatttaaaatctcgttaaaattcataacaatagattgtgcttatttaattatgtttggacgatactaaaactcttaccagtgatcatgaaacattgatttccttccttcctccactcacattattgggcttatttaattattaggctgcatgtgacgatatatggatatacttttaaataaaccatggttcaatatttttaccattaaaatatcgaaaatctagaattgtttcctgagccaactcactgtaaacttgatttctaataagataaaataagatgctgccaaaggagaaggttcttagagtagaggtcactctctttcaaccttacaaaattcgaatgttttttcaactatgagtcctatgggttttgatcatttttactgaacaaaataaatacataaagttttactataaatacagaagctctgcctaatgcgagcattttttaacttcaccggacatgccacgagcatgttatgggcatttgcacttcattttatctttgaacttttttttagcattttaagaatagctagtaaaaacataatcaatggtagtccactaattaacccattaattagagagatacgagagatcctttttagattccatcttcttccttcctcttcttttcgccaaacaattccacctttattatcttaaaccccacatttcctatttcctttttgtttatagacaataaatatgatttcttcttgcactatattaaaaaacaattatgacctaatctaattatgaaaaataatcaacaacaccttaaaaactttccacttaaaaaacattcatgcatgatttttttctagttatcaaagattagtaaaattcttcatcattacagtattaacaattgaatagatttttagattatcgcaaatttatagtagaaaagagtgggggcaaaatgtcacaatcgagaacatgggggatacaaaggagagaagataaaagaagtgggtataagaacagaaatagcattaattgaatttttatttcccttactcagcaaccactgagattacaagagtgttgtttgagagcgaatcaaggttcctccaaagaaggaagatgactttaattcttatttaatttccctttctccttttgcttcaccaaaatccacacattcatcaattaaaaaacaaaccctagattcttgaaaactggaactcattcacgaatcctaaaaagagagctcctttggttttcttgaaacccagattcttcaagctcagctatggcggtcttcaaaaccctagctttcctattcgttttaagcatcgtgatttaccaatcagtggctgttacagatgtaaattcatcgttttcctttaatgggtttgtgaaagctccaagctttgacaataatgttgctctgtttggagattcgaagctcgttcatggcggtccatcgatacaattgactgactcagtgagtcgcagtgaagggcgagttatttacaagaaacccatcagactgttccaaggtaaagagagaaacttttccggatcattctcaactagtttctcgttttcgatgtctgatgagattggtagtgtcttggcttttataatggttccaagaggtttggatcttaggttgtttggtagaaagggtaataatagttcctctggtttagggttcttattgaaacacaaagttgttgctgttgagtttggtatctccaagagagggaatcatgtagggatcttagttggtcgtcctgaatctggtaaagttagaaagttatcatcttttggtcaccatttcaatgaagagaagagattgaattgttggattgattatgaggcaagctcaaagagaatagaggttcgtttgagtctatctgctgccttaaagccggtggatccattcgtgtcttactctgtagacttggctaagctatggaaagatgggaagtttatggtgggtttaacctctgcaaatggaaacacttcaaagccggtttatctccattcgtggagctttaaactgagacatccttcgatgaggattcactcgcagccgcttgatccaaacgacgtttccaagactgttaaggaaggggagaagacggtggaagttaaggggaaaggaaaatgtatatggagaatccttggtgcattggttttgggggcggtttgtggaacattgggagccatgttcgcgttatacctttggacaatatgcggtaataggcagtcaatggcgatagttcccgaggaatgtgctgacgaaaaagcggatatccttgtaacgaaagctgatgttgttgttgaagaagaagtcaagaagtagtagaaaaagaaaagtttggtgtgtgtgttttagaatgttgtatttgttgtttgtaatgtaaattcttgtgtccttctttattcttcttctgtttgtttttttgttagttgcagatttggtgagatgagttttcacatgtagaagaatcatacaatatgtattaagttaagatcctgaaatcttgatcaatgcaattgtctttttttttttttttttttcatttgaggacaagtcagtggagagacgtgagtgaattgaagtaaagagtttgttccaaaaaagaaagcaaaggggttctcgtgatttctacaaaaatgcatttataattagttgccactttcagacatctttctctctgtgtcttttctctgtcttgaccgataagaaagtgaaaggagagtaacagtggaatgtgtattgtctccaatggtccccttcctcaatctagagatttattgctttaaccagagttcgaatttactagctttcaaagtcactgcttgtaaaccagtgggttcaaattacacagctaagactttgagtgctgaatgtgaattgactatatacacatatatgcataagcaatggttggtatttgatagctgagttgaaaaatcttgcttgtatttctctaatttcctactataattagaatacttaaaacgaaaccctaatctacaaatgaacagaaaagaaaaaccaaaaatgatgtgtatgtgcgtataattaatgaataaatcgttgaattgagccctttatctcagagattgtgctcgtagacttggtctttcaaaccggttaaggccggtttgttcctcagacgtatcgcacacgcaaccaggaagagggttagcataaaaattctcctctaactttggactcatgcctgcctttcctggctgcctaagatacggtgctcctattctatgctgatgcatcttcttaacctttgacgagaaatcttcccaagatatgagtcctgcatcgagccgatcaatcaatctcacgaatctttgcctgaaaaaaccaccgtaaaatgtcagtttagagtgcattgatagtgaaaaagggtttcttttcacgcaagaaacataaaccgtacctatcgggattaatcgtttttctaaacccttcgaatctccggtgaccttgaaccgctttcgccatgtttccatcataagtataagcgaaaatatcgctttcgagtgctaaattgtaatcaagagcagctaatctgttctgataaggtttaatagtcgaaagctcttcctctgtggccaatgtgttgtgaaagaaaacgtttgggaactcttcgtggaacgcagtcatactgttttgcccgtagatttttcctgcaacaatgtagatattggtggtcgaaggaaaccccatcgccttgaggaagacggcagcttcacgcggcgtcatagggcaattaccttcaagacgccgttctgtaccattgatcactttttctttccagtgtggaatactaaacctcatcttctcaagatcaatggattcttcattggatagactgtgattgcatccggtaaacgccaacatatctttctcgtacctataatgaaaatttctgttaattgatgattctctcagcaatcagcatcattcattcattagagagatggagtaataggggtagcttgtaccgcaagtgaagagcgaggtagggttcgttgttttccctaagtcttgaagagagaacattgctcagattctctatatcttcagagtaacgaagagcttcatagtttgcgcgacatcgaagccgctggatggaaggaggcggactgttgttggctagccgagaatcagtgtgattgaatacaatcaccttatgcttcttaagtaacttggagattgagtttctgtaataactcgactgcacgcaaacaaataaaccaatacagagttagataaaatcgttgaataaccgaaagagaaaacagagaagtaaacaaaaattgcaaatggaaatgtttaccttagaccaggacacaggattcttttcaagaggcttaatcgaagcaaattcttgcggtaaatactcgacaatattgacatcttctgctagtacttttatgaaatgtttccagtcgaaaatgtccttgaacgagctgaaaagggagcttaattaaattatgatgatgatgatggtgaattgattgatgatgatggttagtacgtaccttggatcactccagaaagatgaatggtcaagaaacggaagaacaagagttgcgttcatgattttagcgattgccaccatatcacatatctgtgaagaagaaatgaagtgaggattcgagaaaatctcttatactggaagtggaaacatagagaagaagaagaggcttacaccagttctcatctgattcaaaccaccattggcgtgaacaagaaggtaaccattggtttgcttgattggtcctgagcaaagaaggaaaaaaaaacaattaattaggtctgaaatttcttggtttctcggaaatgaagagaagaattgaggaaaacttactttggttcttaggacgagctacacatttctgatagttcccaacctccggttgattccaaatctctgggatctgttggaaacatgtgacaaaagcaaaattagtccacaagaacaacaatttgctaacgaataaaaaagcccaatgggccaacaaacaaattagtgtttacaagctgttctgattgtggttaggctaagaataaatattggattagttgtaattaaataaatgaagtcaaccgctagaaaattcagtggcgaatggagcagagatccactcatgactttgtatttacaaatataaaatcaattatatattttctaacgaacttgagaaaattcctttcacgaacactaatccactaatatgaaaaatacgaaataaaaaaatatatcacttttttgttacttttgataagattcagctccgaattttttgtcgacatgaacagaatctaaacatggttcttcggttttgtttgaaagaagaagaaaaaaacaactcttgttgactctgttcttgagaaattttttacttaccgatgtagtttttggaacgaggacttgaaaggaattggatgattcatcttctctaatgattttctcaatcgttggtctgggatgaattgaaacaacgaattcatgtttctcaacgtgttttctccgtcttccaacgccgccggagagagcaacgatgaggaaaaaagtgacgacgaggatactcaataacgttagaataaaacggccaagattggtcgtggatctcatgttacgagcaatcccagccgtccatttagatttgttctcaaccattagcatccacacgagcctgaattttcggagagagaggaacccgacgaggtaattgtggtgggagccacttggacaacacgataatgatcctcctcctcctcctccgccgcagcagctcgtagcggtttcttcctcgtcggggacgtaaacgactgcgtttcctcctccgacggtgttgacgtgggaatgatcttcttgagaatcagccacgcgccgtcttgttgttgttgttggcgccgccggtagttggctgctgcttgacggattcactggaacgccgactgacatgtgaccgccggggaaaacagaggattctttttgaatgaaaaaatatgatcagaggagatatttaggaatcaacgaagaatctccattgttgaaacttggttttgttcttcttcttttctttatataactcagcgtgatctcaggacgagcagacaaaaacaatctctcttataattctttttttcctctctctttccttcgccaattatatatttaggacgaatatttactcttatatatgtgggggctatatataaagctaagaagtcggtttcatttgatgttaaaaaataaaaagtcgtttttgttttgtcgaaaatataagtcgttttattgacgaaaacaaaagtcgtgttatgctactttgctttgtaattttttttttttttgtatgccactttgttatttgagtttttcttaaattcacatgtaaaatattcgctgttaaacattggtactgtacaaatacgaattttgcttctcagaaattatcagtctcgattttttcccgaggtttttttttaagtaataaaagtcccgaaagtatagtttttttttggttgatagcgtctcaagacatagtcgataattactgatttcttattttaaataaatgtcatatatattttaacggtattggattggttaatattcactgcatttgcctaactagtaactactagacacgtagaatttagaaagcaatagatttgcatattaatgattttgttatttttaaattccatatttcgtataactgtttcagatttggttttattatttgaaagaaattgtatgtattagtcaattgtttgcacgtcacaaagataagtgtcgttagttttatcaaaatttatctcttttttttttttgtcgaaatcaaaatttatctctttactgaaccttttaccaacatttttttttttttttacatttgatatttaacttattcaactaacaaacagttttcatttaaactgacatctctgttattgatacttgatagatatctaagattcagtgaaatataattattgcgataacctaaataagatccttacataatttacattaatattctgtactataactatataaataaattactatttccatatgaccaaatcataacgacataactatttttattcttttgttgggtttagtgatatattaaacctattgaaaattttatacagtatctaataattgaatagcagtagttgtgatgtggtttgctatttaaaaagaaatgtaattctagcagcgctcatcagtacgtagttataaacagagggttattctgaagtattcaaagtccttccaaattaagtatggattttaatgcatcagattgagatatgtatgtcaactttccttttttagatttaagtgttttaaccaaccaatacttactagactagtttacgtagagactgaccaattccattaataatactagcttatacataaaaatagcaagtgtgtttatcatgcaatcaattttccttatttctcaatgttatagaatcctaaaaagaaggcagtttaaataaactcagtagctactagcaatttaattctattactttattcaacaattagttagcccgtcacattactgatcacgcaattatcttttcctttctaagaacaaagtataaaaatgaaatcactatacgctagagattacgtgtagctaatacatatatttttttcttagggtttcctttcgtttacaaatcatacggttccatttcatatatagtgacattttgtgaaggattgattaagctctacatttataaataataattcgttgtcatataaacataatcgattgaactggggcagaaatatgggtaagaagaaacttataataaagccagaaaaataaaatagcaaggataatttgaaacaatataacaacaaaaagctattcttggtataaataaaaaaagtgaaacaatataacaacaatatttacaataataacaatgatggcctttatgtaagtttggagtattaaaagtggaaaggcctttatgataaattcgaacgttgctcgatagttttgtcctattcctacgtccttttcatttagatcttgattaatacgataaccataccgaataaaattcaagtactatacaaaaactaaatgcattaatatacagttacttgcgtttcttaccaagtgagtgaatgagtgttgttgttgttttttaaagagatcataagatcctttttttgtatacccacaactatatatgtgcgaactaaatacgggacgtggcagttccaagattctcgataacaaatagacacgtctcaagaagacttgtttacatgtttaaaaaatactttaacccacttcttagtttggtaaccgttagagttccaccaaagttaataaaaataattattatgaaccttttgagttggtcagtcacagtttatttttgttttattcctattctttacttttgagatcgaattttagttctattgttaaaataaaataaaaaataattgcttaatccggtataatcattgtacataacttataagcttaccgataaataaaccacaaattaatgcgttcttatagctgaattgtttttagagctagaaataattgatatagatagaatttcgaactcactgatttgatacctgacctataggctatagccaagtgatagtaatcaaagaaaaacgttgtgtataggaaactaatttaaagatacttatattaccgtgtgaaacttatgaatttaagatggtaacatacctaagaaaatggactctaaattaagcgccaataattttttttgttagtaactattaaacatatatactgtagttagtggaagaatccacagtctaacattgtgttctggtcttaagagtcaagaccatataacactccgaaccgcgattttccacgttctctcaaccaattctattgtctcataaaccaaacgaaattacgttttaacatttaaaacaacagaagaggaagtggagctcgaactccggtgacgtcaaaagctcaaaatggacaagaatcactagaaacctttggacttttggtcgacattataacacgcttttaaaaatggactcggagactcaaaattgacgacccattctctagaagcaatatcgggacacacgcaaaaatggagtatatgtcaacgtgtacaataatattatatattgcgaatcatagaaagaggttgcgagtggggggccacgcgccattaggtgaaagttccaccgtggaagtctcaagtctctccactttgtttactttgaaggggaagtcaaaatctctcacctacacctgaaaatgaaaactaaaggttcgtagttgggatggttgttgttagccagggttgccaaattcaatatatcccataattccgattcttcattcgttatcaatgtttcgtgtatctcatacgaggaaaaatgcatagtaacaatagatatatagatttgttgatatttgtatatccgaaaaatcttatcgagtaaaaaattaattcaaaagattaaatgaaatctaagtttcatatacggatgttggtcgttggaattggataaaccttttttcttttcttttttctttttgtcaagaggaattggataaacctataatataataactctcatatacatttgataatattattgttataaaataaaatccttgaaagaatagacgaaatatcaaaagtatttgttaagaaaatattatatatgattggtacgtagaatattgttttgtctgctatataatacacaactcgcgtatgataagaacaaacgcgtacggaggttttgttctccgcccccaccgtcatcaccgacacgtccttttagcagctaccctttttttttctccaatttacttttcaattgatttaaaaaccattatttcttggttatgttgtactaaatggaaaatagcttgtgcttagaatttacacatacaaaccataatatgtactactgtttcaactttcatatattttacttatgaatactgatacatataatttgactaaatacaacaaaatttggtaatttcagaagaattaaaacgtatgcgtataaatgttgaaggactaaatggtagattacaagaaactgaggtctaatatgaaatgttctcaagtacggggaccattttgctattcgataaagtcaagttccttgagcttctgtagtgagtagtgacacacatctttggtcctttgaccaaaaaacaccaatatcaactcaatctaggatatcagcttgaagctatcacaagtagaatttgagcaagaatccaaaatatactgattcagaatttatcatcaggagagaatcctctttgcagcatctcatcgtgaatccgaaatgcctcggttaagttatcttgagaaacaaatccattgatcatacaagtatacgttgacctatcgggattgacacctctctcgatcatcttccttagcacaacctcggcttctttcatctgattttgtctacaaaacccatgtaagatcgaattatatgtaaatacatcaggtactaatcctccttgctcctcctccatcttctttaccaaaccaaaagctttgctcatgttttcttctctaacaaaaccatatattaatgtgttgtaactgatgcaatccggcacaaaaccttccgagatcatcttctctaaaaagctttctccatctgaggcattaccagaacgacaatatccctttatcatagagttacaaatcattaccgttggctttatatttttactgatcatttcatcccaaactcgaaatgcctcagccagatggcctttactgcacaacgcgttaaccaaaatgctgtaagatattggagtgggaagtatctcttttgataccatatctgcccatatctcttttgctgtatcgatatcgcctactttaccaaacccatctaacagagtgttgtatgtcacaacatcgagtctgattctcttttccttcatcttttgaaagagctccattgcgttctgcagattcccgagcttacaatgtccatcaatcagtatagttaaagtataagaatctggaaacaaagccctttcagtcatttcgttgaacaatttatccgcttcacccaacattttccgtttgcataagccatgcaaaatggtgttgtaggtaacaacatccatagcacaaccctgctgaagcatttcatttctcaaattcatagctacagagatcataccttttctacaatacccttggataagaatggtatagatcacattgtcaggaatcagaccagcctccttcacactgttaaaatacattaatgccttatcgagatttccactccgagtaaaaagactcatcatcgagctaaagcaaaccaaatcaggaacaacatctctagatctcatatcactgaaaaccttttccgtttcaaccacatctcccttcttacaagcctccatcagcaacgatctgtaggtagtggagtcaggactcaacccggatcttaacatctccgcgaaaacttccttggctctctcatatttcccatgcttacacagtccatttatcacagtattataagtataaacaccaggactaaaccctttgcccggcatagcattcatcaactcaaatgcctcttccatgagacctttactagagtaggcactaatcaatgtattatatgttacaatatccggataaacccctttctcttgcacttgtgataaaaaggttccgactttttccattttaccatctttgcacaaagcattaaccatgatattgagagtatagacattaataccaacaccactccgagaaatctcctgataaacaccccaagccagttcaacccacccgatcctcaccaagctcccgataagagcgttacacgcatcgatagaaaccgtaaaacctttgcttctcagcaatgtaaaagcctcatgtgcttctctaagtttcctagcctgaacataagtcctaatcaacaaatcaaaaaccgaatcattggaaccacaattactaaacgtagaatccaaggaattcacaatctctagtctagaaacaccactcctcctaatcatcctaagaagacaactctgtgcatctgataatcttccactcctcacgagaatatgaatcatagcgcttaaagacaaagacgtatgcttgaaattcggaaaatggaaacctaattgatccacgaatctttgacctaaagttaaatcattgcggcagcggtataaaacctcaacgacggctaaagggtttaaccgaatcaggtggtttctcacattattgttaccttgcttcaaactaaaacaaatcttctccaccaagaaagaatctgaaacagaaaacgaagccgaagaagaagaagaagaagaagaagaagagggttcgaatacgggagatgaagaagttgtcaagtttttgagaggtttaaatcgagtgagagggtcttttacgcgggaaggtattatacggtgaacaatcattttttgtggttgagagagactcaatttgatttcgattgagaacaaaaattgaaacttgaaaacttttacagtagtttggttcatcctccatgagtcggagttgagagaagagctcagagctcagagctaaacgacgacgttattgtgagtctcaatgatccggttttaattgggctgagaatcgaaccatgatggcccaattacatgttttcagaaaaagccttaataataatatcgaatagtgtagggatgtttactgttttgcaaaacatttatacaaaattaaatattgcaatcataatcctataaaatactatgtttgatgcatggaaaattctacaaaatctacaaatgtaagttatgaaaaaaccgaatctactaaagtagtgttaatggtttaacggtttaaagttaaatcatttctatatttaattatcgcatttaattaaaaaaagaagaagaaaacgttgtatatagtttcccgcttatctcaactgttcctcttcctcgacgttcactgtttacaaaccctaagtcgtatcgagattcaattgcctaattcactgtcaagtttcaacgactaagaagaaaaggtacaatatttcgtagcgatttttctcgttttgttgaatgttgttcgttttcccttgtcggattttctccagaaatcgatcggttttgtagtttcctctgtctctaacccaaaaacccctatcttgttttgcgacattagtctatcttcttctgagatttctgttcattgcgtattttagcacatataaacagaacccgcctttttcgttttctaggtattcatgatctatcgattcaaagattgtagatttatctgcatgtacccttttactctatcattgtctcaaaaatggctccttttactttgggtattgatctgtatgtgtaaaacgttgacccttttactttaactcttgtatgaaatgcggattttgaatcgaaagatgtcagacgatttcgagaattcggtgataaacttgaagctgctcatagatgaagagaaaaacaaagttgtattcgctgaggcgggtacagattttgtcgatatactctttagcttttcgactttgcctatgggaacaattgttagattgctggagatgcatcacaagtcacgctcaatagccattggttgtttcaacaacatctatgcaagtgttgtgagtatgggaatgaagcatttcagtactcaagcttgcaagcaaatgcttttgtttcctgggagtttgaatcaggacaaatgtcaaaatatgaagctgaagatagatgattccgaggctaccaagtgtttcatgtgtcctatgtttgtgcgaagcggacaatgcagcaaaggctatagcaattttaagacctctaggtgtagctgtgggaatttcatggatgaggtgattcagtttcaaggagaaggtggccgaggaaatggttctcaagctgaagtatttgtgaggggtgctcatacttcattcataatcactgatgatttgaaagtgcaagttaactctgttgggtcaacgcttaatgttcttaaagatcttgcctatgcagattgcgataagttggttgaaatgattcttgaggtgaatctccaagaggtatgtttcttcttcttctactactgctactactagacttttacccttcatgttcttaatccagtttcttctaaacgttttaggtagcgactttgctggtgtgtttgttcacatcggatactccattgaccgatacatttctgaaaaagaaaagctcacatggtatgaacaggattcataaaaggccgagtccttctctcagtgaagatagagaggaaacaaaagctgatcaaacgataatgctcaatgcgtatgttaggaaggaggaagggaacattctatatgttgaatgtggtgacgactttgttgatcttcttttctctttccttgctatgcctctggaatctgtatgggacatctcgggcagaggaatcatccttggatgcattggaaacttgtgcaaaagcttcaaggatttgagtagtgcttccgcaactgaagcttcagcttttaaatgtgttcttcctcattactacaagtgccagaagcagctgctaaatgatgttgtcacaacccatcagccaccaacttattaccgttttgtatcgttctctgcggatcattttcgagagtaccgtttgtctgaaaactctggtaagcgacttgtgtatgactgggataaactcgtgcctgtgacttcgatagatccgaaaaccgaaggcaacaacactgctgaaacaagtggatttgtgaagagagggacaaagttcatggtgacagatgatctgatcattaatccttcgaactcaacctcaaccattggattcttaaaggagaaacagactcgactagatgaagttgaaattcgagtgatcaatatgacaaaagaagaggtaatatgcttgtcaacgatccctgtttgatatttaaacatacatattcttgccaaactacatccattgatcctatatatgcaatcgcaggccatcagattattgggagcttcaatggtgacatcctctgccttaagcactggtctgctagctatggaatcagcttcaacaagtgatcctaaatgccggttttttaagaagccgaagattgagacagagacttgagaagcaatgttctaaccgaaagttcatgttctttgctagatttgatcactagagaatcttttgcttagcatctgtagaatctgtttcagttactgtattagttttttttggacatcgactttgtctaatcttttgagtagcaaaaaactgtttcagttactatatttgttttttgaacatctactctggctgattcagttactagcatagctttcgggacatggagtttgtctaatattttgattagcatctgactgtttcagttactagtatgtttcttggacatcactttgtgtaatcttttcttattttgaacgatctcttttgttcatcacatcgaaattagtcaacttttgtgatcttggaaattgggttgacccaattcatgtgaagcttaatttttcgtgtatttttaaagaaagttatttgaataaatgcagtgtagggggaagctaaaagggttgttttttgtttattggctctagggtgttgctgactcattttagtcagtgtcaagatttaaaccattcttaattggagccgctgagattaaatatatatgactctaggtctctagcactttgcctggttttatcagagtgtcctcaccaggcttcagttattttgctcttttctttagtctatctggcctaatatggctgaaagttctgaagaaccaaaggtcagtctgagactcttcattgatgaagagaaaaacaaagtcgtattggctgaggctagtaaggcttttgttgacgtgctcttcagccttctgacattgccaatgggcaccattatcagattgcttgaggagcatcgagaatctcaaccaattactgttggctgttttagcaacctatatagaagtgttgccgagatgggcattgacaacttcaaaactgatgtttgcaagcatatattgcttcatccaaggagtgtgagggatctacagtacaaaaggcttatgctcaacataaaccctactgaggtcaagctcttcaagtgtccaatttcatgcaatttctacagtcattttagcacttctcgatgccaatgtggaagttcgatgaacaaggagtttcaagaaccaagagtagtgccagttgcaagcagcatacaaaatgatgttaatggagtattcatcataactgatgacttgaaagtggcagttaggtccactgacgttgtcttgaatgagctcaaatccctaggctccggtgatattagtaagctccgcgaaatgcttgtttatatcggttttgaagaggtaattcatgttttgtaattttgaagagctatatgtatgtcgtacttgaaaaacatgccctgcttctaatgtctaacggttaactcttaattttgttctaggtactaactttgctggaatgtatgttctcctcaaaagctcccttgacgaacactttcttgaacaaacaaaccttccaaggtcaaggtgtgaccaaagtttatgaaactttaagtccatgtatggagacaaatggagacacgtttttaactttggatgtgatagtaaggaagcaggacatggagattttatatgttgaatgcggagaagactttgttgacctccttttcacgtttcttgctgttccgctggaatatgtagtgggaatctctggtaacagctgcagttttgtgtgcattagaaacttgattagaagcttcaaagatttgaatgctgcagaagtctcaacctccaaatccgcgatccaccatttttatacatgtcagaagcagttgctcaatatcatcactgaccaacctccgctctaccatcgctacaactattatagcttgaaagagtgttcgggctcgactcctttgattttgatagatccagaaggtagtggctttgtgaagagagagacgaagtttactgtatcggatgatttgattgttactgctatgaactcgagctcacctatttgcttgcttcagaagtttcagattcacgcagatgacctcgaggtgcaacaaataagtaccagcaaaacagaggtatgcttgtactaatttgtagctacactttttttatcaactagatatttttaacctttttttgtgtaatcaggctacgagtttgctgagagcttccttggtaacatcctctgcattgaaaacttctttaaggaacttgattttgaagaaccccgaggaagagatttgaagaaacagagagagattcttgcaaggttacattttttttcctttctcaagtaatacacttttacttgttctcccttgctttcttgaataacttttgtctctaaatcaggcaatgagtctgatgagagcttctttgttgacatcctctgctttgaattctgctttatggaacttgattgcgaagaagatcaaggatgagacttaaagaaacagagatccttaactatttaagttccacattgttccatcttttctgttttatctgatttttctctggtttctgtagacattgaactgaacacatgttttccagacaaacttggaatcttttttatttctatgaagtgaacctgcattgatgaacattaacagtcctgtcttatcaaagcaatggaggtgttttgtgattgggattgcttgtgtgcgtgacttttatttattcttgatcgctctcttgtgaaaatttgattagattagatgaaaagtaaatttacacgccaaaattatttagtaaagatgaatagaccctaatgaaaattagagaatccaagataatatatctaaagatacaataagatctttttgtaatattaaccatttccttatctttatctctccgagatctttcaccagaatgtgaatcttaaatgtaaatgcacggtatgtgtttttcagtttgtgagacaaggagaagctagcttaaagggttgatcgacaatggctcagagttctacggaaccaaagtttagtttgagacttatcattgatgaagagaaaaacaaggttgttttggctgaggctggtaaggattttgttcaaattctattcagttttttgacattgccaataggaacaatcgtcagattgcttgcaaagcatcgaaagtctgatccagttactattggatgtcttagaaacctttatacaagtgttgtggacatggaacttgatgattttgagactgatgcttgtaagcagatgttgctttatcccaagaacattagggaggctcaatacagaaactttaagctcaacattgacactaatgaaagcttaaagtgttttggttgccgatttttctcaatctgcagaatgtgcagtaatttcaacacgtccctatgtaaatgcggaaagctgatgaatgaggagataagtttcttagaatatgaggaaaatgatgtcgaaggagtatttatgagagacaagtcgtcatttatcataaccgatgacttgagactcacggatgattctactagttctctcttgcaaacactcaaagatcttggttgtgctgatgttagtaagctaagagagcaggttcttgatatcggtctcaaggaggttatgactttgatgcaatgtgttttcacctcaaatacacctttgacggatgctttcttgaagaatcaaagttcaaacacggtgaggaagatttatagaaagctgagtgatgataaaggagatgaagcagaaccagacaaagttataactattgatgctatagtaaggaaacaggacatgaagattttgtacgttgagtgcggtgaagactttgttgatcttcttttcacttttctcgccattccgttggagtctatatgggaaatctctggtaacagtattacaataggtcgcattgggaacttgttcagaagcttcaaagacttgagtgataatgaagtgttatcagcatccaaatgtatgattccgtattattataggtgccagaaacagttgctcaaaataagaactcctacaccacgggtttacttaggacactgttattccaagacactgtcttattctcaaagcttttatttgactacaaaacgtactacaaagcgcatgacttttgtggatccaaaatctgattgttgtggtcggtcaaaagatggtaaggggtttgtgaagagagggacaaagtttattgtgtcagatgatcttattgtaacacctaagatttctagctcaacattttccgtgttgaagaagtttcagattctcacagatgatttggaggtgcaagcaattaccatcagcaatgcagatgtaaaaaacttgttgtatagactaaacccttttctttttttccaacaaaattatgattctttgtacttcaatatcaggctttgaatctgttgggagcttcattggtgacatcctctgctttgagctctgcttttgggaatttgattgtgaagaaaccgaaggaagagaatgtttcatggaacccggtttcaaagaaaccaaaggttgagacttgaagaaacacaaagtggagagaatcctgagctactattgattggtcaacccaaaatttcaattgcttgctagaattgttaattttttttatcatatgttcttgacttgagttgcctacttggtttatttgaaacttaaaacacatttcaagcaaaatcataaacttttgtccccatctagttttcttcttgtcctctttctcagtcaacgtgaaagggaagctctaagggttgtctttgtctgtgtctattgggttttgatgacccatcaatattgttcattcatggggaagctcaaaaggtagttttgttgtttgtttagagttaagtaaaaagtttgtaaatttaagtgcaggctacagtcctggggaagctcaaagggtagggtttttgtttatgactcgttattattgttcattcaatgtcagactttagaccctcttaaaatgagagttgatgcttcagtttcttaacgtgtcgcttctgtttctgagtgttttagaaaagttttctcatctatcttgctttcgtctttctttcatctattacgctaatggctaaaagtagtgaggagcctaagttttctttgagacttattgttgatgaagagaaaaacaaggttgttttggctgaagcttgtagggattttgttgatgtactcttcagccttctgacacttccaatgggaaccattgtcagattgcttgagaatcatcgaaaatctgagccagtaactctgggctgttttaacaatctctatagaagtgttgtggacatgggcagtgattgttttgagactgaagcttgtaagcagatgcttgtgtatccgaagagtgtgaaagacctccagtgcaaaaggcttaagctcaacataaaccctactgaggacatcaagtgttttaagtgctcaagttactgcggcttgtacagtaatttcagcacctctaaatgtcgttgcggaaaatttatgaacgaggagattcagttagaaaacgaggaacaagatttaggccggtttcaagatgatgataatggagtatttgtcagcggtaggtgttcattcgtcttaaccgatgacttggaagtgtcagtcaagtccactgaacttgtcttgaataagctcaaatccttaggttgtgctgatgttggtaagctcggtgaaaggcttcttgatattggtgtgaaagaggtatgttagttagtttattcttcaagcgtttgtgttatcattactttattagttctctcttactatatctgaatcttggactaggtactgactctgctgggatgtatattctcctcaaatgctcccttaaaggacattttcttgaacaagaagattacacaaggtgcgacgaagttttacaaatcgcaaagtccatgtttggagaaaaaagaagatgaagcagaacctgaaaaggtagtaactttgaaagcatttgtgaggaagcaggacatgaagattttatttgttgaatgcggagaggaatttgttgagcttcttttctcttttattgctgtcccgcttgaatctgcatgggaaatctctggcagcagtatctccttaggttgcataggaaacatgtgtagaaccttcagggacttaaatgaggagactcaaatgtcaacttccacatgcgcacttccgtctttctataatttccagatgcaactgcctggtattatcactcaacaacctccggtgtactaccgttacaggctctacgattacaggcaaatgaactatggtttgactacaaacggtaatcgaactacttattaccgcaaagacagaatcgttcgggtggatttgaaggatcccaaatcccgtggcagcgataagtctgctcaggggttcttgaagaaagcgacaaagtgtactgtattagatgatctgaccattacatctatgaactcctgctccacagtttgtttactaaagaagttgcagagtcacgcagacgatctagaggtgcaagtaattagtatcagcaatgcagaggtatgtttctgtataccctttttgatcctgtattcttgaaaggaacttgactgacacttgattttgaattaggctttggatttgttgagagcttccttggtgacatcctctgctttgagcacgacattatggaatttgattgctaagaaactgaaggaggagactgatttatgggacacggtttcaaagaaagtgaaggaagagacttgaagaaatagaaagctagtgagaatgaactctaagtcgattgttgattatgtttttagaattccgcaaaatctacattacattcctcatgttttcttccaagccttatctttctttgtaagactaatcaaattattgttttatggaaattcatcttaatagggttttttaaatgcaggcaaaaacttgcacatctttttgagtttataaagcaacaagcctaaaatctggaatttcctagtacgataagactgaaatatacaaccattaccaaaaaaaatgcatccatatacaaaagtttataataagatccagttggtatatagtaattgggaatgttgaagacatatgaagtgttgatcagaaaaaaataagacttgaagttaattaatggaaaccctctttctcagccagaagacttgaaggcttctattctcctccgttgcccacaaaaacaaaatttgcttcgccgttttcggctccggcgtgattcttgagaagaactgaagtagagagagagatctgaaatctcaatctccgatttaacttggtaactagagaagcttttgattcctattctttcttttgatttgtatttcttagggttccgttcatgtaacttttacagcgacaatgcttcaaattcgtcttcggagggattccccgacggaaactggaaatggtgcgaggccttctccgacggagacggttactgtagcctgtcccgaccatctcgtcctcgccgatcttcctgttgcgaaaggaatcggttccgtgactcccaccaccgtaatcaagcccgtcggtcgtcgttctcgccgtcagctaggcgagagagttcacttctgcgttcgttgcgattttccgattgcaatctatggtcgtctggtaaaaaacttcgcttccttcattggtttatggctatattgatttgccttaaagagtttttttaagggggctcttcttctatatgtgattgaaactttttttgttttgttttggttttgcagattccttgtgatcatgccttttgccttgaatgtgctcgcagtgattccatctgctatctgtaaccatctttaactctcatcgaatttcattagaagctttgatagagatactttagattgtttggtaatctacagagacgcaggattatcatagtttgaactaggcttcgaatttcattagaagctttgatagagatattctagattgtttagtaatctacagagacattttaagatttactaggcgtagcgattatcagactgaaatcttgttgtctcttgtgtgtgtgattactgcacagatgtgatgagcggattcagaagattcaaacaatcaagatgatggaagggatcttcatctgtgcagctcctcattgtcttaggtctttcctgaagaaacttgactttgaagcccatgtccatgacctccatggaagcctattacaagccgatgcagagaaagaagatggtaaccagtcagatgttcagagcacaatgcagcagtcttcagcttcagaatccaccttgcgagctcctttaagatcccagctgcaacaatcccgtgaactaaacaggtcggcgtcatttgcaaagtcacagtctggatttagtcaagtccagaattaccctccagatagcgataactctcgccctcctggattcgaaaccgctagtcctaaaccaggaatccggttcccagactacccccagcctatgaatcttatgcaaccgcccagcttgcccgttccaatgaatcaaaacccgggtttaccacagcagtttggttttccttcgtatccaacaacagagagtggatcatctcaacaattctttaacggtgctcagtacgagatgacaagaacagagagcggcggatcagaacaaagttcattgctcgggtatcccccgccttcaccaatgacgaatctgaatttccaaggatcgtatcctcctccatcatggaatcccggaatggcaccgcctcacacgacccagcaggttaaccggggtagagacggtcaaagttttgggtggccacaagagaaccgtgatggctttgggcaggagtaagagtagtctagtttgaatttgtgcaatgttaaactcgtcgtttgaaagtttcaagtacttttgtttctaaaaactgtgtcgtttgttgttggtctaacatgtaattcgagtaaacccaatttcaaccgagccaaaaccgtgccaaaaattccatcggaaaaaccaaactgatttgggttgaaccaaaggttttacaccattttataggaacaaccatcgtagattgcacccactgtgtcactgtgataaagaaagaactaagattgatattttggtttttagctctttttctttactgttttgggaggatgatgatgatggttattatatgagttgagattttttctaaacaccgccgatgatctcactaatcttaggcacagctatgcttacagacaatatttcacagtctctttattgggattccttcactctacatatgtattcactattcagcaccaagttcaaatttctgtaagcatttattctctagcataaacacacacgaaaatatactattagctagttaagtataaaattatcaaataacttattcatatttgttagttttaaactagaaatcatgtgaattgaactgaaccagttattgataagtgtgtggctatgagaaatttcgtttcaaatggattctccaattatgaaccataatgatacataacaatatttgcaagacaccattatttcacattatgagaatagaagaaaactgagatctaagacactttttcccatgttttctatgaattattacgatccccatataaattttcaaaatgtaaaagctataatcattgtcgtaattttcatgattaatcacaccaatcattatgaccaaccaaagagaatgtaaatgtaggatatagttcattttcttttctttttttttttttacgacaaaataaggtcattcatttaagctaaaagcgggcggttttcttctagagaaaaccagtccggagtagaaaagcttacatgggaaaaaatagaacctcgtgctcttgccttcttagcaagacaatcagcacaaacattgtttaaacgtggaataaaagataaaaaaaaacgaggaaagttaggctttaaagaataaaaattttttaactcagaagaaaaagcgggccactcatcaggagtgtccaaaagttgcgtcaactccttgcaattagtttttttttatcataattagttttttttttttgggtctgctactttttctcaatataagtttatattctacacgtaatttaaagttcccttttctaagtatatactcctgtttaggaaagactaaaaaagcttatttgattggtgaaaatataagtaaaaagcccacattaatggcattgattgcgttgaggtcaattgatggaaataatcacgtcacgtaaaaagttctcgacatagatctttgataaccaacaaagacaagaacgataaataccagcgaatacaattatgaaaatacgcctaacacgtacgaaaatgtatgtatgcacacgcttcaacaaagatttcatgctttgtttggtaaaagtatacgaaaatatatatatatatatacaaagtaaagatagtgttcaagatttttttaattttgggtaaataataagattgattggaaatgttataagaaaaaggaaaacaggagagaatagtgaatagagagaccaaacaacaaataagatttgatggcgtgaattgctttttctgcttttctacttttgcttggctcttagtttttaaatttaaatacgactttagggtaatggacaaagcctgaaaattcactttttgcttcataaaaaacaaaatttgtcaagggtattttatttctttcagctgaaattaagacgtaaatggtggtttgcttgtttttgttgcaaaacgaatagtatatcgtagcgacaaccccatgcaaattgcaaagtgatgcgagtattgacaacaaaaagaagagaagcttagccagtacaaataaagttgttcagaagaaaaacaaattcgtataagcacacgtgtagctggatattctcagcatttacattaatcaatcaatatatacacttcaatctaatgtttatattaagaaattgattgagatttgatagtttttgtatgttttgatggacaacaatgaaaaattgttgtccctctaatcattttttttttttggctgttcgttttttttgtttttctcaaagaacagaaatatcagaatggcagagagatcgatcaacccattaaccataaaatcacagcactgtttttattatattaaaattgtcagactcaatatttaaccttctttcttaaaaacaaaaaatagcgcagatttaatctgacacctgcaaaatatttcattaaatattttaaatttctttaaataataaataactgtttgttatttctcttcatctcctttctctttcaatgtccgttggtaaaagacgaaagtttcagacataacatctcttcccatctctctcccctctaagcaattaagcagacaagacactgatgatatgagacgaagagaaagaagtcttatcactcatcctttcctcttatgaatctctccgccgaccaagctcccgtcaccgccgtcgacgaactagctccgccttctcaaccgcatcgcttatctacatcatgtgatctccacccagaagagcgtttctccggtttctgtccttcttgtctttgcgaccgcctctccgtcttagatcacaacgccgctccgccaccgtcttcttcttcccggaaacctccctctatctccgctgtttcgttaaaagctctcttcaagccctcctctagtggtaccaacaactccaacggaaacggtcgggtcagacccggtttcttcccggagctccgacgtacaaagtccttttccgcaaagaacaacgaaggattttccggtgggtttgagccacagcgtcggtcttgtgacgtcagacttcgtgacgacgaaagaaaccttcccatcaatgaagctgcctccgtcgataaaatcgaggaggaggctagggagtctagcgtgagtgagatagttttagaggtgactgaagaagctgaaattgaggaggatgaagaaaacggtgagaaagatcccggcgagatagttgaggaaaaaagcagcgaaattggtgaggaagaagaggaattgaagccaatgaaggattacatggatctctactcacaaacaaagaaaccgtcggtgaaagatttcgccgggagtttcttttcggcggcctctgttttcagcaagaagcttcagaaatggaagcagaagcagaaggtgaagaagccgagaaacggtgtcggcggaggacggccacagtctgaaatcggagtaggccggagatcaagcgacaccgacccgagattctctcttgacgccgggagattctccgtcgatataggtcggatttcaatggacgattctcgctactcattagatgagccaagagcgtcgtgggatggacacttaatcggcaggacaacggcggctagggttcctctgccgccatcgatgttatcagttgtggaaaatgctccgttgaatcgatcagacatgcagattccatcgtctccgtcaattaaaccgattagcggtgactccgacccgattatcataatcccaggcggatccaatcaaactcgagactactacactggacctccgtcgtcacggagacggaagagcctcgacagatccaattctattagaaaaattgtaacggagctagaggatgtcaaatcggtatcaaattcgacaacaacaatagactcaaattccatggaaacagcggagaacaaagggaatcaaaacggcgataagaaatcgagacggtggggaaaatggagcattttagggtttatatacagaaaaggtaaggacgatgaagaagaagataggtacagcagatccaacagcgccggaatggttgagaggtctttatcggaatcatggccggagatgaggaatggagaaggaggaggaccgaagatgaggaggagtaacagcaatgtgagctggcgaagctccggtggaggatcggcgaggaataagagttcgaggtattcgtccaaagatggagagaacggaatgttgaggttttatttgactccgatgaggagaagctggaagaccagcggtggtagtggtggaggcggaggcggtggtggtggtggtgggtgggagaagacggcggctaaggcgaatagtcacggccactctatagcgaggagggttatgaggctgtattgaccaaagtgtccctcttcattttaattattgggagcaatgtgaggttttggtttggggttctctaattatctttgtgaataaattggatatctacttaaccggagttaatcggaccaaattggaaccgggtcgttttcaaaaacctaaacttataaacactcggagttttgagttatgctctctctcactcactccgccgccgtccctgcttccaccacatcctccgatttatgattggatgggatcatcgagctgattcgattgcaagaatgcaagtaagaacaagagactgattgagaattgtaaaaaccggaaatttgggtgatgctttgaaagtgtttgacgaaatgtctaagagagaagaacaacttgaggtatggaacaactgaattagtcaaggctggataatgactaaggtaacatctttatagtctctggctagcttttgttctctctgtttctcgtactttgcatcaaaaatcaaaccgcattagtatcatcttctcttaacttcaccaactagctaagtctgagttccaggcctttctctgtgtctgcattaccaagcttgcatagagattgaatctttaagtagcttaaacaaacataacaaatggtttttgaagtgagcagcataagcacacacatcggtcttggtggtttgagtaaacatcactgagatttgttgttttacgatgcaatagcaaatgtaaaagtagcttgacgtatcaagcccaagtgttaagtttcaaacttgggtctattaatcaagttatatgatctttgttgctacctttttccctttatttgcttttttcattctctattcaaaatcagccaacctttgcttgtatttccattctccactgtctctctaatctgatcaatcctgcaggttctttgaaagcttgcattcgagtctcagagcgtttgatcacggattcatcactactattctagttgcaatcaaagaaatggtttcactagcggaatctcagcacaacgcttgtgttaaatacaaacccttgaactctgcaaccacaaagcaataaggatagtcgaattcaaaagtagtatcttgtaacctaaactcaagcaaagaacttcaaacttgcttgtttatgaaaaataaaaataatatctgtaaatatgtttcagtaacgagattatcaaacattgcgactaatttcaaatcagaattcgtgattgcagccatcgttatgttttttgtatcatcaaagcgcatgcccggtcgttttcttgtaagtgtaccatttagcaatccaaaggtagaccaagaaattcaagaaactcagaccagctaatagccaaaagaagtaatcaagatgaccattgttgaggttcttagcgatccagcctggtcttccacctgatctcgtgactttagtgaccaatgtcaccagaaatgtgctcagatagttcccaaatgcaattgcggtgagcgacaaagccgagcagagactcctcatagcatcaggagcttggtcatagaagaactcaagctgacctataaacgtgaaaacctcggcgcaacccaccaaaaaatactgcggaacttgccagaaaatcgtcatcgggatagtctcttcattgtaaagattgtgtgtttgaacgtagtttaaccttgcgacctcgaggattcccgcagagaccatagaaaagatggagattacaagcccgattccaatccgttgaagctgtgtgaatccgcgttcgtgacctgtgtatttccgggcgaagggaacaattagcttgtcgtagacaggtgcccaaaacaggacactaagcgtatcgaataaggagagtgatgcggaagggattttgaagttaggtcccatgtgttggtccagtgtgttgccttgtagtacaaacacagtccccatttggctataaaccgaagcgaaaacaatccctgtggcccaaatcggtaagagacggatcagtgctttgagctcttctacttgtgtcactgtgcatagcttccatgaagacgacttagctgctcctttgttgtcactctctgtttccactgctgccttatcaaagaacctgaaatgatttgaagtgagccaaaagttaacctaacaacacaaaattacagaccggacttgcttgtgccttacgttaatattttggtgtgttcgagcttgcggcttcctatgatactgctttcggcgtcttggttctcgtagagaagagattcatcttcaggaattttcactttagattttctgcatgaagccacaatgacttgcagcattcttgtgagaggacttcctcctggtttctgcagcctgtagaagttgcttccggcgaagaagaacacgacggctatagccattgcgacggtgggaacacctaaaccccaaccccaaccaacattcatctgaatccaaacgagaacagaggaagcaatcattgcaccaacgttgatcacaaagtagaaccagttaaagaaagagctcttagactctttctctttttcgtctgtatcatcaaactgatcagcaccaaaggaagagacacaaggcttgatccctccagttccgagtgcgatcaagtaaagcgctatgaatgtaatagcggtttgacccgctgttgcgtgacaggtttctccgctgcaggttggtgttagaccaggaaccgaagctgatatcgtcaatagcgtcattccctaaattacagaaacaaaaaaaaaaagagcaaacagtttcaagattctgtgattttctttgttcacgttgagagcaaacagagcaaagagtaaattattacggcaatgtagatgacgacaaaggaagcgatggtccagtatcgaccgagataagcatcggcgataaaagcaccgatcaaaggagtagcgtaacatgttccagaccagttactgacactcttagaagcagagacgttttccatattcatttgtttctcgagatagttgatgagattagtactcattccatagtaagctaatctttcacagcactcagttcctgccaattgctcatagatacaatcaaatcaaattcagaacaaaaaaaaacgatttggtttttattacaacaaaagattaaaggtttgaacaataccaagaatgaatctgcaagctttccaggttccagttttattcttgttggctggtttcttgtgaatgtcaagagttccatcttttgtgtatatatccttgtcatcttccattgttgtttggtttcgacaagtttaagtgtgacccctgagttttcaacaatgtgagaatttttgacctgatttactgagaaaaaggacaaaagatgacttctttgccaagtaaaatctacacaacgatatttctacgactaattatcggatttagacagataagcctccatatatatatatgtgtgactccacgaagaaacagaattgaaaaacatcgatttattttatgagcaatagccaaagtaatgtccattacatgcatcatgacaaaaacataacgcgttttctagacacaaactgacaaaatcggaagccatacatacatatataatttcgtcgaagaaagctacggatctgaaaactcgaaaacacacaatcgcaaatttcgtttgaaaatgaaaataaatctaagaacactcctcccgaaaatgtgtgattactagtaacagaaattgttcatagaatcaaaaaaaagacagatcaaagataaccagatttaatatttagaaacggttaatcgttggtgaaagattcgtttaccttttctcggggaagcgacgacagagttttgtgccgggatttgaactacacggctgaggaagataaacttgagggcttgagcgtttcgttttgcgccgtgtgatagatatttataaggaaacactctgaatagtgaaggtgaatcaggcagtttcgtgattttaccagttacgtcctcgcatttattatctttctctttgttattttgttgaattttgaataactttcttgaatctttgagaagatgtggggatgctaaatcctattcatagtaatgtatcattaaagattgtggttgtgtaggtttgaatccctttcatttatatgttaaagaatcaaaaattataacaaaattacctaattcctaacaaaaaattgaaatagttatggaaacatatctttttgtttttgatcaaaaggaaacatatctataaacggataatcaatattgtgaacaaaaaaaaaacggataattaatacaccaaataacttatggattctttttgtgattgtgtccagattcatggaacggttacatgacacatcgatcatagaattgaaatttatttcaacgactcaagagaatagcagattgagaatctctgtacaacttttctatttctacaacttctagtcaaaacaaacctaccacacaaaagaagtgttaagtggtagagaaagattaacttttttaaccataaactcacaagaggttaaacaaacctaccacgcaaaagaattgttaatatcctgattagtagaactaataaacttgtttgaaaacttaatgcacacgcattatctgtgacctatatatggaataaacaaaatgcgtaaacaagttgtaatagatgttaatataaccacgaaaaaacaaaaaacaaaagttgagagactatagaactatgaaaataagtttaatagtacttaagaaaaaaaattgatataattttctgttatgttttctcagattgttttctacgattgatgctgtgaagaactaacttgtttcttattgattcataatgaggttacatcacatatatatacatacttgaggaggttacatgtctaatgggctaggttacaaaagcccataactacttaagtatatgaccgacctaagtatagtctccatgggccggacctacgggccggactgactgtggcttctctccatggaccgggccgacaggccgacgggccgatggaccgatggactgatgggccgactggtcgatgggccgtcacaccaatgggctgacggacctatcctccaaagacatgggccacggttatggagtccatccaacaagtggtttacaacactcccccttggatgacataaccgtgtagatgccaacgggatctcagtaatacgctaggggaatgctgcctcattaaaaccttactaggaaaacccttttcgggacaaaaccatagtgaggaaaaagagtacagcacgcattactccccctgaattggtcatctctataagtccttaagcctccgcatcccaacctgatgcgcgagcttcctcaatgtcgttgctggtaatgccttggtgaatagatcggctgaattgtcgcttgaacgtacttgcaccaccttaacttcaccatccttctgtaagtcatgcgtgaagaagaacttgggcagaatgtgcttcgtccgatctcccttgatgtatccttccttgagctgagcaatgcatgccgcgttgtcctcgtatatgatggtcggctccttgtcttcgaccattccacaatcggctcgtatgtgttgagtcattgacctcaaccacacacactcgcggctggcctcgtgcattgccaatatctccgcgtggttagaggaagtggccgtgatggtctgcttcattgatctccaggatatcgcggttccaccatgagtaaacacataacccgtttgtgactttccattgtgcggatctgaaagatatcctgcatcagcaaaaccaactaaaccttctttgttatggttagtataatataaaccaaaatcaattgtcccttgtaggtatcgaagcaaatgcttgattccttcccagtgcctcttggtcggacaagaactgaatctagagaggaggttcacggcaaaacatatgtccggtctagtgtggctagacaggtacatcaacgctcctatggcactgagatatggcatttcaggaccgagaatttcttcatcgtccttctttggaccgaatggatcactatccaatcctaggctcctcacctgcattgggctggtcaatgggtgagccttgtccatattaaatctcttgagtattgtctctgtatatgccctttgatgcacaaggattcctttatctacatactcaagctgcaatcccaaacagaactttgtcttgcctaagtctttcatttcgaattctttctttagatattcgactgtttgggcgatttccccagagattcccaggatgttcaaatcatccacatatactgctattatcacaaatcctttgctagcaaacttcttgatgaagatgcatggactgatggggtcatttttatagccctctttgactaagtactcacttaacctattgtaccacatgcgcccactttgtttcagtccataaagtgatctgttcagccttatgcagtattggtctcgagacccatttttatcttttcctttgagctcaataccctctggtaatctcatatatatctcattatccagtggaccatatagatatgcggttacaacatccattaaccgcaagtcaaggttctctcttattgccagacttattagatatctaaaagtcgttgcatccaccacaggggagtatgtctcttcataatctactcccggtctttgtgagaatccttgtgccacaagccgtgccttatgtctcacgatttcgtttttttcatttctcttcctcacaaagacccacttgtgtcctactggctttatattagatggtgtcctcaatattggaccaaacacatctcttttctttaatgaacctaactccacatcaatggcttctttccacttaagccaatctgacctttgagtgcactctattatagacgtgggttcatgatcctcatttatctcatatgctacctcatatgcaaatttctcgtcgacgtcgacttcttttcggttccattttattccagacatgatgtagtttattgagatctcatcattatcaattccttcaggaccatgagcttcggcgtcccgaatctcatttggtggttccttaggacttgccgcggccatgtctatggtttcctttacctcggttcccattgcacctttcttagtctttcgaggaattttatctttggaacctattggtctaccacgtttcttctgtgggttagactcggtagcaattacattgattcccttctggatatcaatacgtactggtgcattacaagctggtatgtacgatttcacaactctctttgggtcagcaaaggaatctggcaactcattagctagcttttgcaaatgtataattttatggacctctgaatcgcacatcagagtccgaggatcttgccaattcaaggatgtttgattccatgctatctcttttatttctttacccagcttgttcgtctcaccacctaacgcagggaactcggattcactgaagtgacaatccgcgtatctagccttaaatagatcgcccgttgtcggctctagatactttataatggtgggagaatcaaatccaacatatattcccatcctcctctgaggtcccatctttgttctctgtggtggagcaattggtacatatacggcacacccgaatgtccttagatgggatatgtctggctcatgacccgttaacaattgggatggtgaatatttgtgttcactagatggcctgatacgaataagttccgatgcatgtaatacagcatgtccccaagcggctactggaagcctcgacctcataagtaatggtcgagctatcaattggattcgtttaatgaaggattccgctaatccgttctgtgtatgtacatgtgccacgggatgttccacacttacccccatggacatacagtagtcattaaacgcttgggacgtgaattcaccggcattatctagacgtatagtcttaagcggaaaatctggaaaatgggctctcagacgtatgatctgggccagtaacctagcaaatgcttggttcctagaggacaacagacaaacatgtgaccatcttgtcgatgcgtcaatgaggaccatgaagtatcgaaacgtcccacatggtgggtgtattggtccacatatgtccccttgtatcctttccagaaagtttatggtctctttattgacctttgccggtgatggccttattatgagtttcccttgtgcacatgcagcacacgtgagcttctttgggataactctcttttcttttagggtgtgcccctttgaacttatcattagctttcgcatcatgttatgacccggatggccaagccggtcatgccacaaagtgaactcctctatgaactctttgttcattgccaaattatcttcgatcatgttgatcttagtatggtaaagaccagtggacaatgcgggtatagtttctaggactctcttaagtccttgggcgatctctgttatatgtaggaattctctattcccttcaccctttgtttcaacgtggaaaccattaagacgtatgtctttgaaacttaacaagctcctctttgagctgggtgaatacaaggcatcacttatttcaagatgtgtgccgtttggtaagagtacatgggcttggccgtagccctcaatgagactcgctatacccgctatagtgctaatgttggcatttctcaatgttagatttataaaatatcttttgtctcttaatatagtgtggcttgagccactgtccactatgagtatgtccttgtcctcggccatttctaaatgtggacaagaactatatcttaggcgataaagcaaacaataatgaagcaaagcaattccataaaaataaataaatccaagacatcgagcaatagaaatcaaactacaaagcaaagcaaacaaatcaaatttaaaattagatgtctattctcccaagatgtccgaagtctcataatccattaggtcatctttctcgtggtcgaaatccccttcaccatcgagatgaaccaaatttgcttcgggtcccttttgctttatcatctcttgatatgcctcaatgaggtgcttagaggttctgcacgtctttgcccaatggtcgtccatgccacacctatagcacacggacttagcctttcctcgcggtttgttaataccacggcctctacccctacctcggccatagttcccacggcctctaccaccatagtggtttccttggccgtagaaattgccacgacctcttccaccacgtcctctgccacggccacggccgtgagggttacccctatggacgtagttggattccttggtcgcctgaggttcattaggcgctttggccatttcggctctattggcttcgggcacagctgtggatccgggaggtctcaatgcgctgttcatgagtaactgctcattgttcttctcagcaagaagcaggcaggaggctagacttgtgtaagtcgtaaaccctttcgcacggtactgttgctgaagcagtacgttgttcgcgtgaaaggtcgagaaagttttctcgagcatgtcattctcagtcaccttctcaccacacagcctcaggatagagacaatcttaaaaagctcggagttatactcctccacggatttataatcctggatcctgaggttaagccaatcatgttgggctttgggtagttgtatggtcctttggtggtcatatcgattcttcaactcaagccaaagctcaagtggatcctcgactgtaaggtactgatttttcaagctctctgctatatgatggcgtatgatcgagatcgcctgatactttgacctctccgttttctcatttccttccacaatgcactcggcgagtcctttagacttcagctcaatcttggtgtccaatgcccattgaaggtaattgtcaccagatgccaagagtgcagcgtacatgaggtttgtgagcttcgacatctacaatgaagaagttacgagtcaatatcatgtaatggacaaatcataaatgtcatgaagaccataaatcgattttcctatttactcaaggatttgactttctcttttcctctttcccttgggacaatttcctcttttctctaggataatttcccttttctctttaggataatttcctttttctctttaggataatttcctttttctctttaggagaatttcctctttctctagggattatttttctttccctcttgggagagtttcctttttcggtcttagggtaaattttcctttttagcgattttctattttccttagggttttggttttagggtttatgcaacatgaaggattttaacaattcatgcatgcaaccatgaaatcaatcaaactaaacatcctagacaacttcaaacaatcacgaaatagaattagggttttgatccgattatagtgttttcgatttagggtttatgtcttttagggtttcggattctaggttaatatgttttcgatttgcaagtttaggataagcaataacaagacaaacaatcgagcaaacaagcaatcatattacaaacactactcaaccattcgtttttagggttttagccgtttgttagatccatgttcgattagggttctttagctttagggtttaatgaattacctttctcctttggggttgtacggactggaaccaggagctaaagaccttggttatcgaacggtggtcgctggtcgacagttggtggtcgacggaagtatcgtcggctgacagacgggcagcaaacggtcgacaggcggtcagcaaacggtcgacaggcggtcagcaaacggtcgacaggcggtcgacggaacagcggacggcggacgagctagggttgagcggcggcttctagggttttgttaagagcaatgtcgtgctgataacgtgtgaagaactaacttgtttcttattgattcataatgaggttacatcacatatatatacatacttgaggaggttacatgtctaatgggctaggttacaaaagcccataactacttaagtatatgaccgacctaagtatagtctccatgggccggacctacgggccggactgactgtggcttctctccatggaccgggccgacaggccgacgggccgatggaccgatggactgatgggccgactggtcgatgggccgtcacaccaatgggctgacggacctatcctctaaagacatgggccacggttatggagtccatccaacaagtggtttacaacagatgctacttttttttttttttgtcgctacgattgatgctacttagatgaattatttattcgcttgcttgataaggttgtaatatttgctgagataatttaacatcttaaaaccaaaataaatctaacatcagggatcttttagcaaatgttttcacttcttaaaatgcatatgatatcatccacatatgttactgtaatatcatgaatgttttttggtcaaatattatcattaatatatgaccaatattcttgtctattttggtcaaacatagtgtggggaataaatctgaagtagtctttaattgtttggtatgaatttttgggccttaagtattgttatatgatcatatttggcctttatagacccaaaaaaaaaagtatatataaaatttccatgaaaaataaattaagattactctgctccgaatgaaaatgatatatttatatagatcaattaatccactacccacagagaagaagaaaaaaaaccatcgcactcaaatataggttgaacacttttaattgtgaacaacaaattagttcggttattgcttcccaacaaatataatcattttctgttagatgctatcctccaatcagatttcttgaaaggtaattctcaaccatttcattttcacattaaggcttttagatattcatttacctttgttaaccgaaagtttaaatatgaatagttacacgttatcactagatgtcattcattcttgtaaactacgtactatggtgattattactagaagaaagtattgtttttaattagaacatgtttacacgtaatttttacataaatatttagatgtgtttccaaattttaaagacatagaatcgggctaaaaatcttatttgggacatccagaaattaaacttttgaaacatagaaacaagacattgtgatgagaagagtaaaagaaaacataaaaagataccaacctacacttaggttccaacccacaaagagatacatatactttccctctaagctttgaagctttagtttcaccaaactgacgaagcacaagaacccaacatttgcatctttataaggcaatgatcatgaatcattttcgaatcacaaaaccaagagagaaagttgagaaatcatcagtagaagatcaaaagaagaaaagtcatagtatacatttaaagacacatcaaaagcttcaagggaaatggtatttccaattcggattttggttcttttcgcattgctcgccttcccggcatgcgtccacggtgcaatccgcaagtacaccttcaacgtaagtccgcatgatcaatgttatcatcataatatattatatgatttcatcaaggttgtatcattctttttgagtctaaaaaattcttaaataaaagtagtaaaacgtacgtacgtaattatctaaaaataacaggtggtaacgaaacaagtgacgcggatttgttcaacgaaacagatcgttaccgttaacggtaaattcccaggacccacaatctacgctaatgaagacgacacaattctcgttaacgtcgttaacaacgtcaagtataacgtctctatccattggtgagactgtcctcgtatttttaaattatcaacttttcctcccttaattatcacaaaattaacctaaaaattgattttgttggtttgcaggcatgggataagacaattaagaaccggttgggctgacggaccggcctacataactcaatgtccaattaagccgggtcacagctacgtgtataatttcacggtcacgggtcaacgtggtacgctctggtggcacgcacatgttctctggctccgagctacggttcatggtgccatcgtgattctgcctaaactgggtctaccttacccgttccctaaaccacatagagaagaagtcatcatactcggtactaattacaatgacataattatgataaacgttaatttttaaaattgtggttttaacaatttgaatttcccggtttaatgtttaataggtgagtggtggaaatcagataccgaaacggtagtaaatgaagcattaaaatccggtttagcaccaaatgtctcagatgctcacgtcattaacggtcatcccggtttcgttccaaattgtccgtcgcaaggtgaaatactaaattcgatttttaaaactaaacttcactataatcattatttccttaatttgtattattatatgatctgattataatttttgtccttttttataaataaaggtaattttaaattagcggtagagagcgggaaaacatacatgctacgactaataaacgcagcattgaacgaagaactcttcttcaagatcgccggccaccgtttcaccgttgtggaagtcgacgccgtatatgtcaaacccttcaacaccgacacaatcctaatcgcccccggtcaaaccaccaccgccttagtctccgccgcacgtccttccggtcaatatctaatcgccgctgctcctttccaagactccgccgtcgtcgccgtcgataatcgcaccgccaccgctaccgttcattactccggcacgctctccgccacacccaccaaaaccacttcaccaccgcctcaaaacgccacctctgtcgcaaatacattcgttaattccctcagaagtctcaattccaagacatatccggctaacgttccgatcaccgttgaccacgatcttctattcaccgttggattaggaatcaaccgatgtcacagctgtaaagccggaaacttctcacgagtcgtcgccgccataaacaacattacattcaagatgcctaaaacggctctgcttcaagcgcattactttaacctaaccggaatatacacaaccgattttcctgcaaaaccaagacgggttttcgattttaccggaaaaccgccttccaatttagcaaccatgaaggctacaaagctttacaagcttccatataattcgacggtgcaagttgttttgcaagacaccggaaatgtagcgccggagaatcatccgattcatctacatggatttaatttctttgtggttggtttaggaactggaaactataattccaagaaagattctaacaagtttaatcttgttgatccggtggagagaaataccgtcggtgtaccttccggtggttgggcggcgatcagattccgagcagataatccaggtttttatcttattatactagtacataatatctacaacttttgtatagtaatatatatttttcaatttgtaacaatgactatttgaaataatatatatgtatatttgtgtggtttcaggggtttggtttatgcattgccatttagaggtacatacaacatggggactaaaaatggctttcttggtggagaatggtaaaggccctaaccaatcaattcgtcctcctccaagtgatcttcccaaatgttgaaaactccattattattttttgaatcgattaattcgtttcttgacattttaaaattttgatatgtgtatgctcatgtaaattgtcaataaagtcattgtatgatttgttacgctttaatgaaaggttgaaaagaagcatccttttaattaaactcaccaacttttttttgagctgaaatttttttcggacttctgattgatccatagtttgtcctaatttgtttttatcacttgtttaatacatgtggtagataataaaaaatgttcaaaacgcaataccatacttgaaaaaaaaaaatgttagacctagttataagacaagactgaactaattaagtgatcggttagttggtaaaacaaaatagtatttcgaacttaattttcacctaaagtttaaacgtgtctactaatgactcgataaactaaaaaaaacagtcttttttttcttccaaaaagtcgttatcaaagcagaattcatctgtcgtcgaattttgaatgagtaggtgcaatgtcacatttccaatattaaaagaaaacgagaaagaaaaaaacaaaatactcctcataaaacgatagaaatgaaataaaacgaagcaagagtaataaattcgacagaaaaaggagtaatttactaattatagtaagagaatcttgctaaatatagaatccaagaagaagtcactctctgtggaacagaaaccttgtgtctgctacaaatcagcagatgacacttacagtttacgtttcatcatgcatgtgagcgacactatagggagaattcggtattggcttcctttgttgtccctaccttatttaattactcctgataactatttttctgtgtatttcatcgtatcgaaatatccaaatttcattcttcatggctgatttaactagtgtttaattataattatactttatacttttttttggttcttaatcacacatgctttcgggatcttgaatacgaaattttaaaccgtctatcatttgtttcctgaaccgggtattgcaaatagttaaatcttagtcaactattttttcgagttttttttaaaaatagttctgaaagacaaaaatacatgagtttgtgaaaatgtttgacagttggctataataattggttgcaatgctttatacttttaccaaatttaaattattcaattggctagaagtggagctgtggtaccgtccacatgaggtggtgtcgtggtgagacattaatatatgaacttttgttacgatatgaaagcacccgacacatacattcttcgtattatcttgccttatatgaataaacataaaataaccaatactaaatttgaaactgtgatacactaaagaaaatatctttggttacatccagctctggcttctgttcaaagtttttcttttgaatttatttaaaggttaattaagatcaccacctaacccacttgtacaacggttctgcagtttttgccatcgaatcccattgtttaattcgcatatttgtatgatctctactttttttttaaagttaaatagattaattaacaaaatgaagtttatttacaacaaaataaatgaaaagtacaaatacgttaaaaaacaaattgtttgccagccaaaaattaattaaatacgtaattttcgaaggtgtaatattccaacttgtttttgtatatttgtttagcttatggagttatggttgtgttattatatattgaatgggctatttcgtgttgacaaataagctctttagttaaatattattatgttcttgattaaacaacaaattaagaaccggccaaaccattgaacagtcgttttctggtctttttcattttattggttacaccttctttgtcataaaatagaaattatgttatactttctttcatgtatcgacacgtgcatttggttagtcttaatcccatttcaattttatatgatttatcatattagcagaaaacaaatatgctaattatcacatagataagccatactaaaagtatttatctgaccttaggttaaaaaaaatattaaaatatagcttataagaaacattcactactgagttgtcatatttctactggccgacttagattgcaacaactaaaatatattttttataaatcatttgacataggcaaaacaaaaacaaatatctctgtaactttttcctcaattttttcttttaaaaaaacacttttttatacaccttttcctgttgaatgtattattattcctattgatcatcacgtgaaatatagaaaaataaaataaaaaagcaaaatccacttttgtgttttccttttcgtttacgaccaaagagatccactttatgctctcttcattttctccatgtaataatttttctcgagagatttctgaaaataaagtcgtttctttttttttttgccttggtcactcaagactctcttcttcactctctgttttttgtcctcttctaaaatttagagaaaaaaacgaaagttttcaccaaaaacagaggaggagctatgtcatcgtcgacgatgtacagaggagttaatatgttttcaccggcaaacacaaactggatttttcaagaagtcagagaagccacgtggacggcggaggagaacaaacggttcgagaaagctctcgcttatctggacgacaaagacaatcttgagagctggtccaagatcgcagatttgattcccggcaaaacagtagctgacgtcattaaacgatacaaggagctagaggatgatgtcagcgacatcgaagccggacttatccccattccgggatacggcggcgacgcctcctccgctgcaaacagtgactatttctttggtctagaaaactccagctacggttatgattacgtcgttggaggaaagaggagttcgccggcgatgactgattgttttaggtctccgatgccggaaaaggagaggaagaaaggagttccgtggaccgaggacgaacacctgtaactaccaaatttcttcactacttctaattaatgttataaagatttgttctaaaaaaatcgatattttatgttataatactatagaatttaagtttctaagcctaacaatttgtttattttggtaaataattttggaactaaatcttgttttgtggtattttgaggtaaatatatctcttttattaatatttacttgaaattctctgtttttatatgaactcactgaggagaatatttcttttgataattaaaatgcctaggatttatacttttcttacaatttatatctattttcaaatactttcttgaaattatttatcttatgtgaagttaactaaatataatattgatttacttttctttgtttgacagacgatttctgatgggtttgaagaaatatggaaaaggagattggagaaacatagcaaaaagctttgtgacgactcgaacgccgacgcaagtcgcttcacacgctcagaaatattttcttcgacaactcacagatggtaaagacaaaagacgatcaagtattcacgatatcaccactgttaacatccctgacgcagacgcatccgcaaccgccacgaccgctgacgtagcactctctcctactccagccaattcttttgacgttttccttcagccaaatcctcattacagtttcgcgtctgcgtctgcgtctagctattataatgcgtttccgcagtggagttaaatcacttagaaattatctagagtttgtggtctcctatagatttgttacatacattttctacgtacatattactgcagaattgttgtaaatatttgtatgaaaaggtttgtgtgattctgctgtccatatattaggtctggttggttgtaattttcagtgttccgagttttataataccaatatatgatatatatatatgatatatatatatatatatatatatgtgtgactttacatactatattctttaataatcatataattataatgtaaataccgttgactttaatgtcaatgcttggtgtgagtcgctttttcttcccgacaacttaggattagttcgaatcagcatctaattcagtttttttttgttcaaattaaaagtaaaactgacgaaggatctgactattaaatactacttttttacttaatattcttcccatggcttcgctgatcgttcaacataacagaagaattatattccattttcgtggttccatttacctccaattattatcatgaacctgacgggtgttgcgtcccaaatgcttcgagctttcaatttgttttttttttgtttaactaaaaaaaacgaaaagaaaagggaaaacaaaaaaacaacgtcggcttacaaagcccaaagaagaagaaatagttaatgcccattaaactgtgccccaataagatcccttaaaccccgtaaaaatccatgattttcaagcccagtagtgatttggagtgtaccggtgatttggagtctactaaaatgttaaattcataaattgcaaaaagttgtaaactacagtattaggattacgacctcttaaaaatagagatacaaaagagtataatatgaagtcgcaccacatgtttttcatatttcaaattgcaaccaatcgtagagagttataactagtaagacttccatcgccgtacctaaaactagataaaagttgattaaaagcaagtacacttcctttgtcttaacattaaaaccaaaaaaaaaaagtacacttcctttgtcttttcaacacgaagaagatagaaaaccgtaaaaagaattctaaaatcatgtattttgataaaagtcatgcgaatccaacaaattaaagaggttgtagccgccttagttgtgtaaatcgttataggtgtcaccgtgcactaaagatcaattgtataatagacatgcacttgtatgcaaaggtttggatccctcttctcttgcttttatatgtaatcttataaattataaattcacaaaacaaaatttcttgaatcagttcacagttacgaaaacgttatagttaactagaaaaccataaaaacatgtaatggggtagtgttgtaaattcaacatccaacaagtcttgtcggggtaggatataagagagagcaacaaagaaacaaacaatcaaagaccacaatttttctttctcaaacaagacatgttctttgtaccaacttgtgttttaaaaaataaaataaaaagtcaagctggttctaagggtagtttcgtcattgtgataacaatctccatcaggtatgacgtggcttccgcatcagattattcgtttttagttataacctccgaaaataatttcgctaaacatttaattaattattgtgtacctgtttgatttgtgttttaaataattagcatgttgtgcggtagacgtagattagactcggaaatcacaaacccccgtgtagttaactattaataacaaacaaaaaacatcaattgtttagaaaatatacagaaattttgaattttccgaaaatacatgaaaaataaaagaaaagtaaactagacaaaatgatagtatagacttataagtgccttacgcatctaattaaggacatgattcatcgtagacttgatgacctgatcttaggatagccggatggattatgatttatgattcatctaataatatacggatgaattatatcacaaatttcagattagagaagagatgtggagctaaacaagatttacaaggttgacattgattaatttgagtatagagattaataaatctataacgacatatgtaccatgtacttaatgagtgggaattaggggtcacatgcatgcattatgggtcatgtaatgattagcttgacattaaataagtaagttggtgttaaatcaatattgattaattaatgaaaaaggtatatgcatgtattgcttactccaaaatatctgattagtgggaagttaaaaagtattatttcttaccactaagttgcaccattcccagttgataattttatgatcacaaagacaacatctattcacatttatacatgaaaactactaaattgaattcataatcccggaagtgtgtatatatgttgcaagaatatccgtaaatgatgttcttaaaatctgaactccaaaatctttctaggcaacttgtcggtggatgcataaaaccgatatgatgaacaaggtctgaaacaacatttcacgtgaacaaagctctggcacgaagcagttccatttgataaactacattcacacattatgtcccgaaaaaccaataagcgatacctataatgcatgtaactcactgttcatattcgtgagttttcactttttttttccttttctcatgagaagtacttttttgttgttgctggttggctatcataaaaagtactataatctacgttattggtatatctttgtactcgttataactacaattaaaaaaaaaaaaaaagacacaagtattatccaagaaaaacaatccttgtaaatcgaatgaaacagtgaagccgaatctatatggtattgtgggaaatctaaaccttttgtttatatatagattagtgaaagtgatttaaaattgtccctaccattaatatggagaaaaacggtcaaagcactcagttttggtagattttatagatgcattgaacatgcttctaattaacagagttgactcttttttccaccattctcttttatatattagtatatatatccactacagcatgtatatacatttctttcttgaaaaaggaataagtaaatatgaatagtgtacactgaacaatccacttcgaaaggttaatctaagttaactgttacagctagaaaagtttgaagttgcaaatttttaaatattagagattaggatatgtctagctagtggacaacccataggccatagggtaattggtggggtaactttatctaaagctttataacacgacagcaaaagtggaagatgttgcaattttcctcttttattcaactttttcgcttccaagtttcgtgatttacatggtattgatcacaatctgtttttactattgcatttttcttttccgacttcttatggtttagagtcaaagtaaacttagaaaagcaacatgctgtatcacagattaagcgaatgcaaaataagaagacatttttttaagtccattgtgacatgtttagttcatagagtccatttattatttattttcctcactatacagtagacatggtacagtttctcatactacaatcatatctattctgcttttttctccaatcatagtatttattatgcttttaaatgccttcattaatcccttaatgccgcttattaagataagaaccataataccatattccaaacttttaatctttaaactaccgtaaaaaattcctttgattttacgacgatctttttttccaacagtaggagtttcgtataaatatgcaatataaagtcatgctaccttttgaaaaccagtaacatacatttaatataagttgaagacaagtgatgatacaacattattacttaatagcattagtataatctaccatatgttttttttaatatgctgtatgttggcatcaatgccatactttatttgcttcataaatcatgctgattttcttataattttgttttcagtaataacattgtcttatgttttattttatcagcacatgtaaatagttataacaagataagtaatataacttattaatagaatttgaactaaagccattataattttgatatatattgttacgaaaattattaacgttagttgacaatagtatcaatcattttcctcattgtttttgttgttggttatatatgctcatcattattaatcaccacatgaagtgattataactaattgttgctgtcagaggcgaatcagacttgagaataagcaatgattactaagaacaaattatgtaatggaaatgcagttgaattctactactaatttatttccttaaactcaataattgttaaccattgtagtagctgaaatttgggatgcatactaaacaaaaattattgtagttggggaagaaataattaatgatcatgtttcatgttatttgagttaataatggaccatatgataactgagtcattaaatgcttttgttctttgaaatgaccaactagaatcaatgcgaaagacacatatatagcgcatttgatgtcatatatactattattaaattcatatatacatctaacgatacaatttaatttatctatgttatgtactgttatttttcatgattctcagctgataagacattatacatatccaaatcgaatgcttttgaataagtgcacagaagttaatagaaagtaagcatcaaattctatattaacatttccacactattttaatattcattgcatttgcatacatatatatatatatatatgtatatgattctaaaagttttgaaaatagcataacaagaaattaataagtggtaaaaatattaaatgtcatcaaccgttaaatattaactattcaagtaagaaatcgtattaaaatactactatgttacaaatcttcgtttttttttgtccgaaacaaaacagagcttgtgttccccatgcaattaatcttgggatctaaaaaacaagtgaaaaaggcagacttgttaagtttcctatgagatttatattgtcagaggattagattttttgtgcatgagtacatactcataaaattaaagaagaaaaaaagcagaagagtaggtcttaacgctccatctgtttcccatggaagctatctgtcctttcttctccttccgaccgaacacgtcctctccatctttttcttttttccttccatatattaaaacagtttagatgtgacgaaactttataatatgtgttaaagttcgagatttacgatctcatgtcaaatatgaaaaataaagatagagagtaagtacgtaccctgttatataactcttataaaatttagtactgttacgaatgttacgagtctgtgaccacttgaaaacatgacaacaacatcaagttcgactataagatataaacaagtttttaatttggttgttgttggattcaacgtccactgaatatataattattttagatgacattttgtgttttcaattatatttatattaacgatttgtacttagacaaaatgatacatgcatgagggaatctattatattactactattacttagacatatatatatttctatatgcaaaacagaggatactcaaatttcctcatttgtcaaaaatgctggcagatgttatccactacaaataattacacattaggtcattgtaacttactgattttgtcatgtttgtctgttatataaatcgactaactgtatatatagatttgatctaaaccgaataatcgaaccaaaacagaatcaaaatcaatcaaggaagcaagcaaacaaaaaaaccaaaacatttcacacataaaagtccgaaattgggttctttctgattttgatttgaaatttcaaagaaaaaacaaccaaacacacttttacttatcctaaaacaaaacattttgctcgtgaaagtgatgttaacacttgctataaatattcatctagaatttgcatggtgagatatgatactaattgaggcaagaatgtgcgtttgatataattttttctttagtaacaaattaacaatataaatatcaccgggattttcatatagttttattatacaaacctattgtgattataggcttcatagctaaagaaaaagaaaaaaatatgaaatatagaaaacaactaaaataaaaagacaagaatagtaacaactcaagttcatgaatccaaccattgatccgaccactatataaacccctatccccccccccccccataactcctactcatcaccaatacgggcaagttaaacccataactcccaaaatccatatcctctttaaaacatttttgtccaaataaaatgccttcttgttcggtaactgaaatttcaaaatgtatcgtctatccggagaagaagtccaccgtctccgatctccgtctctccgtctccgacctccctatgctctcatgtcattacattcaaaaaggcgtcctcctcaccagccctcctccttccttctccttcgacgaccttgtctcctctctccgccgttctctctcctccactctttccctcttccctgctttagccggccgtttctccaccactcccgccggtcacatttccattgtctgcaacgacgccggagttgatttcgtcgccgcttccgctaaacacgtcaaactctctgatgttctcttaccaggtgaagacgttcctctgcttttccgtgagtttttcgtcttcgagcgtctcgttagttacaacggtcatcataagcctctcgccgccgttcaagtgacggagctccacgacggtgtcttcatcggatgtaccgtgaatcattccgttactgacggaacttccttctggcacttcttcaacacctttgctgacgtcactagcggtgcttgtaagatcaaacaccttccagatttctcccgccacaccgtcttcgattctccggtcgttcttccagtccctcccggtggtccacgtgtcactttcgacgccgaccaacctctacgggagagaatttttcatttcagcagagaggcgattaccaaactgaaacagaggacgaataacagagttaacggaattgagactgccgttaacgatggaaggaaatgtaacggagagattaacggaaaaataacaaccgttttggatagttttttgaataataagaagagttatgatcggacggctgagatttcatcgttccaatctctcagcgctcagctatggcgatccgttacacgagcgaggaatctcgatccgagcaagacgacgacgtttcgaatggcggttaattgccggcaccggcttgagccgaagatggatccgtactacttcggaaacgcgatacagagcataccgacgttggcgtctgcgggagatctgctaagcaaagatctcaggtggtccgccgaacagttacacaggaacgtggtggcgcacgacgacgcgacggtccgccgtggaatcgccgcttgggaaagcgatccgaggctgtttcctctcggaaatccagatggagcttcgatcacgatggggagctcgccgagattcccaatgtacgacaatgatttcggatggggaaaaccgttagctgtgagaagcggcggagcgaataaattcgacgggaagatctcggcgtttcccggtagagaaggaaacggaagcgtggatctggaagtagttctggcgccggagactatgactgggattgagaacgatgctgagtttatgcaatacgtatcagaagtcacttacgattgttgaaaacgacgtagtttctgatacagaggaaaaaaaagcaaatatctaaagtgatagaggaacttaatggcatggcactttggacggttgagatttatctataaagtttttagatatttcgatctgagagttgtgaagcgaacgacgtcttatgagtcaatctactggtcttaatgtgacagtgtattattaatgtacaaaatcccgtctttttcaagtttttctttctaaattaacaactctgtattatcattttagaaacttttatttcttgattactataattgacgttttagaaattaataattgactttggaactatcttaatacgattatttgggggcaaaaaagtagtaatgggacccagcccatgcttgtaagttgtccacttgtaacaaaaggcccaagtttgtagcgattaatgggcctatcgataggctggtgcgtccttgtgcttccagcaactaagaaccggcctcgtacacgttcctcgaacaaaaaacaacaaactaaaacagaattgacaacttgtataacgatcaaaccaactaaacagtttgtgggtgcatttaatttctttgtccgagccttaatagtcacaaaaatagcaagagaaacataaactaatctgctaatcgtttttttacagaataaaaagaaaagaaaaaaacaatagaataaaaacacaaagtatatatctaaaaaaaaactaaaaccctaaaggccaaagttcaaaccaggttttaaacctcctattagacatagacacacatatcttacaatttacaacatcaacctttccatgaacatatataagcaatccaagtataagataaacaccattaatcaaacagaggattttcagtaaatgaaaccatagactatcaaatcttcacattccataccaaatcctcgtccactgctttttctacacgttaccttccggtactggaaacagtcgtttaatcaaccaattgattggtcccaaaacatgaactttctttttcctccagaaccaaatcgctgcactgtactgttcattgcgtatctttgtcgttgctgctctccaatcatatttctcggtctcttctcttgccgcttttccaatgatctctcttgtttcacggtcgtgcagtaaagttctcagttttgtcacgcaatcttcaacatctccagggttgaacaaaaatccggtttttccctcctgatgaaaacatcagaatcagaaaaccacaagctcaatataggttgacccataagaacaatcaatgcaagatcattttgtgtaccagtctatgattgaataaagtttcagttcggttacagctcgcttataagaaaattggcagaaattgttttttcaaccatttcggttcggttgatatgctcatcaatatggtttggcagttaattgtaattcagataattcactgacctgatcttcagggattatatcagggattccaccggcacgggccgcgacgacaggaagtcctgaagacattgcttcaagaaccacaaggccaagtgtctccgactctgatggcatcacaaacacatctccacttgcgtaagcttgtgagagttcatcgccttgtaacgttccagtgaaaaccgctggcattccggtaaacaacttctcaagatcctctctttaagaaaacgaaacagataaacaaaattacaatgttgttgactagaaatcttcagataacaatatggccaatctttaacaaaactagtacttgtatggtccatctccaatgaaagcaatccgagcttcaggtaatttgtccattacactgcacacaaatttctcaatatcaaaattcgatacaccacttaaaagaagtgagtccagtttatacaaaattctaacctctttaaaagctccaaactcttttctacgccaatgcgacctacatgaatcactagtggcttttctggttcgccattactgttaattacaaaatattaaacatcaagattagcgtggaaagtatcattgtttttaatgcatataaaagaaacgtatattctattcttgcctcagtcttatacgcatttcttgagaacggaaacggggattgaagctttctgaatcgacacccttattccaaagtcgaagttgattagcttcaatatatgaaaaaaagaagaagaaaatgtaagttttgaacaatcatagagcttgtacaaaaatgtaatgtatgatctttcttcacctgcagttgcaccagctgctataagatcttttccaatggcagcagaaggaactaatgtaagatcagccgctctgtgaaggaaccctgataaaagcatattcaagtttagtttcatattatacatcacaataaaccagaaaaagaagaaggaaattttgacatttgaaaagcgggttttacatacttattatagaccacattggttttaccaaccaactaaaagtgtatcttgggatgtatctgcacatcaacacaagcttaatcttagacaaaaatttttttataacaacattgtgaaatgaggcagaaaaaggtacttacacagggacgtgtgtgtggtaagacattactattggtacagatagcatttttgctattgccagagcaccaaagacctaaaaattttagtcagggaaaaaagagagtcaagttctggattctctccagttcactggtcttgctaatgttttagtaatgtgaattcttgagggatttaccataactccgggagatgaagcgtgtataatgtcaggcttaaaccgtgcaatttcagagatgattcttggactaagcgcaagcgagagtggaaccttttggtaataaggacaagggaagctacagaagagaagaagaaattagcgatattaccaaatagagaacatccagtgagtaaactaaatggtgctaccttcttgatccaatgactctggctccataaaactcttcaggaacaccttcatgtgtcgtcacgactataacctatgaagcaaaaaagttattaaaaaaaaaaaaaaaggaacagttaacacttgtcaagtaattctaattctggaaacagttacttatgagctgactgaaaagatacttaagttgaagaatgagatagtaaaagaagaaacctcgtctcccatttcacggaggtatctaatgaaattctggaatctgtttttgtagccggatacatagctgcaacaaaatcaaagagagaatcacttccaataataacatgacatataataaaagcttttggtcaatggatcggtgattccgagaatcttgggatattcacaactaaaatctgacaactttgactcaaacaaatcctgaatgtaattggttttaacgatctactatataatttgctaaattggtggtgtagcaaattcatacattagcgagtatctcttcataaaataaatgtaacgatcaaatcgaaagaaaaaaacattacaggaaaaagtcaaccaaggaaaaaaatgagtagaatctgttttcacagagacatttcgtcgaacacaaaacaagcaaaaaaagaacactgtgaagaagacttacgcaaagggagaaggctcaacaaagagagcaattctcctaggcttagagagcgactcaggatcgagaagcggcgcatcaatctccgattcgtcatcttctctgacttgagtaatagtcatatcgttggacccagaaacagcttcctttgtaatcactccacagaagcggagcttgcttttcttgctaatgggtaatctccggtgaccaaacgaaagaggggaatgaagaacaaaagaagaagacctgggaggagaacaagaggttgcagaggaagaagaacaagtgttagtcgtgctaggaagcaaatgaggaggtatagagagatttatagaagaaagagtcgtcatgactcctttttattttgacagagaagcttaaattaataattatatatttgtgaggatttgggtgtcgtcgtcgttataatcggatttttaacaaccgtcagagagaatctgaagaagacgaaagagaggtatatcctctttgtgaggcagagacagataagcatcctaatactcgttttagcatatgctaaaatttatcttttattaatattacagaagttatagaaaaatcgttgttgttataatggtttatgcatacattaggggtttaaacacttgagaaaacaattactacaaaaaaaaaaaaaacacaatcacaataacgtactcctgacaaaaaaaaattgactttgtaattatttggtcaaaatacttttcgttacgtatcatatcattagccgcgctaattacttgtagatcgatataacataaaactcaaataattacgccaagacaaccttatatatattctttatatatatttatataataattttttttatattgcttataaatacaaccaaaaaaagagaaagaaatgtggaatcggaaatctattccaatgaatattcgcttcacataattataaagcatcttgtcttatattatacaacacaacacaacatataaactgcttggctgtcccatatgcatatcattgcatgtgaaagatctaacttcattttctcgattaccaatattttatggtttttaatctttctaaagttagaacgcaacatacaaacgtagtgtgttcctcggagaattcaaatcttacataatttactcaatgccaacatgattgctttcaatatttctcttggtttatttgattgtttcgacttttctaatagaaaatctcaagacatgatgatgcaaaaatctattacactaaatgccttatatgggcccatatatgaatggatcctaatcgggctaagttttctttgttccttcggcccaaagatgacgaggtacacaaaatatatggactatgacattcgtctcaattgagattaatgtacttcaaatgaaacttccaaacaaataattgagatgaacttaacctgagttatttggattggttagaaaattgtttaactgttattacatctaatgttgaactaaagtgatattgataagtctctctatattcaaacttctcattcaaattttcttgtttgacataatcaaacttctatatagtgtcttagtatatatcagagccggcccaataaattattggaccttgtgctatgctccaaatttctttacctaaaactctaaatatttaaaaactaaatcctattttgcaattatttgaaaatttggaccctaaaatataaagaaaaaactgaataaagaagtgaaacccggtgcactagcacactcagcacctcccaagagccgggcctgatatatatctcaaaacttctctatatatatgcctatgtttacacataaagtattataatgaatggggaacattgggggtaggacccctaatatttcacctaaaaaaacaaagctctcacaacagtgacaagaagagaatcaaccttttttttttttttgtcttattgatttatttcatcatacatatgagaatttatctacctaattacttatattgttattgttgaatcttcgacttcaaacctagatttattccaagtactcaatttactcttttacttcaaacctttttccttgtcttttcttttgactataattttggttttacaaatcgcatcatcttcgtagaaattctacaagctataatggaaaaaaatcaagaatcaattaaacaaatctagatattggaaaccatttcatatcaattggttaaataacttacgtgtagttgtacatgtataaacaagtaacttgttcaaatttccttccttaataaaattcctccccaaacattatacatgacttgcccccataaataaatcttcaaaatccctcacgtctccattttgtttctctttttctctctgtctctctctcgataaagtttcagacaagaatatgtctcgaagagcatccaaaagagtacgctttagtccggacccagaagcaaacgacgaactgatcttcccaacacacagctcatcacggcatggtcgcaggagggtcgttgttggaatattcagtttcagcttcagtgactcgccggcaacgacgaagagattactccgcagtattggagacagagttggcaaaacgtttcgttatatatcattcggcaggatgaacaccaaaacgacaccgtcatcttccagtaacgtttcttcgtctctttatttgatgaagtcaaagtctctaaacggatcagagtctcaccgtgcagaagccattgaggactgcattgagttcttaaactcttgctcttctttgtcgagatcaaactcgatctctacctggtctcgctaaacgatttttattgtttcctttgtaatgtaaaagagttgacactgagagttgcataggtgatcagttgattaaagtcttatgtttatcgattcaattattcaactagctagtgactactaaaagttataattcctcaaatcttaatccatttttttttttcaagtttcgttacaaactaaaaacgaaaaacgaagtgggccaatttagaattcaaaaagaagggtcgaaatcaaaggaccataagactgaaaaagcttcttcttttgttgacccaatatttgatttcttcctagcagtattaaacaaaagtaataatataatctcttattctataaaaaatataacctcatcataacaaaaacattaagcgttatagaaattgtaggtccctgaatatatcattacgacaggctacagaatccaatgaaaagtttgttcctttttcttttttggtatcaccttcttcaagagttgaagctttgtgctgaagctttcttgagctcaagagctcgtttataaggcggtgcgatcggaggttgaatcgggtccaaactctggtatgatgatccatctgcttctctagggagtgggtaagaccggtctgagtcataaccggttaagtcaccacatgccaagaatggtatataaactttgttgggtccttcaagccaaccactactgcaatctgcagagtaccaagaaaatacaaaatctcaagcacaataataacgcaaaaaaaaaaagaggttaaaatattctctttctgaatctgacataataatacttaagaagatttctttgtcttgcccaaaaggttaacttcacatgaagagagagcattttttaggtgagagttaggttgaggaagagtaaattgaaagtgtactactcaacaatgcataagttagttgtgtctaactagaagagcttcagaattttgaagctgaagccaagagatttttaccgagatcgcttccacctgaagggcttccgactttctccaagagacgatgcagatctctcgggttaaatccttctggcggagagtaattctcgcagactgcaaaagcctctatagaaacagagtggagaacatgtaatcagaatctcttttaaaaagcaacatttacgtctttgatgattaaaccttgagtaagcaaatcatatttgcacatgtgaaagttctattcttttacctatacttgaattgcggctgcttttcggtttcgcaaaagttacggttgggaaaaacaatttcagctacaaataaaaggaaataaacttatcagtaaaaacaacagttaatttcatcagcaaaacatctaaacttacttgacagtagagagtactgagtagagacttgtatctaacttgacagtaaatttcatgagcacaacatgtaaacttacttgacagtacaagagacttgtatcttttccacggaatatctttgcaataaattttccaccttctttaagaatatgagttacaatcgttaatccctggaaaaaaaacggattgtttgttattgtcattattcatgaaaatatgcttcaaattagtgctaaattttgttcaaacatgacatatcgatcatgtatatacatagatataagaaacttactgctagtatgagttgggactggacaaattcatccatgtcatgcaaaccagtaactgcaaaccaaattgtaaaaggcgttttttatagcataacgtatatattgaacggcgagacagacactttatctactgttttaccatctggagcaccatcacagacaaccaggtccgctttgcagccgtcaaagtgtctaatgaccttgaaaaaaaacaccggaaaaggtaagccatggaaacaaacacaaacttgaagcataattaaagaggaagaaagagatgtagaaaaatttatgagataggagtcgagaaattttaccacttcagcagtccgagcattagttatgtccccttgaacctggatgacaccttcaattggagccataggctgcaaatcgatggctactataagaggaagatccccatctctgcatagtgtttcaacagtaacaaatcagttcaaccttgtcaaatagtggattactaactagcagattaaaacaactaaagaaaaacgatggtggaagagaaacttactttgactcagctgaggactttgcaggaagatataattgacgactcaagacctacaaatgcagtgcactgataaaattcaaaacgtgtttctctttaacttttccactgggaaccgaggatcaaccaaacaaagaacttcagagattaattttacagcatccctgctctctcaactcaatttcccaatgcttatcatcttctgtttaccatatttaactcctcccactctacattaaacaagctaagttttgtcggttagctaactgagattgcaactcaactataatcctatacaaaaagatccacacagttatgaaatatagcctgaaaatctaaaagatgggatctagttccagctatagactttttaaacggattcttctttcttctatgagagatctactaagtgactaagccaatttacattgtgcagaatgtgagtagtaacaacctaggatcaccatacctgactccagctaccaggtgcagcacataaatctacgaccctcttcacacctgcatataattaagacaaagtcggtgagttatacgtctatcaaaagtattgcattcattcaattaagcaggtttttggactcatgtcccgtgattaggcttgagtctgtgaatgagggttcatatgagagataagattaaggattcaagagaccaccttcaaaaatattaaattcttcatcaatctgaagaagcttaaaagcacttcttgcacgccatccttcttctttagctttacgataatagatatcctgcaaccaattggtggaggaacagttaagaactcacgagtataattctgagaaatgcgcaccttttacataaagctctaagaacctcattcaaggcatacatacccttttgtctcgagaagcttttcccatggcctctaaagtagaatacggagttggttcactgcgatgaacactaaaagtcagcgaaaactgaagggacagagataagttaagccactagtgtgtctcagaggcattctatcaaacacattaagtgcacaacaaaaatatctgcaaggtagaaaatttcgagattaaatcgatatacaagaagaagacccgccaaattaccgtatagtatacagcagctaggtatgtgaagaagagtagcaccaaagtagaaattcaaggtagagccaagtgaagaagactgtgtgagagaacaaaaaccgattcttcttatttttcttttgatctgtgccctaacaatttggaagatgacgaaatagagttattgggcttgagaccaagttcttttgggtcacatattaggcccaagtatttattaatggaattttcgagaccaataagtaaaacatgtccgtatccaaataaaacaaacattcggccatgtaaattctgacgaacatttagtgtaattattgtatcgaaatttttattaaaaatataattgattttttgtctttttacaaaaaaagcagtcgattcctaacacaataattacacatcccaagggcattgggttcgaatcttgttaaggaaaatcaaatcaactgattgatttcatatatggattgtcacctgtacgttatgattataaacagtcattaaaccactctaatggcaaatattctccattgaaaaacaagaactggattatctttttctgttaatttacaaaacggaaaacaaaaaaatgattatgaaatacaataaccattataaaaactaggttaaatattgtaaggtttggagtgaaactgagcatgcataaaatctttgaaagtaataatgaagaaatagattgctttcaatgaattgataaggcaacaatatgaatggtcggtcgatctaatgtaatggtctcacttcacagttcacacaactatctgtatatcccttagacgtttgtcttgtctcccacccacttttttttttttttttttaaatcataatcttcttctcaagatttccctactcatggatctcttgttttgttttcatcccttaaataatttccaaaaatggtgaccactatcaatgtgtaatttccccactaatgtactgaataattgatagagaaaaaatcgctaaactatagtacaagtatgaaaagcaaaacatttttaatacgatcaaactgttataatttgtactatatctcaatagtaaatattaaattctaatagaaatgagtgagtttaaaatattcatatcatatgctactcccgataataaagtagtaaattccaagtgaaacataaaaaataaaatctagttgaatcgaagaatcaaattcagagggatcagaactggaaagctgctgattcaacaagtctcggtccatttgaaaagacccaaaggcatcaaagtccattacttattctgtgtttgttaaaacgcactaaaagcccattaataaagtatgttctttttcctaatgtaattatgcaaaaaaatggttcatacataatacattcgtaaccatgacgacactgaataaaaatgttctttttgtatccaattcagtttttgacactaaaaagaactacaatagtattctctttgacgaatcaaagactgcaaaagtcgtgaacaaatatttaacaaaaattttattataaattagaccaagtgatgatgataggaaagatgattgtggattgtaggacaatccgacggtgcagagatggcgagtgcacggagaatcaatggatgcacgcgtagaagaacattggcgcgtagggtcaagggcttgatgacgcgcgtggggggtttgctttaaacgcgtgaagaaggtttaattcccacaaaatggctcggctcaaggctcaagccgacggtatattacactgtcactctcactcccatctcttccgtttaactgttctttcttttcttttagggaataagaaaatctttataaatgataaaatatgttatcgaaagaaagaacaatgtgcactgagatatttaccaacaaaacaaaacaatataaatacactaaaaactctaagaaaagttacttattattagctatgtgttttgtgtattaatgtataatcaaaatattataatgctagaaagtttggtatagtgaccactgtgaaggtaacaaatagtaatataatttgtgttcaaaatcaaaactggatacccaaaatttatgtgtgtcatcataagttacaaatcaaaatggtaaacccacaaaagaaaacacactaagtttaattagagaggtctaaatgatgtgggaatcatagagaaggcaggtaaaaagaaatgaagaaaaagcttcctgcttttatgctctctctctctctctttcattgaacatgtataattataacaaaggcggccgcattaaaagtaaaaaacagaacatttttttaagtagacttcgttattacagtactctcctactcacttgccattgttattacataaccagagagctcttcttcactcttttcctctctctccctccctccctcttccattaaatctttgtggttctcttttattgttttgatactgtgctctgcttcggagagtgtagaaagagacagagctaaagtctctgtgtttcttctcagcaggactaaaaggaaaaaagggtaagagcttggagacaatttttcttccttcataagattctctctttttaaaccataaaaaatcaaaagattgtaacttttcaattatttgtttgctttatataattatctttgtgtaccgtacagaaatcgattgctaatgtcgggtgagaaacaagcggaggagtcaatagtagtctccggggaggatgaggtggccggtagaaaagtggaagattcagcggcggaggaggatattgacggcaacgggggcaatggatttagtatgaagagcttcctctggcatggcgggtccgcttgggacgcctggtttagctgtgcatcaaatcaagtaagtacaatttcgataatgaataattcatctagtagtaatatttactataagaaaacaaatgtttctttattataataagaccaaattactcttttttcgtctgtcctaaagtttttttttaatattctttcataaaacattcttgaaataaataacaacttaagttataaaaacaaaaatatatggttgcaggtggcacaagtgctgttgacgctgccgtattcgttctcgcagttgggaatgttatcaggaatattgcttcaaatattctatgggttaatgggatcttggactgcttatctcatcagtgttctttacgtcgagtatcgtgcccgtatggagaaacaagaagccaaatccttcaaaaaccacgttattcaagtaaattcttccttattttagtttagtgacatattcgaatttgatctcacttttagatttactaaattgaattgcatgtttgttttgttttcttaacacaaaaaaaataaaataaaaaaatgggaagtggtttgaagtgcttgatgggctgctgggtccgtactggaaagcagcggggctcgcatttaattgcaccttcttgttattcggatcagtcatccagctcattgcttgtgctaggtacttcttcctctcttttttattactttttaccaatctttttaatagtatattgatatagagggacaaatacatatatctaaatgataccatcaattgattcatgtgtgtgttgttgttgggatgatgcagcaatatatattacataaacgataggttagacaagaggacatggacttatatatttggggcttgctgtgccacgaccgttttcataccatctttccacaattaccgtatttggtctttcctcggccttggcatgaccacctacaccgcttggtacctcaccatcgcctcttttctccatggtcaggtatgtcctcatcaaaatcaaatgatttaaatgaagaaaaaacaatgtgacttaaaccggttgtaacttactggtttgtaggcggagggtgtgacacattccggtccaaccaagcttgtgttgtactttaccggagccaccaacatcctctataccttcggtggacacgctgtgaccgtgtaagtatttttaatatttctcatggattttcaattaattgtataatccacaacaattggaaaagtgatgcattcctaacaaactaattatagttggatataagttataatttcttctccatatacagcatttgttgtgttgcaatttgcaaatattaaaaaaaaaaatgaattttccctgaagatttatgtttccttcttcttttttaaagactcatctcttttagcttctatatgtgcagcttttgccggttactttaggttctgtcctaaacgcacaaacagacaaaatcattattacggaataaataaagacaaatttaccagaaaaattctatttacctttttaacacacactatagctactagctactgaactcaattcctaacattctttttattttagtaaattttactcacaaatatctatctcatcttcgagagtacgactacgtaacgtaaccacagtggtcggacccggacggccaatctctggtcggacccataaatccactgtaaaagacttttatgccatttccttttacattttatctataaaaaaagttataaaattttcagggaaataatgcatgcgatgtggaaaccaaggaagtttaagagcatctacttgatggcaactctgtacgtcttcacattaacgcttccgtcagcctccgccgtctactgggctttcggcgaccaacttctcaaccactcaaacgctttctctctcctccctaaaacgcgtttccgtgacaccgccgttatcctcatgctcatccatcaggttcctatcatcctaactctcactatgttacatgtctcacaataattacactatgccattaatgattggtccaagttacatgctattatttatacggtaccggtccatactaagaacattattctctttcgcaatgaaattcatactcataaggaatcttgttatagtttatgacatggataaatacgtctaactagttaattaacatttttcgccgtattaacatctagggcgaatgatatatatgtatgaatacaaatgttatcggattatatattctttctcaaaattttgttttggatttacagtttataacgttcgggtttgcgtgtacaccattgtacttcgtatgggaaaaagcgatcggaatgcaccacacaaagagcttatgtctaagagcgctggtgaggctaccggtggtggttccgatatggtttttggcaatcatctttccctttttcgggccaataaactcggcagttggagccttacttgttaccttcaccgtctatatcatccctgccttagcccacatgctcacgtaccgcaccgcctctgcccgccgggtacctacattcttctctcgctcacattaccattcctaaactatactaaagattttatgaattcagtagatgacatacatttatttcatttagatagatagttttgtaaaaaaaattattggaggagagagataaagatatacatacgttggtccatagtatataatgagctggcttataatacttttgcatttaatcacatatcaatggggtaggtccatagtatataatgtgtccattattgtcacttgactagttttataaatgtctataacatatattctcgtcgatgattaaaataagtagattagttcatgcaatgatatgatacgatgtattgatttggctttttttctttaaacgtgatggcgtggcagaacgcggcggagaaaccaccgttttttatccctagctgggctggagtttacgtgataaacgctttcatagtggtttgggtcctagttctcgggttcgggtttggcggatgggccagtatgaccaacttcatcaggcaaattgatacttttggcctctttgccaaatgctaccaatgcaaaccacctccagctccgatcgccgccggagctcaccaccgccgttagttaacgtaagcgacgtgtgatagtgtgattgaacccttttttctttaattctgtatgaaagaaaatatctgtaattcagtgatttagtgaatctatgctataaaatttcgttgaagtcacgtacgtgattagggagctggtgctgttttgtgttgtcacgtgccagtcttcagttttatgacagactaataggtcttcctaactggtagaaaacaactgggtgaggacaaaatggttttcatttttatcaatcagccaatctgtcatatttgactccgagaggacaatacaaacattttgtataaccattttaatcaatccaactttcgaattaatgtaaaacctagcaggctatatcggcccaatataagaccagaccaaaatagtggggttgatatcttattgtgaaggtttctttgcttcgtgtttaattttattgagaatttattattctgtttttaaaatgaattaaagtattaaatctatattacataaaatcatgttgagcttcgaatatcaaaatttacagatcaactaagaacaatatgcttaatcgcagttttcgacgtttttaaaattttaatatttaaactaatctttaaaagtaataatgaaattaagatggttttagttattttaacattattttcttaaggttcggtggtaaaaactcaacggctagtcagatggttcgggtaagactttccatttttctgtgacgtctttggttttgccacgtgtattctcagttgctgttaaacccaaccaaaattagtggggcttaatgtcttattgtgtacctgaaggttttgcttcttatttacaacaaagttatctacagtgtgtgtgattaatggaacaaattcaaacaatagactatgatgatacagaactaatttcacagattatgcaatgctctgaaaccagtttccacatggcacttccttgttcaatttcgtatttcctgctaaacttattccacagatgcaaaccataaccattcctctgcatatgaagaagcttggttttgacccatttcgaatctttctctgttttaggcactttgaacaacttcttaatctcgagccagtttaccgaatagaacacagatggtcgcatgacggtgaagttatagccacttgatccttctacagctctagccactcgtgaaacaaggtatggtccgttgtatccccatatgtttccgttgaaagttttagcgaactcttccatgaatttgagtaacagaggatggttcttgtcgaatattagtaccgcgttgtttagtcttgtccaattcgttgatgaaggatcaagtgtttgtgcaccaatcacgtttctcagacctttgaagctttttagaacaatcatgtctgtgtctaagtacacacctccatatttgtacaagtaagcaagcctcatgagatttgagagattctgagctaaagaaatctttccgggatctcttttaccgctctttatttcgtcgagccacaactctcccgcggttcctttgagcagaaaaggcaaatctggtgtgactgcaagaactttgtaaccacgatcaataaacggcttcaaagttgcataaccttgaggagaatccatggttgcggataagatcatcaagcaaccatacggatgagacttaaagacactttcaatagctaaaacctctctattgccaaagaaatctgctggtgatatccatgtcatgacgaagttgacttcgcatccatcaccgacaaactcatttaccctcttttgaaacttgtcagacaagttatctccactgaaaacttcgataacttggagcttctcgtttacttgtgtctgttgtttgagcagatcacttctttcaccttctctctcagaactcagaggtaagtgtggaatcactctcttgatctctatcttcactcctgagaaatctctatgcggttgcatcgagaaattagaaattagagtaaacgtggtaaccacgatcagagttacaaagctgatagcgaaggcggtgaaaagtgatgatgatcctgattggtttagtcgtctgttatcaatcaccaccgtgaatctcttttctatatcatgacgatccataataaacacagaactgaaatgttctgaagttggaaaccagaaaagaaaaggagatttagattgataagaaagaaaccacttttgagtttctctgtgtctgttttatttcttgtttaacttgttttgaccacgttcttgtctttgggggctgtctagttttgaaaagttaaagaactcagacatagacatttttgacgtattaccgaaataattaatattgatgaaacgaataatgggaaaataagtaatttcaaatttctaacaacacatatatttaaagttttaaaaggattctttttcattcatcctaaatggaaatgttctaaatatatatttttttggtttaatgtgaatctaaatgttctaaacagctaataatatttttgttcttttcaattatttggggttatcatcacatattttgtagaattctctagtcatacccttaatagtactacactaaccaaaaactgtttcatatgaaaacttgtacatactttatttgtcattctttattactaacattttctattattgccttattggtcaactttttggctaacacggaacataataactaaagttcgatgtgtattcttcttacgaaaatactgatttatatcgtattgatatttctgtttgaactcttaatcaatgataagtgttaatatattgttatttggttgatgcaaaatgatatttggaaaaagacgtgtgtgtattaaaatccaaattatcaatgactcattgtatttcaatctctaggctttctagtttctagctttgataaggttcttattttattataatactatttaaacaatgttagttggattttaatattattttgaatgaaaaaccctgctattttacggttgactaattaagaaatataaaatattaagacatttgaactatgcaataacgacaaaaatatgtaaactcgaatagatagaattggttggctggattttggtttagctccaaattcagttttcactattagatccttaatgtttactataggttagaataagatgaattgtgaattagtaaatgaatgtatagaatataatatatgtattttattggttctataaggcatgattagggttatctttgtttatctttatattggaaacttgattggtccatgcataatcagtttcctccacacgacttgtcaaagctatgtaagcattttgaccgtaacaactgaaagcaccttatagaattaaattatatatgtatcacattactttaaatctcattactgtagattgataatatcagctcaacaacaactagagaaatgcaacttatgcagcagtataagtttgttgtattgttcctccgatccttccaagttccaagcctattcattgacatagacaacgtttctaaagctaatgaaagattgcatataaactttgtgtaagatccaccaaagtcaaaattaatggcaatggatcataatttggcccatgggctttaagtgaattatatggaatgatctaatgacatttatgcccctaaggttttgaccgtcacgcagaaaccaaggagttagttccaatcacgtgggaaacaatcgcgtaaatcggacggtagaaattaaatgcgggtgagcaccgagctgtgagtataagagaattccaatgttcagacaattgccacgtggacttatgctttgctttcgtttccacacagtacattgctcccttcccactcacacaaaccaaaaaccaaaaactcttcttcttctgatgaaagatgattggcattggaagaaccctaacttcttcttctccatctaagatcattctcgaagatcttcctcctggaatttatcgctatggaacagagatattcacttccgttcccaggaaaacgttccatcacatcaagtttttgcgtttggattctgctcagagcagcaggattcttaagccggtcccgcttcgttcttcgtcgattaaggattcgcaggtaattaatcacacctctctttctgtctttcacgtgtaatcgtttctctgtaattcctatttgctctgtttacgacgaagaatgagattcaggtttgttcatacattttgataggtaaacgtagaagatgaagaaatcgaagcttctaacaaaacagttcgtgtaaggttccagttgcggaaagaatgtgtctttggggaacattttttcattgttggtgatgatcctgtgttcggtggcctttgggatccagaaactgccttaccactgaactggtctgatggcaatgtttggactgtagatttggtataaatgagtgaatttctttttctttaagagtttaaaatactgaatgtgttaggtttaccctgatgttgctttctttctgctcaggatttgcctgttggaagattggttgaatttaagcttttattgaaggcacagacaggggagattttgtggcaaccaggtccaaaccgggctcttgaaacctgggaaactaacaaaactatcagaatatgtgaagactgggataatgctgatcttcaaatgatgattgaggaagattttgtgccttacaccaatatttcgtcgatcggttcagaagatgaggatgaagtgcttggtagtgtacaacaaaactcttcagtagtagctgtagagaatgcaggatacgtgagtgatgagtctgcccagaattcgagtttcagtatccaaagtgagaaaactatggaaccttcgaatggagctttgactgctcgggaggtgatcaaagaagccatgtttactgaggaagaaagtccagttttggttcctggattgattcctctgtctgacttggataatgaacaagtggaagttattaatgaaggtaaagcagaaacgttcccggaggtaataacctgatcagttttgaagttttatgttcctgtttttctataaaaaccttaagagctgttgttatgcacactgctgctgatggtaatgaaatctttgcatgtggattattgatgctttaagacatcatgtttgtgtgtagaataagactatgcttgtccactggttcaatgtatattgttaccccagttcatgataaaagtttccttcactatattgactattcttgtccactggtacaatgcatatctaactgttaaattattttccagcaatgtgattttcggctgcaaatgcccttcttgtgctatttgcaggtagataagaagcaagaacccaaagcagaaagaaacaagaaagcaaaagtaaaagcgatttcattattcgagaaatcggagcaagaagcagtgaaaagtgtagagcagaggcaatacaatgcagtagaggaagagcagcagcggctagagacagagccgcttggaacgccggatgtgctttttgagaatgatatccaatggggacgcagaacactttacaagcttctaagcaactttagacttttctaaactcgactaagttttgagtgcatacatacatcggcaaaagagcctcaagagtcaagaagatgtttccgacagatagtcaaaaactgctcttaaaaggtaggctaccttcttcttctatgctcatctttacgttttgtatctatgagaactgggagtagattgaaaccaatgttgtgttgtctttgtatatatgtaatgatcaaatggttttggtaaagagaaagatgaagaaagaatggactgttagtgttagctgttaagtacataggacagtatgtagcatctggatcctattctcccatataattgtattgttgctacataataatgatgatgatgatgatgattatcttatgattgaacttacaattccaatgtcttacataatgatgatgatcatgattaaacatatcaataatttagttgtacattttttaatggtttatcaagtttggacctttggtgctgctcttgacgaagggccaggtaattgctgacgccgtacgtttaggagcacctcgtttttttcaccttgtcatatatttgtaaatctcgatgaccatatgcttttatttttatcccaatataatcgaaaaatcccaaatgatatgcgatttcttgttgtatgatttacacacaacatgagatgcaataatgttagtgggcactgggcaggaggaaatgcgataaagttaataaaattgtgacaaaaacgtaaggtgataaactaaagggttcttaatcaaaaactacataaatcccttctaactaatccacatgctggtttttaagaaccacaacaacaaaaaaaactatcaacttagactacaaatatacaatcactatacacaagacaaagcctaattgaggtggagccttgggtgcaaggtttcatactcactttctcaaaactctagaaaccaaaacagcaagagtcatgagactagctccctgaggaataggccatcttttcatcaaaaagtctcttatttgggacactttgttaccttttttgatctttgcttattttctcacattggtaatgaatatataccgtatgtcttcttccccacaatcacatctctctttcgacctaaattttgcatttctgcaaaactcacaactctgaaatgttttctttaggcgcttcctcttcaagtcctttgtttgatacatcttcactgctttcccacaaaaatccattatcattttccggacctttctctgtttctctagctagaggtgccacatgtgcaacatacttttctgcacaaagcaacacaaagaagatttaccaatctgtaaccaaatttgctcactacacaaaagactaagaacaatctgcagacttaatcaagtggtgaaatagatccacagttattaattcccctagaagaaactttaccagccaaacttcgaagagcattctcagccgcttgttgatgtgcatctttcttagtttttgccatcccaatgcctatcttctcacccgtgaacaacacctttgtaaaattaacaacaacgattaaaaacaaatataagtaaagctaacaatagacaaagatgcttcaataaactgatccagctgacctcaactgaaaactgtaactctttgttggtacttatcacagtcctaaactccacctgcaaaatcgtacatcaattaatcagaatccattaaaagagaagaagcaatggcttgcgtggttagtgaatatgcacctttgaaccacatcttcttccaatttcttgcagtgcactcacaaataaatgagattgcccgccattactctttccaccatctgtatgatgttctctaccatttgacaccaaatgattctgggatattccaccttctgcaaatagtttaaacaagtgccaatgttaaaaaggtattaatgcaccttattattcaagtagctgttacagattcagtagaaagacaatacatcagatagggaaaccaacaattctctaatcctaagtcaatatctaatgtagctttagagcggtacactgaaaacaagcttcacggaggaaacaagaaattcagggatagactaatcatctttaatatcagcttgattgcattagtgttgaaactagaacatacctgttgtttgacgtgaaggattttgccttttcaggtcatcatccattgctacctgcaagaaaactatcagaccgtagacaacatactttgatgtcaaaagagagacacttagaacgcaaaactaacctcttcactcctcaagtgggatggatgtgcaaatggaccaacaggagcagaacctggtgttccatgaggaaattgacttggataaagtcctgaaggccgaccaggaaaagaaggtctattctcatcatctaccaaccaaccacccggagaatgcatagacgaggaaggtggctgcataggaattttagccagaatggggggttgattaaagttttggttccttatatctacaccaggcctcatcataaggggtcttccaccatcagaaaaagtgaagccatcccgcctaggagctccaagcaaactaggttctagattgtgattgaagacaagagatagagaacgtcagagacaaacatatacgtgcaaaataactgtacagttcaaaatttaaagttatattaagtcaaaagtttgtactatgagaaggtaacagtgctgctgcagttgccgtgcttgcattatttggtataactgctatctgcggcttaggggtttcaggtttctgctcagcgttacttgttgcaggaagagtagaatgatcagctgcagccttctcatcccagaaattgaaaagtcaacagaaatcaaattacaactgacacaaaagctatgcaccaaaacatattttagttaattaatcccaaattttgtatatattttactaaccgcttggtttagtcttcgttccacttcacccccacacattccttcgttaattggaggagcatttatgtttccatttgaagcaaagccaggatcctacagacagatatagctagattacatattgtagttggggcaaattagcaatatgttaacaatgataaagttctaactacagttacctctataacgacgtagttgctcacatccggtgatggaggtaaattttccacatcatcttcatagtaaaccaaagatatactactcattaaactctcatcaaattccctgccataaaagtctagaaacagtaagaacaaccagcatgaattcattacataaaaataaaaaaaaaacataatttttttttccaacttacttgaaaaagtaacctctgacattgcatgcaacatttcttgctacgcagagatgtggaacgacaagggctgtctgataaatgggcatacgaaaatggttagatacccacttggaaaattaagtgatacagaatttaattcacaactaaatgcaagagcaaccacatgcctctgcttgtggagcataataaggaagatatgcagaaacaacatgaacccgtggttgatccttgtcctcccaaaccttcatacggtcatcaatgaccattgccattttcgggtggcaaatgccaccattgaagacacttaacaacgatttcttggcgtctgatatgcaaagagcaagacataaaaaaattgttagttcgagtttcagagagagacagagacagatagttgggtaaaaaatgatcaggttcatctcttaatactaaaaactgagaggtcggcaaatcaatcaggcacgatagagggagggagaagaggcacattatattaaacaattcaccacaaaaagagtaatgaaagctacactaatggagcatggtggctatgtaccaaaaccaagatcaagggtatcaaagaagccagagttggttttgacctggttttacgcagacgatacgatctcgaagctccttgagacttatcaagtgtgcttccggatcaagcagtctccacatttccagagcataatccctttcagccatggtacaaacgtaaacttcaaaacgtttcctagttttggctgtcaaataacttcttaactcctcccatgctggtctcagttttacaagcacactagtgtcacggatctgcatcagcaataacttggtttcagttccaacaatattaaagctaaatcactcaaatatacttaagcgaccttatcctatcacatgccagagaaggtaaatccaaagcatcaaataagatgaaatgaataaatatccagccacaacagagatgaatcttctaacctctggcttaatccgagtaagcacagtattcttctccggcaatctaatcacgggtctacaaactttctcttgtccatcagaagttgggcggacttcctcaggttgagcctttaacaaaactccgttatcaaaagcatagtcattatcaatatactgcttcagcagcatcctatcatccatataccttttaagttctgctgacatcccattaatcctcacaggatccatctcacgtgaaatccaagatttaagagcctcgattctatcctcaaatgacttcatagtatttgcaacaatcaaagtctcatccaaatcaaacacaatagacaaacaccgagtattaagcatccttaagcacgaatcataaagacctgaaggaaccgaaaaacaccaaaaacacgggaacttcttctccttactcggcatcgccactaaatgaatctcctcatctccgagcataaccactgcagtctgtattcacaaaatcaaactagtgaatcactcctaacaattggaaaacatccaaaatcagctaaatgtcatttcggaaatctcaaacctaccttcaattcatggaaacagactgcgtgtagatgcattaactcttgagatttcaccggagccgatgactcaagcttgcatcgaacggcaaaagaagcaatcgtctgaagaatcgcgagcggaggacatctctcaccagccggagatagatggtggattcgaatctcatcgttcgggaatcgaaattcatgacttgaagatacatggttcacatcaagttcccccaaacgtaaatctccgtgataaaccacggatttatgacccaaacgattcatcgtgaattcgttcaattcacacttctgaaggacgaatcaggtagtgaagataaacagtttctgggaaaatgcgtgagagaatctgcagattcaatttctctcaaacttcgctacttttctctgtgatttttctccgcaaatgagggtttttctgggtctccttaaacatgagaaccaaagtaggctcagatatatatttataggcgagagaagcgttttattgttacgacatcgattttaatgtaaattacgagaaaacctgagacttctttacacgtggcgtcagatgcattatcctgttttcaccaacatcgcttgtcagccgtcaattaccgttcctaacaaaataaaatattcgagaattattttttgtgtgtatgacgaaatcggattaggtcgataattttggttgacttcgaacaaatggatagttaatgtttacaactatatattgtaaaatgtggaaacgtattcaataacttactttagaagtaaataaaaattgtgaaaaaaaaacggaagaggatatatatatggtaaaatcacaaaaatcaaataagaacataaagttggttggcaaaaaaagagaagacatcaagttgcgagtcttgtgacgtttgagtaagaaagggacaaatcaattttatacaatctgtatcatcatattattatgggtgtgttggcaaattagtcacttttgaaaacataattatggagttgggcaagttactatttataattggcaaaacaggtaactcactttgggcgtgtaatagacgagcgtgaaatagaggtttggggtggggtaagtgatgtgttttgaaattaccgaactatccttttgacaaagaagaaagataaaagtgaaatattcttttttttttttatttctttttaataacccctccaatttaataattgaaatacttatcaatataaatttattttctaaactaattcatatacataaaaatctatgtatttttctctataatttgatatgcattttgttaatattttttaatatattacagacattttatcagtagtcggtacacttaattatgtgtacagactttattttgtatgttgcattagctgtacagagtatataattgtatggagtatacaattatcagaagtcacttttcactgttgattcgtacacttagacctgtacaatatttttagtgtatatatatatatataaatatacacaacatacacttacatctgtacactaaaaagtgttgtacagatctaagtgtacgaatcaaacagttaaaagtgactactttgcaaattgtgaatagtaaaatgactattttcccaattatggctggacgatttcaatttgtacttattaaataagttgtataaataaaaatctgtacacataattaactgtactgactactaataaaaatgtttatataatatatttaaaattattaacaaaatgcatatcaaattatagagaaaaaaatatagatttttatgtatctgaattaatttagaaaataaatttacattgataagcatttcaattattagattgaagaggttattaaaaaataaataaatatatatatatataaagaaatacaaagaatgagagtatgaggagagagaaatgttgaatctaaaagcacaaatcccaattgctttcaacgacattagagaagaagaagattagtggcatatttgtaaataatagagttggtatggggtatatttgattttgtctgtaatagggtcaaaggtcagtgactaaaaatccaattataaatagtaacttgcccaattccataattaagtttaaataagtgactactttgcaacttaaccctattattatcaagattctaagagacagatgtttattgcaagtcggaaaacaattgcctcttcggtccaaaattaacatgtaaatcaaaattcatggccattctaatagttgagaaccttcatgagagtatttaaatatgtatctcaacttatgtcgcttaaagttatagttacttgttgtaagttgtaactcttaagagcaactcatgtcgctgagattatcgtcgctaccgtctaagcacaaaatgttgacacttgattccgagcttcggctgctgctcaccggccggtttcgacatgatctcacactgtacaccgaagtcgccggtgctttcgtcactgaatgtcggaaattccccgccatgcttccttttctaacatcctattaacacataaacaaaagtactccaaagttgaaagtcgttgaaattcatggttgatgacctttaatatcatttcatttgttaccgtaccatgtgtctcaaggccatgtcgatggagcttttagataggtttctaccaaacccaaaaccaccagatccagagctcgacttcccagcggaggagtctccgccacctccaccaagtcgtcgactgccgctttctgtcagtcgcggtgtagcaagttttctcatattcacaactttctcgaccttttgattccccttagccgcatgacttatcaatctaccatcatcgttgttagtctttgctcgttgtccacgtaacgaaggaacagcaccatttacgtttccattaggagctcggcttctagaaggcgaacacgattgcctctttgcaacatcgcgttctgtggacgctgatcttgaactacttgacgcatcaaaggctctggttctgctacttgaagcggtttgtggcctatctggtaacgtagttctgagattcgatggcgcttctactgagaatccaggcatctcgtaaggttcccatggccttgatctcacgatcggagaagcttctaaagacagagccggtttactcaaaggcttagttggtttacttctcagtacagtcgatgaaccgttcggagttgatggacggcgagttggagtacttgacctcgatcccggttttgaattaggagccgacatcggcctgttattggatcgagtagaggtggctgaaccggtagtttgttggtctgttgaggtggtgggcctggttgcacgtgcagcggttaaggtaacacgtgaggttccagttccggagctagaggaaggtctgctccatgatcttgttgagctagtagtagaggacgaggttaatgtcgcacgtgtagttgttgaggtggcacgtgaggtcggcgttgatggccttttggctggagttttagactttctggttggcgtgggaggtctactcgttgatcttgagctactagaggacgatggtcttctgattccagaaacagaggaggaactgtgtaacgacgtcgtttggtgctcggactcttctttgctatagttctctaactgcacataaaaaaaaaaaaaaaaaaacagagatgagcaagagtgtgacgtatatgcagacacttaaaaacaaagagattgacgagattagaccacgagatatactgagtccgtacccgagatataagagtcatcaggttatcatcgggtgcgttgaggtggttcgttacgtttctactcggtgagcctggtggcgtgaccagcctgaacaataagaacaatcaataaagatcgatggcaacaaatatataaatcgattatgttgaaacattggcaaaaggtccaattttgaaaaatatatatttgagatatgtaacatcaataaaagtgattgaaaagtacaaccataactagttaacaaaaacaaataaaaatccatagctagtgaattgttttttagaatgctttaccaactcaaattctgatgaacaagatcagacatcaaactactgtctagcaagaagaataaccgagaaaattgatcaaatttactctctttttgttcggtggaatgtgtgctacgttctatacgaacacaaatatttttaatgcaaaaatgtaacaaaacataataaaaaggggggaaatgtttcaaggcaagatttttaaatcatgatcagacttttagagagcatgatcaaattaattaaaagggggaaatgattaccattcgtaatcggacttctcgccatcggagtacaataagttctccccggcagttctccggacagggtattgttgagacgacatcgccgtcgtactactagtattatcagattctgccaaaaagataaatcagaacaaaaaagaagataatttttcgacaacatatattaacacatatacgaacacggacccattaaaagcgtaggtcggtgacgtttctcgcaacgacgcatctccaggaacaaaagaagctcttcatctttgttttgggtcaacattttaagacattttttaaattaaattgctgatgctggaagaaagtggtgaagatgttcttttacgtgttttttcttcttcttattatttgaaaatgtcagattatcattcacacccctactaatgatatatgtataagcaagtaatatttattattaaaaagtaaggaaagtaattattgttgttttttacttatatcatattaatgtattttggctactactaagagaatttttattattttctccagcaaaaatttaagagattttttttctcaatgatattattagtttatatctttactttaaaaaagaaatacaagattatttctcaatctccactaaatttctggaaatggtattattaaatttcattagattttcttaaagcattcaattttattatatctttagaaaaaaaaaatgccatgctggaaataaaactaaaaatttacaatacattaatccaaggtgccgaaaaaattctcacgagtaaaatcaatgcatctgtgtgaaatatatgtgaatctcgcgtatagatgagtttgtcttacattgaatccttccaatgttgtgatatatttttaagtttagcatgttaatgcaaaaatgacttatcgatctcccccatgtcacaactacaagcctcaactctgctaataagaaataaacgaaggattccatggaggatcaatatgtcgttatgtgtccaattcccgattctacttaaatgaagttggtttgagagacattattcttatttaagtggatttaaagctcaaggcccaatacccattttcaaaggcccaaacattaactaggttctaggtatccccccccttatgtttttattcagcaacagtttcgaatatgtttcgtctagacgagcgagactctctctgctaggtttcgatttcaatttcgatatcagggaccattttcctgattcttcgaattctgcatagagaagcgaaattgggatagatctcgtttactttgatttgtcaatttcctgcattctattatacgggttttgtgtttcctcgcaaattgatacagactgttgctttgccattgaattatttgctgcgatggacctaaatgcttcaccacaacccgaagaagacgatgaaccctttaagagacgtcatgaagatcgaatggaatctgctgttgagatcgctagacgggtacaataacccatatatatgaattgattcatgtgttactcgtacttgtttgaatatgtttggagcaagtttgatacttttggatgatgatatcgcaaattcgttatctttttggcgttataggagcgtgaagaacgaaagaaacgaatgagatttgataggccaacacgagtctctcagccggcttttcgtgatcagtatagagatactagagtttatgatcaaagcaagcttcctcagggtaaattatatgctttgccacttcctcaaaagatcattttaggttcattggtatgtggtttttttcttaacaggttggctagattgtcctggttttggtctggagataggatgtattattccttctaaggttccacttagtgaatcttacaacgaacatgttcctcctggtaaaagatactctttcaaacaggtggttcgtaaccagagaattaatggaagaaaagtaagtgaaaaaaatacatgaatcaatctttttctttgctatgttaactctctaaaggtaatgggtcttttgcagcttggtctagtcattgatcttactaatacaactcgttactaccctacattagacttaaagaaggatggcatcaagcatgttaaggtgactagaatacatttttttcttagtgtttgtatcgtctgcaccagtgttagccgagtgctttatcctctttttcctgtttgtagattgcatgcaggggtcgtgatgctgtgcctgataatgtctctgtaaacacctttgtcaacgaggtacttgtttcataagttcagttctcttcttgactgacgaataagttcaattcacgtgaagtttattttctcctcttgcgttttaattgaagctcataattatagctcatttgaggacactgtcttcaggttctgcagttcgtccttaatcaaaaacacgcaaagaagtatgtcctcgtccactgtacacatgggcataatcggacagggttcatgatagttcattatctcatgcgctctatgccaacgatgaacgttacacaggttcaattctttctttcacatttgtacttgttcactcgttttattaatcctctttagaatggagattcttacctctgtgtggcctttggcaggcattgaagttgttttctgatgcccgcccacctgggatttataaaccagattatattgatgctttatacactttttatcacgaaataaagcctgaaagtgttacttgcccaccaactcctgaatggaagaggtctgccgagcttgatcttaatggtgaagctgttcaagatgatgatgatgatgattctccgcctgaccctgttcaagtaagcgtggtgcaagcaagtgcttattctttaataagctcttatgtttaaccctcatattacagaattatccgttccaatgaatatcatgcatgcattgttaagctcttacccttgtgaatacagagctcataattttacgaacggctaattttttttaaattctagcttcataactattgtttcgaggtcatatattcactacacagtgatcttggaaaataacggtatcatctaaacaaatgaactgttctaaagattatctatttgtgcatgttgatgggtgcagttgagtctttcaaagctaacaaatttcataaagtgtcaatctcattttgcttgagttttctaatgggtctcttgctgatactgcctttctttactgttttgttgtttcaggaaatcaatcaggagaatgtgaagatgtcaaatgatgacactttgggtgatgaaataccccattatcaggaggaagcttaccggcaattctgttataaaatgcttatgatgaatgttggggtatgatatcaacactgcttatatgttttcctagttttgttcttctctatctatgttctcctatggaatattatgttgagcccaaatgttgtttccggcatgtatgtttcattaaaagcatgctaaatgtttttttagactaatgcaataatactaatcttcattgattggaaataatgtgagatattagtcatttgatggactaaaatttctctgatccagggaagaggatttatgcaattcccaggttcgcaccctgtatcattagacaggtcagaatctctgctttacttttggtattgcgtacaaagaggatttagcaagtgtatgttctgaattccagaggttcattagtcctagtttctcaatgtagttaaatctttacgatttttgcatacacagggagagtttgcaacttttgaggcagcgatactattatgcgacatggaaggcagatggaacacgttatatgatgctcttaactatagatgggtgctatttgatagataggagctttaagtttcggagggtacagatgcgttttccctgtaagcactcacgtgaggtcagtaattttctgtcattgcttttgtgttgatatctaaaacttgtgaattccctgacttatttggttttgggtggtagggaatttctgataaagtgcatcactacactttgcttgatggagagatggtcatagataccccgacaggtgagcaaggggaggcaaggaggaggtatctcgtatatgatatggtagcaatcaatggtgaatcagttgtagaggttggaactgtcgatccattatattatcaatttctttggaatgagttcagtagcacgagatcttagcattcattgttttccatcatgtcactgtcatttctactcggtatcaaccagtattatagatgctaaagataacttacagttgatttaaatatctaccagcggactttctgtgaaagatggaacatgttcgtgcgtgaggtgatcggacctcgagcagctgagaagctcagaagtcattgctacagatatgaccttgagccttttgcggtgagtttgcattttctgttccatgccatattttccttctcctttatataaatttgttggtaaaatttcattgttgcccaggtacggatgaagggtttctggttactttctactgttgagaagctgttgaagaataccattccatcgctttcgcatgaagcagatggcttaatatttcaggtaaccaagagatgtttatatttcaggtcttagtcaatattttttcctgaacgcagacagacacaaatttaagagattagtattatttgtttccctggataaagtaggaagattgcattacttgagcatgacttacatttggtttattagggttgggatgatccgtatgttccacgaacccataaaggtctactgaagtggaagtatgcagaaatgaactcagtagactttctgtatgagatgggtgaggaagaggggcgtggtttcctcttcttgcatgaaagagggaagaaaaagcttatggaaggatattcagttgagtttagagatgattcggacccgtcaagttacaatgggaagattgtagaatgtgcttgggataaggataagaaagtttggtttagcatgaggatcagagttgacaaaactacaccaaatgatatcaacactgctcgtaaggtcagttgaaggattttctatatatttaggtattgcttttgtcaaatggttatattctctacatgatttctaatgtgatgttgtaacacaataggtgataaagagcataaatgataacatcactgaggaggttttgcttcaggaaataagagagatcattcgtctcccaatgtacgctgaccgcattcgaaatgatagtcaagctgcccgccgccggtagagattacatttttcaattttgtttagtagtaatacactagaacgaactaataattgttttgggcggtttctcttctctcacacttgtacagctaaataatctacatggttatacacattacatctagtttgtttcccaacggaatttgaaactagaattatttcattgataatcctcaatacgtgatatggaattattaactatgatacatatccaacggtgttatgactataacgacgaacgacatattttaggccaaacacgtcaagatggcttctcctagcacgtgcccttcaattgcgatcagcaatctctctttcgtcacctagctcatattcagaacaactatttataaaaaaaagtactacataaagtactacatatcattcaaatcagataggaaaataataaaacgatgtagtaccgtgtgaccaatcttgggtttatcatcgagagcaaaaagcttgaactgaaaacggtgaccgtgactaggtaagagaggtccacgccatcccggaatcttgtgatcgttgttcccttcccgaataccggtagtctgatcctcattgccggaatatccttccggtaggcctttcatctctggtggtatgtcgacgacaacccacaccgtccatggcaccagcgggccactaggatcaggcgcatcgatgtcttccaccaccaaagctagcgtttttgtaccttctggaacgttgtacctacaccatatcaacattcttactaattcaatgcaatcctttgggtcggtcaataaaccacaaaataattaaaaaatggaaacatgttacttcaaacagaaaaaaacaaacaactaggaagccttgtgaattgtgataattaacaaatcgacaaaattaataatctctgtttcagcatcatgaatcaaagtcataaataaagagcgatcgatcggtaccattcaagaggaggagagatgtctttcttaacaccttgacctgccatcgtatactttctcggcaacttcccatcgttgtctatcgtcggcgaaaccagcctcaactcctcactcgacattcccttttacttttatgctatttcttacttagttttatcacaaagagtctcttcttttctactttcgtacatatgaatgctcttttcgtgtttgttactgatttgtatggatcgcctatgtgtagaaacaacgccacgtgacggtcttgaatgacacttggcgtcatgattgacacacggcgtcataggaaatctggcgaagacctgtgtttgagcacaactctatattgggctttattgggcctaaattgtattttttcctctctactatattagcctgtctcgttcttttttaaatcacgttatcttattattaaaggaccacttaacagtatactaattattgttttaacaattcccaccaaaaaaataattattgccttaacaataaaacaaagataattttaatataaattaaatttgtttaattttaaaattacaataaaagatatttcttattttataaacaaaaactcttctcatctttttttcttctattttttaatttattaaataagaatatctaaattaactaccttctaactaaaattaaagtgatttccatgtaatatttatcaattttgaagtcatagtaggatgctctaacgtgagccgttttaaccaatcgttaacaaagaattc

SEQ ID NO: 1099 - DNA, 88095 bp, Arabidopsis thaliana
gaattcttccagtgttttggctcacctgaaagaatttaagatctgatttatatgcgttttcaactccaaacaagtaaagataatgtcatttgtaaatttcccaatagaagtaagaatcagattgcagcgtagatccaataaacttagaaactgacacgagattgaaaagtatgcagtggattcaccaaatttggcctccttgtaatgattgtacttttcatgaccaccaaggcaacaagaataacaaatgaaatataaagagccaatgcagactttgaactttacctcaaatctcagagaatctatgagtggaaaaatggaactggaatcaacttctttcacaagcccatcatcagcaataagctgcatcataagaaaatgtatttacattttaggacatgtcagagaagaaaaatagacctttcataagatttaagttcatacatttttaggcttatgattttcttggttttcctgggctaacatagtcaaagaaatggtgccagaagacctcatgccagagccggaaccattctcaacaaaaggacagacttctaatatttccaattgagaagtcatgtcgtcctgctaggccaaaaaaatcaaaaagcattcagccaaatgtctccttgattatggaactcagatattcatggtatacgaaagataaattccgaggtcataaaggtccaaactatttgatcaatgaaaagtcaagagataaaccttgagatcaatagtatttgacacatctgtctcagttcccggatcgtcacagctttcaacaatcttatcagctactacagtatttgattctgatggttgcccttcaagaacttctctttcactgctttcttcagcaggcttgaaaatagatgctcctccaatctgcccagacaatttttttatcatataaactaatggttgtcatgtgaataaaattaagcctatgacatatgaataaacctctatgtggtgtgaacatctaatgggaaggacaataatctactgagaattgagaaaaagagcaaagatttgagaggtacttcgatttcagtcttcccatcatattttccatcagtggtagatgaaatacggtgcaacttcttgtttagattttgccaatttgactcgtccatagtatcctgttacataagagtcgctattcaattatagtggataaggcaaacttcaagtaactagtataacagcagcaaacgagtttaccttcgcgcagaagatgtatacatttactgcacttgtttggcctcgcctatgtgctctatcctcagccttcaaaatgtaatcaattgattatgcatctagcagccttaccgcattttgcagataggtttaagaacaagaacaagaagttaaaaagtataaaaagagcagtacagggaaaatacctgaagcaacagagacggtgttttaggcaattcaaggaacacaacattttgtgctgctgaaaaatccagtccaactcctccagcttctacaccaattattgcaatttttacctggatgggaaagccaaagcataggtcaaataccacacattctaacaggcacaataaattcaagagttgataaatgtatagaagatattgtgcatacctcactagaaaactgaaatgactgtacagccaattgtctatctcttggcaatgtcgtcccatcaatgcgaacaaaaccaatccctttatcacatataaattcctgaaaagcaataatcacaagaaaaaatttaaaagcaaaatacttgttcgaatatgttaaatgagctagcagagatataaagttttgaattttcaaagagttaatgacgagaattaaatatattaacctgaattccatccagaaccttatggtgatgtgcaaaaacgaccattttagttgagcttctgtctccatcaatttcttctggggtataatccaatcctgatagaagtggatgtagagataaccattcacgaaaggcagaaagctttgcaatgccaagttgttgataggaaagtttcccacatagttgattctctttgtcagctaaagcacaacaaaaggaaaaaatgaaaaaaaaaagagagagagtcaaatatatgcaaagagaattgtctccttgacatctatggaaagaaaacagtcaaaacatacagttagggccatcagaattctctgcgtttacatgtccagcttcatttgatccacgagcattttggtctatacttaaaaggcagcatgtgttaaaacagtgtacggaccacagtagttaactagatgtaaactccaagacacttaaggtttgtgttaatggcaaaaatataatgcctcgaatactgatgataaaaacagttcaacatcatcactaggttggtataaagccagccacataccaggttcatgtgacttctctgtgacttctgctatagcaccatccttttgtttcttagcctcgctgacaatagccattgctaaagctatatcagacttctttagcaagatggttacgatttgcctacgttttgggggtaactgtgttaacaaatgctgcttcagtcttcttatctataacaaacaaaaaggaattttcacatgacatagttctccaccaaatcacaacacaatacaagaaactttggcataacatataagtgatatcatttcttttctttttttcttcacaaatttcacgaacagctccaggcaataaacagatagttaactgaactgtgaatgttggaacatgggaatattttcacccacaactctaaatttaattctcttcatatttatctagaaatacttctaaagttataagttgtaacaaacattcaaattatggtttgagagactagtcctatctgaattctgaggaaaattcaattagaaaaaaacaagtttcccagtatcgaccattgttacggaaccattaatgccaaactgaaatagaagtataagaatttaccatcactgtttggtttagcagtatgtttaactccagtaagcgagtacccttggaaaaatcctgaatcgttgaacaaaagatttgttaccatctcgcaacattaacaaaagaaaaaactaagataagggaaccaaagttcatatcagaaaggaagtgattgaaaagaaataaaatgaagtatgatagcaacatcctctatgggtgaccatttaccatgcaatgggagtattatgcacttaaaatatggaataatgacgacacaacaggctaccacataaagtccaaatttacctggaaaatcttcccttggatacctctgacaagcccaacttcacaataggttttcgcaaactcatacttatcttttcccagcaaaccaggcctggtgacagaatcagtgttagaaaaggtaagtagtgcgaatccaatcttttatgtcaaaaagtttgcagatgacttgccatagcatgtttatctgatggaaaatgtcgaagggcctgtggtcacataggaaacaaatataaggataaattacaaattcgaagtaaatggaagatactgatttttacagagttaagtttccacaacctcgatacagaaggagttcctgacaacagaattatgtgcttaaccttttcagcaacatcaaggactgtctttatctgcaaaacataaccgaacgtattttgactaccaaccttttttaaaaagcacaaaatctccactcagagttaaggatgtctcatgaagtgttagagaaagtgtcactgaatcatctctgtgtttatcgaaggtaattaaagtcaaccaggaaatcatagaaaaggggacacaggaagccatgcttaaaaatctcattaatgaggaaaacgaattcttacatacctcaggtggatctgacttctttttcgaacatcgtagatgatgagattcatctactatcaagagggcccattctcgctctagcatggtcgtccggagatgctgaagcatcttgtatgagataaccacaacttttggccatcttggtaaataggcaggattatcttgatgaccgaatactgaaaccaaaagtttcatcaaacacaactcgatttgaaaagatagccaattaaagctttagctttagagctccagaggagaaaaaaaaagtattagagacagaaattgctaaattgcaattctgtattccatcagttaatatgtgcaggacttggaagtgaaagataaaaccagaaaggtaacacgcaaaattgttaattctgtattcaactaatgtagctaacaagtgcaagacacataagtttagaagagaaaagataggcaattcagtagagacttttaccgagatgtacgtcagaaggcaaacaagatggcaaccaacgttccaattcttctgcccatgtgaaacgcaaaacagcaggacagacaacaagtatggaaccctcacttatgaagcaaccggcaatggcgatggcctgacacaagattgaacactcaagattaactactttaccaaactactaaaaactttcttctacaataccaaatatataacctgaagcgtctttccaagccccatttcatcagcaatgaaacacctgccacctctccgtaaaccaaatcttagaccatcaagttggaaaggcaaaagggcattcaccaatttccttggcagggtttcaatcagttgttcaaccttctcctccgtataatgttcaggtaaacaaggttgccatttcccggaaatatatgactgagaaagtttctcaacaacagccaacgttttccaaggtaccccttcaacttcaacgctcttggaccttttaagacatccagagaccttattgtagtctctaatcttataaaccccagcttttcctccatcatcattttgagtgtagtgtaaaggaatcgcctgaaagtaaaatcaactagaatatcaacttcgttcttcgcattatactaaaacccctaaaaaatcggagactcaaaatttccccttttcgtaaaattctcttctacatttcgtcaccctttaacaaaaaacaaaactttacgcgagaaaactcagagaagaacttacatcagatagaatctttctcaattgacgaaggcactcttgttcttcagggcatcgaaacccttgcaattgaaccggcgtaaccgaaaacgaatcaggagaacagatctcgagcctgacgcgaaacttttccggcacactagtactcaatactcgtaccggttcgtagttccgatacccttcttgaggacacacatcgttactaccgtcaagctttcgacatttagctaacctgaaatcttgttgtcgctgtgggttttccgaagaatcgaacgactgctttcgtttctccgcaaaagctaaccgagtcgcttcgtctcttcgcctttgctcttcggaaacctccattgattgaatctgagagttgtgtgaagaagtgaagagaagacattttgaattttgaaacgcaagagcatgaacaagtgaagagcgggtgcgaagaaaccacacgtgtcaactacacacgtgtgaattaaaattaaaatccggttcggtaccaaaaaaccaatcaaaccggatttccaattttataacagagtactatttcgagaaacaaatcttgaactcaagtcatctacaatcttcaagacctctctataaactcagcatcgtagaaaagaaaatatgatttctttgaaaattttacattataaagattcatgaaccaaaaacaaaccatttttcctttaaaccaattcacaactttgatctctttctcaaggacttagcagccttcaacgacttgtgaagatgtggatttgctctgaatcttcttcttctgagatgttctgttgttatcttgaagagagataacagtttcaaaagcaccaaccaatgctttaactttacttttcctcacttcttcaagcttattcacagtctcttcaatcacattattgaaaagtgtctgcaatttcttcttcacttccacttttctgtgtctcagaacaactttctctcgtttaccttcaccgttaatcttcccaacaccttctcttttatctttcaggctcttcttctttttgttcacatcacttgttctgagttttggttcttgaacaactatcttcttgaatttgatcgatgttgtagtggaatcttctggttttggttcaagaactttccctttcttgaaattcatttgctgctttgttggaggaggaggtggagtaacctttaaaccaatccttttcggtctaatcttgctttcgggtttcggattagtaacaagattagcagaaccactctgtttcttctcaggcaaactagtcttggacctggaagtagtctgtcttattggcctaggatctgaccctgtaaccacctctgagggtggaggcaaagatggtaataagctaagacttttcttgccggtgcttcttatgattttcttctcagaagattgctgagtctcactgatcttaacacttttggtgctcatcttcttcttcttcttctcaacactagattcaacaacatacaatgtcttctccaccgcatcatcaggtctaaccggttcatcaatgttcgtcttctctttgttcttcagattctttaaacgttcctctttagaattcttgttctcgctgatccttgaaaccttctgagcatcaagactcgttttctccaatacatcatcacatctaactggctcatcgatcttcgccttctctttgttcttcagagtatcctctttagaactcttgttctcactgatccttgaaaccttcttaacttcaagatctgtcttctctaatacatcatcacatctaaccggttcaacaatcttccccttctctttgttcttcaaattcttcgaaagatcctctttaggacttttgttctggctgatccttgaagccttatttacaacaagattagtcttcttgaccgttctcacaacaggtgaaacactcggactagtactcttggtttcactcttcttaacgtgtaaaccatcacaagatttgacaacctcaccagcagcttctctctttgcagcctgcaatgatgacttgtccggtttagaaacattccccaaggacttcctcaaagtctcacccttccccaaatctccactgtcaacattctttttcttagccaccttccatggtttgatcaccaaatcttcctcacgcctcttcccatgtttacatagatcatgagtagaactcgtttggttcccacggtaacgggtttgaacctgagctttgcctgtctttttatctaaaactcgtgttgaataccgcttcaaactcgcatgattggtctctgcagctggatgaagaacatcatcatctccttgaacttcctcatccactacagggatagtttccacagatatctccattgggtttgcatcatccaaacaacacttgtcatcaacttgtgaaatattctcctcagacattgcaacttattacaacaactacagagaacataatgtactgatcatcaaaatcacaaattttgggagcttaaatcatttaaacaacacacataatgatcctaaactgtttttctcagattttgagaatgaaaagtacaaaattgaatctttggttccaacgtcaataaataagcaattacatcaacaaccaacaacaaccaaaaaatccaagtttgatcatgactgaattcaataacataattaccacaaaaagaaaaacagatttggtttatgatctcaagttttgatcaagactagagttatagtaacatagttgatcctttaacaaaaaaaagttatagtaagatagttctaagaaattacaatgaagtcaactgtgatgaaaatgtgagatacaaatagaaagatgttgttacctttagatcacccaactcttcaataattattttcccaaaaaaaaaaaaaaaactcttagagaactgaagctgaagaacaaaatactaaatagttttgtccagaagaggatgaagagtgtgattagagaatttgagaagaaaaaggagaaagttagatttgattagaagaaaaacaaatgaggtcaacaaatctttaattgaacgaaagagagggaaggagagaatcttttgacaattttttcttctaatattttcagttttggactttattaatacagagccatatgattttgcaatttattctaagtgaccatattaattagtcaaaacatgtttaagatctagtatttcttttgatacaacataaaaggaaaataattgaattatttcatttcatttattaaaattaaactgaagattgaaaatttatgatggtaacaaacaaaattcaaacttaaaaaactcaatagtagtccatataataatactgtgtatattaatatattaagcttttaggttttgacggatcgggagatatggaaacaaaaagtctttttgtatttttctaaagaatgatgccttccgcgatggaccgactttggattcttttgattatatattgcaaaaagataagatctacatgctgacttccaaaaagaacagagatgctctaaataatttctaataattcgtgccatttctatattattcaagtaaataatactttgtaaaatttaatacttttcgtggttgtaaagcttattatacctaaattatattttttttaaaaaatttgtatcaaatgtgctgcaatttagcaacatagaaaaattgtgatacatcaaaagaaccttgttatcaaatgtggttactggttatgcccatttgaaaccaacactatcgcccatttcaatctgaaataacataatctgaaataacattttctgaaagcccaattccgagaaaggccgagcttataacacctgaggcccaaagtttcaatttctgtttgctgattctagaaaatttacaaaaatgtatacattgtgatcatcctacatataaagtagcttaccaacaattcacaaaagactaagctatattgcgtgtaaagcagaaataagtaaaaagaatattacagttttctgaaaaaaacatataggatataacattgaaagctaactattgcctacaaaatacttgttgtacaaagtatcaaataatatatgtaaatgtactttgaaaccggcaaatgatatatatatatatattttttaaatgatatttacatctcttaattttgattgaaaatatatagatagggatatagtaaagagaaataaagggataatatgacatctgtattattattttctttttgatataaaggacagatctgtttcaattgattgcttctgatttaagcatgacacgaggcaatactgactgaaatgtcatcgagtgacagatgcaccgattcgaaccaccttccttccacagttgttaccattcgcaattgttctttctgacaccacaatcttaatttattagttactacctcttttgctcctattatttgtttctttaattgtgtttattttattaatctggatttgcctttttagcataagcaaatacaaaaaaaagttattcctttaagatctaatcctgtttagtaatgttctctagatattattggttatgcaacttgtgcttggaaaatttttaaagtataatagttgaaagtgactttcttttgtagattttgaacttatttgaatagtcatgagatgagaacaaaacaacatacttccaaactgactatgttttgtagatttttaatatagtatcattgtcatattggttttgaaaattgactaacgttggaaatatttctacaaaataatttgtcttttctggtcttaaaagtgagttgattgtgtttaaccaagtaattcatttacaagtaagtgatcattgtgtaactaatgtaacttgagagaaatatactcaaacaaacttcagtagtaagaaagaaaaaaaagagtaaagctaaaagccaaaagtgaatgaattaattattaatatttgtcacaccaatttcgaccgatcttacttgttttcaaagagatgcttcaactgttttgtttgtttctgttaaaccaaaatcaattaacgagaataaaaaggaattaacgaataaaaagtggtagaaagctcatgtttcaagagaaggttttgattcatcaaccaagttgcaccaactccatatatattaccaaaaccaaaataaatttacatatttggaaagacataaattggacagaacatatcaagcatgtaatatacagaagccgacaaattgcaaaatttacctaaaccccatcttacaccaccgtcagattctgatgtaagtattatcaaagctcaagaacaatcacatcatcagaatctaacttatatatcaaaggtccagaattttctccattgaagctggattctaaggtcagttcttacttctttatctcaatctgatgattccatatcgaaagtcttactttttcacttcaatttcaatctgatgattctaagatctttgattcgaggtcgatctctgatagttactacatgtttctgggtttatttatttttaatccatatagtaattaaaaactcttatgaggtttaattatggttacttgagaatttgcaatcgtcatctttctttgactcctatccattttttggtttttcctttgtttaatttctgtttcataattgtaattgtaaattaaccaaaacaaattgatcagaaacctttttcctatggaatatttatcacacgcaagcctgtgagttgtgactctgtaatcacttccttgttctggtaatttcagtggttaaggctctccttttttctgatgttgtcagcaaaagttagtttttcttcttctttaatgggttaattacacctaaatctctggttattaaacaatccagaaagaaaaaaagtttattccttcctctatgtatatagtttcacatgcaagcatcacttgtttgttctgacaaattgcagagttttgagttctgtttttttttttttctaatgttttgtctttaagaaagttctgtttttttttctgcaggaaagttatcaaaagttttgagagctttggatagtgaagctcaaagaactaaacaatgggcttcagagtttgtgttattgtcgtcttcttgggttgtcttcttctagtccctgagaaaacaatggctcaagaaatgaaacgtgcatcgatcgttatccaaggagctcgacgagtttgtgagaccgatgagaactttgtctgtgcgacattggactggtggcctcatgacaagtgcaactatgaccaatgtccttggggttactcttcagttatcaatatggtaatagcaaaatagtaaaggattcacctttcagtctcttcataataacaatgtccgcagttgcgataattttctgatctttccaatgttttacaggatttaacgcgtccccttcttactaaagctattaaaggtttgcacctggcataccaaaaatgttcatgccattgctttgtgtgttcttgaattctgaaatttttaaggatttggatttttgtatttgcttagctttcaagccgttgaggataagaattggtggttcgctgcaagatcaagttatttacgacgtaggaaatctcaaaactccttgccgtccattccaaaaaatgaacagcggtttgtttggattctctaaaggatgcttgcacatgaaacgatgggacgagctcaacagtttcctaaccgcaaccgggtaagctaattcactttcggtttagtttcattaacgttcacattttcctcttttgaagaatcttgagttagttgtgtttgcttgtttttatcgagcagagcggtagtgacattcggtttaaacgctttgcgtgggagacacaaactccgcggaaaggcgtggggtggtgcatgggatcacataaacactcaagatttcttaaactacacagtctcgaagggttacgttattgattcttgggaattcggtaacaacaaacatttaaaaagtcgccttcttttactcggtcttttttcttagctttccttgttctcggtataggaaacgagctgagtggaagcggagttggtgcgagcgtgagcgcagagctttacgggaaagacttgattgtacttaaagatgtaatcaacaaagtttataaaaattcttggttacacaagcctatacttgtcgctcctggagggttctatgaacaacaatggtacaccaaacttcttgaaatttccggtcctagtgttgtcgacgttgtgactcatcatatatacaatcttggttcaggtctggttttgtataatataatcaaaataaactcaaaaccattacttatatatatcatatctgaggaatcatctgccttctctgtttgagtcttgcaggaaatgatcccgcgctggtgaagaagataatggatccgagttatttaagccaggtatcaaaaacattcaaggacgtgaaccagacgattcaagaacatggaccgtgggcttctccttgggttggagaatctggtggagcttacaatagtggtggccgtcatgtttctgacacattcatagatagcttctggtaaaacaaaacaaatatccatttcggatatcttgattttagcccctgatttctattactgaatgaactaaaagaggcatctttggatccaatctttttgaaggtatctagatcagcttggaatgtcagcgagacacaacactaaagtttactgcagacagactttggttggagggttttacggcttgctcgaaaagggaacgtttgttccaaatcctgattactataggtgagagtcccaaacaaaatccggactttgaaattttatggttgattgatcttgaagttttatctgactttttccgccaatctttctctttcggtcgggtttcgggacagcgcgctgctttggcatcgtttaatgggaaaaggggttcttgcggtgcagacagatggaccgccacagctacgggtttacgcacattgttcaaaaggaagagtgagttgctcatatcatcttttatatcgcagtttccaaacgtctttttcggttagagtttgctttaaatgctttggttttttcttggttttaggccggtgtgacattgctactgataaatctaagcaatcaatcggattttacggttagtgtcagcaatggcataaacgtggttttgaatgcggaatcaaggaagaagaagtcattgttggatactttaaaaagaccattttcttggattggaagcaaagcttctgatggatatttgaatagagaagagtatcatctgacaccagaaaacggtgtgttgcgcagcaaaacaatggtcttgaatggtaaatcgttaaaaccgacggcaacaggagatatcccgagccttgaaccggtcctccgtagtgtgaactctccgcttaatgtcttgccattgtcgatgtcgttcattgtgttacctaattttgatgcttctgcttgttcatgatgttaatggggtctctctttgcttattgggaaaaaataaataaaaataaagaatagttgtaatttttttggtaattgtatctaatgctggtgataaatgtatcatttcatatttcaatacaacatgattacaaacctttggttttgtgtctcttcgacttatgagccattgcaagaaagataacaaaagacaagaatcaattcgcagaactgcaagaagtgtctccacaagataaagaagtatcttcactgagtttcttcctctcttcataagcccattccaagccgtgacagtactgaaccggcgggttgaacctactgtcggttatatcatcaggtaagaaagcaccgttccccacaagaaacttgacagcttctcttttccgttctttagctgcagcatggagaggagtccagccacaagcaccagaggttctagcttccatgttggctccacgttcaagaagcaagtccataacttcgatgtgacctcctttggcagcaaggtgaagaggagtcattccttttgatttaggtccacaagctagagcgttcacgtctgctccttggtcaaggagctctttaacagctttgagatcgccttcacgagctttgatgtgaagctgagtccaccccctgtcatctctgtcaacacccgtttccatggaccggcgcctaaatgagttaggccgaaaggacaacgcaaccggctgctcttggagcatcttgcagataaaccagaactgactagaattcacagatgaaagactcaaaggatatttcctaagggaaacttactagacaaggagattctaggagtgactcagatttacataattttggttacaatcttatacaagaatgtctaaagcaggaacactacttgtgggtagaaatcatcaaccaatatcactcagaataagaacttatgggagaggcagattgagatgattcagttggaatggagcaactcaatcaagggaagtgattagcaatgcagtaagggaaagagggattcaaaccagggccaaagacacggagattttgagggatcacaactggagtcatagacagtgaagagaacacgagcatcaactagaaagaggtaggagcttaatggtttctaggaacaaagagaaatcagaaaaagcctggatcaatgggtaaagagagcatcgggccagagtctctatctgcgtgatttttaccagccagatctgccaacaagacaaggatggaaaaaaaaacttagtggattcagataatacaaataagcaaagtgttcattcaaaaaaaaaaaaaaaagcgaagtgctacagaacaagccataaatctctctgcaaagatcgccagaaatattttcagagatcaaaattttaggttaggtaacgaacaataaaaactttagtaacaagtcccaatctttagaatcgaaaactctggcaaatgaacagtatactaagagaattcccaaaataagctgaaattcagaaccacccaaaattcatctaaaaaattctaaagcagcaaagaaactaagataataaaagcttagtgatgaatccaaacaacataaagaccaaatcaatttcacagtaagacgacgacaacgtaatagaattgaatcggggaaagatagaaacctgtaggcgtcgtagcttagcgcggagggagaagaaagagatatggtgaatcaaacacagatttatccttgacggaggatatgaatcaattagtgttttttcgcgggtagagagtgagaatcgtatatcgatttccagatgaagaagaagaagaagaagaagaaaggcgcgtgagtgtgtgtcagagacaaatatcgtttttttttgtttgttactatacttgatccactttaaaatcgaatttgccacctcatattagcttaattaatcaaggcttcttactgttgggcctacaataaaaggcctgaatttggcccagatagattaaaccatatctaatatctttatcaactaatttaatttcaaaaagattttattctattttatcgtacatagtttgcataatatggttagatttcaaattttatatggaagtaactaattttggcagataattggattcataagaatagaataaaatctctatatatttatctatactattaaaagacatcctagaaaatagtataatacaatgtatttcacccattatgcacatcattttgcaatattaccttaaacaaaggctaaaaattacaacaacccccaaaatgataaaacttatataagaatctcatgattgatgctgtaggagaagaagaaaaacaaagaaacagaaccaaagtagagacactcttgttctttatatggattctacttcatcggaagtaaaaatcgtttctcaatgctttgttaaacccaaaaccatccctgaaaaatggaaagagccataccatttatcaccgttggatcttgtgatgctctctatgcattacctccaaaatggtcttctctttctcaaatctgatgatgcaaccaaaacaaaagatttcatggagacttggctacaaaagcttagagattctctagctgaaacccttgtccatttttatccgctcgcgggtcgtctctcgactttaaaaaccgataatccgagatcctactctgtgtttgtggattgtaatgacagtcccggagctggatttatccatgccaaatcggatctaagtgtaagagatattgttggatccaactatgttcctttggttgttcaatctttctttgaccaccataaagccgtgagccatgatggtcacaccatgagtctcttctcagtcaaggtacattaatttattcttgtaatctcaaaatcatataattcacttagcctagaagtttagtctgaacgatagtaatacacatatagtactaggtttacttaacttcttgccatttgatttagagatacatcgaagtattgtgtatctatgtagtcttagttgtttgtatatcacgcaactatgcatgcaataccctaaagagatgaatcttttcaggtaacagaattggtagatggagtgttcattggattttcattgaatcacgctgtgggagatggaggttccttgtggcattttttcaactctttgtcggagattttcaatgcacaagaaaccgataacttgcttctcaagaatcctccagtcctttcacgttggtttcctaaagggtacggtcctgtgtacaaccttcctttcactcactctgatgaattcattagccgattcgaatcaccggtcttgaaggagagaatattccatttctcgtctgaaacaataacatcattgaaatcaaaggctaatgaagaaagcagaacaacaacaatttcttcttttcaagcgttagccgcatttatgtggagatgcattacaagagcaagaaacttaccttatgatcatgaaattcgttgtagccttgccgctaacaatggaacaaaattggatccaccattgtctttgagctatcttggtaattgtctttctgctgtaaagtccaagaccgttacatccggtgagctactagaaaatgatttgggatgggctgctttgaaaatgcatgaagctgtgattggaaacactagtgaagtggtctcggagacaatcaaaaactggttgaaatcatcttatgttttccatttagaaaaacttttgggagcgatggtggttcacattggaagctctccgaggtttaagatgtatgaatgcgagtttgggatgggaaaagcggttgcggttagaagcggttatggcggtaagtttgatgggaagatatcagcatatgcaggaagagaaggaggaggaaccatagatttggaagtatgtcttcttccagagtttatggaagctttggaatcagatcaagaattcatgtccgttgtctcttcttcttcttgatcttattcatataagtttgattgattgtttgtgttgctgttaaagtccaattaatattatgtgacaatgtgttattcaactgataatgactgttatttattaaagattagtacaaactaaaatgtgaggtttagagatgataaagttgatgtctttgtggattactcccactcactctcttgattctacactctacttgtaagaacttagataggaaacctgaaaacagaaccatgaaacagagaaaattgcagagaagtaaatgtgtaagatcaagacttttacgttttcaggtttcagtgtgaaagcgcctactcatgccttgacattgttactcggaatccactattaacaaggtttataatatcaagctctttcttgagcttatacaacaaccatacaagaagtcatctcctcccaaaacacaccctccattcaactactctctgaaccatttgtcccttttgtctcctgatatgttctaacactaagaccagatccaaaacgacacagttctacttttggcaagaatcacgtgacgtccttgtgattgggcttcagaatttgcttgcttcttcttcaaaccctctgtgggaatagtgtttagtgaagttagtagaaacatgcatgtgttatttgattaaagattaatacaaactcctaagactaatgttattcaattagaataaagatcatatatatgatgacatcattgatgatgaccagcatatcaaattgtgcaggaacatacatatagatatgatgacatcattgatgatgatagctatctataatcatattatatgaatatattatttggattgtttatgtaagcgagtataaaccaaagtaacaagataaaagggaagcaaagggaccattgaaagaaacaaaagagtcatattatacacattttttctctttttttttttcttcttgagaaaaatggattcctctccatcagaagtaaagattatctcaaaatgcttcgtcaaacccaaaaccatacctgaaaaatggaaagagccataccatttttcaccaatggatcatgtaatactctcaatccattacatccaaaagggtcttctctttctcaaaccatcgttttctgaatctgtcacaccaaaagagttcatggagactttgctgcagaagcttaaagactctctagccatagcacttgtccatttctatccgcttgcaggtcgcatctcgactttgaaaaccaacgactcaagatctcactcggtgtttgtggattgtaataacagtcctgctggatttatccatgctgaatcagatctaagtgtatcagacattcttggttccaaatatgttcctttggttgttcaatctttctttgaccatcacaaagcattgagtcgtgatggtgacaccatgactctcttatcagtcaaggtacatttcttcattcttgctatatcatattattcaaatatgtcagcagatttgtagtaataaaagttaaattgcttttactaatgatttattgtagtagtgttttactgtgtcatagtgaaaaaaagatgctgaatctttttctggttatacaatgtaacaggtaacagaattggtagatggagtgttcataggattgtctatgaatcattcgcttggagatggaagttccttctggcacttcttcaactctttgtccgagattttcaattctcaagaagataacaacaagtttctctgtctgaagaatcctccaatctttcgtgaagtgtccggtcctatgtacagccttcccttcagtgaacctgatgagtccattagtcaatcagaacgtccggttttgaaggagagaatgttccatttctcatcagaaacagtgagatcactaaaatcaaaggcgaatgaagaatgcggaacaacaaagatatcttctttgcagtcgctgactgcattgatatggagaagcattacaagagcaagaaaactaccaaatgatcaagaaactacttgcaggcttgctgctggcaatagatcaagaatgaatccaccattgccgatgaatcactttggaaattacatctctcttgtgatagctactactacaactggtgatctattggagaatgagtttggatgtgctgctttgaaactgcatcaagctgtaaccgaacacactggcgaaaagatctctgccgacatggaccgttggttgaaggctcatttgaaactagatggatttttcagtccaaatattgttcacatgggaagctctccgaggtttaacaagtacggaagcgagtttgggatggggaaagcagtggcggttagaagcggttatggtggtaagtatgacgggaaggtatcagcttatccagggagagaaggaggagcaagcatagatttggaagtatgtctacctccagagtgtatggaagctttggaattagatcaagagtttatgtctcttgtctcttcttcttcttcttcttgatctaatattcttattcatatgtgctcccatcatatctctatctaaactggatttgttagattggagtattttgtgttgctgttaaaactcaatcaatattatgtgacaatgtgttattcaactgataatgattcatgtttatgaaaatattaatacaaactagtatgtgaggtttagagacgataatgttgaaatctttggggatttattctcactcactctcttgatacaacactttattttataacaacttaaaaatgaaacttgaaaacagaaccataaaacagagtaatcgcagagaagttaattagcaagatcgagagttagtaaagctctttcttgagcttatacaacaacaatacaagacttcatctgctcacaaacacagcctcaattcaactcctctctgaaccttttgtcccctttgtttcctaacatgttctagcactagaaaccatatccaaaacgacacggtttactttaaccaagaatcacgtgacgtccttgtgcttatcacatatgagataggcttgggcttcagaatttgcttgcttcttcttctaaccctctgtgtggaaacagtgtttagtgaacttagttgaaatcatgcatctgttatttgatattgatataaattaaactaagattaatgctattcaatatgacatcattgatgatgaccagcagatcaaattatgcaggaacatacatgttcatgtgatgacatcattaatgatgatagctatctataatcatatgaatattttatttggattgttctataaaagagagaataaacgaaagtaagaagataaaagaagaccaaagaaacattgaaagacacaaaagagtcatattatacacattttttttcttcttggaaaaaaatggattcttcttcatctgaagtaaggataatctcaaaatgcttcgtcaaacccaaaaccatccctcaaaaatggaaagaaccttaccatttttcaccaacggatcatataatgctctcaatccattacatccaaaagggtcttctttttctcaaaccatcattttctgaatctgtcaaaccaaaagagttcatggagactttgctgcagaagcttaaagactcactagccatagcacttgtccatttctatcctcttgcaggtcgtctctctactttgaaaaccgacaattcaagatctcactctgtgtttgtggattgtaataatagtcctggtgctagatttatccatgctgaatcagatctaagtgtgtcagacattcttggatccacatatgttcctttggttgttcaatctctctttgatcatcacaaagcattgaatcgtgatggttacaccatgagtctcttatcaatcaaggtacatttcttcattcttgctatatagaggtctcttatacgtgtgtgagttatagtataagaaagatgctgaatcctttttctggttctgtaggtaacagaactggtagatggagtgttcataggattgtctatgaatcattcccttggagatggaagttccttctggcagttcttcaactctttgtctgagatcttcaattcacaagaagaaaccattgggaataacaacaacaacaacaacaacgcattgctctgtctcaagaatcctccaatcattcgtgaagcgaccggtcctatgtacagccttccctttagtgaacctaatgagtcccttagtcaatccgaacctccggttttgaaggagaggatgttccatttctcatcagaaacagtgagatcgctgaaatcaaaggcgaatcaagaatgcggaacaacaatgatctcttcttttcaggctctgaccgcattgatatggagaagcattacaagagcaagaaaactaccaaatgatcaagaaactacttgcaggtttgctgctggaaacagatcaagaatgaatccaccattgccgacgaatcaatttggagtttacatctctcttgtgaaaacgactactaaaatcggtaatctactggagaatgagtttggatggattgctttgaaactgcatcaagctgttaccgaacacactggcgaaaagatctcttacgaaatagatcaaatgttgaagtctcctttaccgttgcaagcatatcgactttccaatttgaacatagttcacatgggaagttctccaaggtttaacaagtacggaagcgagtttgggatggggaaagcggtggcggttagaagcggttatggcggtaagtatgacgggaaggtatcagcttatccaggaagacaaggaggagcaagtatagatttggaagtatgtctacttccagagtttatggaagctttggaatcagatcaagagttcatgtctcttgtctcttcttccacctgatcctattcatattttccagacacaaaactcaagttattctttatttcaaacacaaatctttggaaccaaatgtttgcttgttactctaactgtattctgcagttgttaaatgtttccacttcattaagaaaagaactaatatattgaaaatctatgtttgactttaagcaacaaattcatcagaagaatggggagaagcggacgagcttggttatgaacagagttctggctacttttacttccggagtaaatagcgagcccgttggttcgattgcttaactctgtagttgagctcatcagcattatcttgaagatgatccagttcattggtttgcctgcgattacagtgttgccttcagaaacgagaaagctcttagagaatatgtatacatatagagagacttgatggaaaacctttcgattgctgttcccatgtccactgccatatttttcaactcgccaagaagagcgcttaagtcggtaagggcttcatcttgctttgcaatctccatttgttaacacagcatgatatttagaatcttggttaacaaacaaaaagagacgacttttgaaaccccagaaggaacataagagagaatccgaacctgtgttttctgataagcatcaacggcttcaggaagtgtttttgattttggtttgagtgaagggttcagtcccagcttttccctagtctttaagtcgataacttttctcttaggtgaatcacctgctcaggaaatatgaatagctagataaattaataagcaaaagactcattccttagaagtaaagatcatcaaccaaagaagaataaacctttggttatgacagggccagttatagaacgagacttctttggcttccaagtccttgaaaaaacacctccgaggcgtccaagaatcttctcaccctgaaaccaaacaaaaaaaacatacaataaagatcatccccaagaaagagattgcaaaacacctctctggtcgtatgtgactcacccgagaaagatgatgatcgagatcaaccgtcttctggtgtgttctagtaatttgatctccttgttcattcaacataaccaaagttttagaagcatcacatctaatctcttcagcaactttcaaacacccttgtacggttttcgttgtttcctcagagttatacacagcgtagctctcaagttcttgaaccgtctggttctctttacctcccgagggcttcaaggatgaagtgaatcttttctcaacctccttgtcatcatcatcatcatcaaaagggttcaaactgaaactcttagcagcctccttctcatcatcaaaagggttccagctggaattcttaggagccatagaaggttcaggggaaattctactgtatcagagaatccaaaactaagaaaacaacttctcctgcagaaatccaaaactaagattgctattgatccttgattcgaaatttaccagaagatactgaactttgaagttgaaaaaaagcaagaacaagtatttataactgctatctcttttgatcaacgatcgattcctaaaagatcaattttccaacaatcaaagtagacctaaatcgacttggaagattacgagaagaaagaaaaaaacgaattagtacctggaaattgaagtaggattgagaggttccgagagagaaaggttgataggaagaagaggctttaacgagttcaaatattggagtccgttatagaggaaactggtgagaaaccttagcaaaaaaacacaattgttgaaaaagagttttcttttgttcctatttatttactttcttgtattaaactatttatcaataaaatctaccaagagtaattatttttgttttcttttagataaaagtacaggtatcgttaaagaaaaagaaaatgtatacagattttatcaaagcaacttgataagaaaaatgtttgagatttcaatttataaagaggaaaagaacataaggtatggaagaattggttggagatcaattttcaatttgctgcagagtaaatatttagagacttgttaagacatcaaagaaaatgcaattatgtattaccttagaacgacttttatttctaatgtttgttccaagcaatttttatgtacactcagaataaagaaaacatcaatctctaaagctaaactcttaacccaaacttcttttgtttgcgtctccaaacctcttccaagtctctggatttcttctgactaccctaccatttgatttctatacaaatcaacatccaaacttgcaatccgtctttcaatcactcgagcactttccacactcagtttcaacagaaaacccatggatgagactcagaaatgtgtgtaaaggtaaacatcaaagctcaagacttttcataacccaggaagaggcagcatttcattggaagcaggcttttttacatctctcttgatcttaacaacagaggaaagaaaagagagattagattccattttcacatattcgaccaaaaacaaggaagcattacataagtagtacctgtgcttctagctcggatattctctgtaatgatgcttgttctatgcacacacggcgattgcgttcctcatcaagcaaacatgtcatcttataccttaattcagccatttcttgtgtaaggtcttctgcttcttccttcgccttcagtttctcctgtttcagttcttcctgcacaaaccaacaaccgcaggtataactagttggattctgtaatggtaacaaaggaaggaaatagagttcttcagtttttcaaaagtactttgagttgctttacaacatcttcgtgctgatgtatctgtttccccataccctccactttatcaatcaaattcacattctgagaaagttctagtttcttcatgatagcatcaaaacaattgctgtgagacacaaaaccaacattattagggacggggataactcaatttgatgacttaataaattagccttaaactggagcttaccgaacttcattagacactggaagcacatggctcagttcagcgaagaagcacattgcatttagaggctgttcatcttcactttctaaccgttctttagtactttgaaagaaatctttgatactcttttcagaggcagtaaatttctccctcaggtcttcgttttgcttttcgatgtacttgacattctcttttgccctttgagactgaaactgggactcttcgattattccttttaattgatctttttcttggatgctttcttcttggattttcatagcgtcaaagagtgcttgctccaacgctgttatatcaagcttcatgctttctatttcgcacaaggactctaatgttaaggacgagatggtctcttccagtttctccaatgtaagagacgaacactgtagttctatttccttgctctcgagttcttgcaacaacaacaaatgctcggatttagacatacacaactcatctcttaaagagttaacttcttcttccagattccttgattcagccaatttgaactcaagatcgtgcagatgttcattgagataattcacttccttgcttctgaaaattagttgatcccgcaagtaatctacaaggcgaagattaatatatgctgaaacatattattattagttcagaaaaatcaagactggttggcttaaatagaaaattaccaatttccttatagcaattcaataattctttctccatcatctgaattcttgctgtgtcttctaagcgagattcagataatgacttcgtgtgaagttccaacctctgcggtgaagagaagattaaggtccgaaaactcaaccaacagaatgagaaaatactttccctgaattgctcatattaaacaaggagaagaagactactctgactagttcaatactatggggctgtgattctctcagcaagtccttttgtttccttagctgccaataacaaatcaaagagcacaaaacaaaacagaaatcaacttcagcaatctaagagtcagaaactaccttataatgagcatagcaatgaagtgtttacctccctgcgtgtagtcccaatctgcaaaagatcttcaacatcaaacgagttctcacaatcacttctggaactacacgccgagctactgcttcccgagaaactccccgagctactcgacatttagagacaaaaatcaccactgcaaaggcaatgaatcattagcaccaataacctatagaaacactttctacaactaacttcaaacgaatccaagttttcattccctaaatcaaatcagatttttctttcagtttatctttccacggaaatcaaattaggctataaaaacacttacaacaactaaatgaagaactagagaagacgtcaacttcacaggtccaattattcataaaattagatgaaagccttgatgcttctactcgattcctttgaagtaattggggaaaacagtactacacacaccactagatagccaatttcaacaacgaaggataaaaattgcaaccacaaaagaaaaagcgaacacgagaataaaattgatgagcgtacacacgaatacaagcccaggaaacgtttaccttcgcagctcaatccctctctgagataattccgacggcgaatttgccggagaaatgatgtttgaatttgatgatcctccaaaaaaaaaaaatgtctctcggtttcttcgaagcgatgccagcccagataagtaaaaatgactctctgctttgtttaaaaaacaaaacccggtcaattccggtcgggtcggttcgggtcaaactagttattatttcggatttggtttatgtactgtgagagtgagagatttttagtaagcaatccctctctagtaatggcggtcgcaatacctcaagccacttctcttacgaacctcgtcttcctcacgaaattaatcccacgaggaagcttcaccaccatactacctaagcatcatcggaaaccaatcttcgtattctctctccagactcaattttcttctccagtaaccacactcacctccaaaaaccctaaagatgatgagcaacagcaaaaactctccttcaccctcaactaccttatcgactcatgtggactatctccagattccgccaccgtagcctctcgtaagctcttactagattcaccagaacgacccaacacagttctcaaccttcttcgtgaccatggattcaccacagctcaaatctcatctctcgtcaagaaacgtcctgttctcttattagccaatgctgaatctgtcctcctcccgaaactcagcttctttctctcaattggtgtctcaaaatctttacttgctcgaactttagcttctgatccaaccattttgactagatcccttgttaatcagcttatcccttcttacaatttccttaaaagcgttcttgattccgatgagaagattgtggcggcgttgcggaggacgacttgggttttccttgaggatcacactaagaaccttgtcccaaacatcaactatatggcggagactggtgttcctgagaaatgtatcaagctgcttctcacgcattttcctgaagctgtgatgcagaagaaccatgagttccaagcaattgctaagcaagctcaagagatggggttcaatcctcaaaaatcaacatttgtgttggccattcatgctctctctgggaaaggaaacaaatcgatatgggacaaatgttttgaggtttatcagagatggggatggtcggaagatgatatcatgtgtgcgttcaagaagcaccctcattgtatgatgttgtctgagaggaagattaacagaacgatggaatattttgtgaatgagatgaatatggcgcctagatcgatcgcacagtgtccagtggtgctcttcttcagccttgagaagaggattatcccgaggtgttcggttactaaggttttggtatcgaacgggcttgtgaaagaggattggagcttgacgtctttgttggttccagtggagaaagtgttcttggagaagctcgtgatcaagtacgaagaggagttgcctgagttgatgaatctgtatctaggatgcaccaaactctgagcttttgtttttgactgttttcattatcaaatgtcagatgctgagagacatgaatctttgtgaaaagagtctagtgtgtaatccaattttggtagtgaaaggaaagctgattagcaagcccaacgtgtgttttaaagacagaacaattgaagacttgcatgtagaagtagaatcgtcatctcaatataagggccaaagccaagaatcggtctgcctatatgatttgtatacacacacgcacatatacatatacagacacgccttgatagagtatacaaacgtacatatgtatgtgttcataagaattggtgtgacagtaacagagattctaaatcttgcagacgagagaaagagagagagagagttttacaacaatatttcttacacgaaacgatgatcctcattcaccgaaccgacctgcaaaaaacgaatattttatcatcagtgaggaataatacatagagactaataccaaatctatctgcactagtctaaatgaacttacaaagtaaggagatgtgaagacagttttcatttatcaacgcctacatcaagtgctttagagcccatcatcacattcgaatcgatttgcttatcaaatttcttctttctcctctcttcaaagtcttggtatccttccatctatccatttttatataaatgtatgttacacaaaacccaattcaaacaaacaactttaaaaagtgttctttcgaggttatggattattgaattaccagctgaaactgatccatggaaataggattgttatgcaaagaaaggttttgcagactcttgcaatgtatcagcaatccatctggaatctggaaaacaacaagtgttacagatttcaaaggaagaagatagtgattcaataaacccaaaaacaaaaaaaaacacatttcaatctgtttacctggttcacttgattattgtctaaggaaagcgactttaactgaatcagattgcagagtgatgcaggaagctcttcaacaacgttatctgcaaggctatcccgaatcacgattaagctttggagaagaaacaaccagaggaatgtccagaacaaaatgtcaatagaaaaaaacataacacttgtttcctaaagagttttgatgtttctgaatcacctaacaaaaatgggggataaaaagaaacagaatctaaagagcgaaactagaaacataccattagcctgtacttcttctaaagaagcacagctccctactgattcaggaagggatttcaatctgttatttgagacattcaacagcagtagctgcatttgattagagaaagcttgttaattatttcagggagatcctagagctatgctttggtaaatgaagtcacttacattgcggagactaccaatagtatcgggcaagtatatgagcatatttcttgagattgatagttgctcaagccttaccaactggcccactggaaagcaagaaaaatatatgaatacgaaccgtaataggacacaagttgttttaaaattaacaaatagtgtacttgtatcaaagagcatcttacattcatcaggcaaacagctgatgcggtttccatcaagcatcaaaactttgagagattgaagcttccctagattccccggaaggcgctcaactagattatcagctattaactgccaaaagtcagcatgatgggaaagagtcaaaatccacagagaaagtaccaactagcattccattgagtcaaatactgtgatcatagctaatacaagatacgacgaaatatgcagataatgtacacagagaggcaaagtttcctcaccagacgctgcatattgattaacttgctgatttctccaggaacatcagctgcataaatatggtcaaatacaaagtccctcagctattactcttaacacgtcaatgaagaaagaaatcaaaatgaagcagaaggcataccaatcttattgtgtgttagatcaagtgttcgcactgctctctccatttcaatcacttcatcaggaaatgtctactcaacaaaacaaatcaaaaaaacagaaaattcaccaatcaagagataatcagccaatccagtcttaacaaaaccctagaacaaattcgtatgctgcattgatgacacaatcacaaagttcagtgcttttcgtctctatcaatcattcaaacaagagacaataacaacaacacacatagaataaacatctctacaaagtcatatagacagatagaaacaagtttgtcaatcaattccaagtggagacaagtataccttcaatttggagtcgcggagaccaacaatgcctgtagatcgccagcgtgagatccgattagcctttgaaccaccagctgtattgctcgcgcaacaccccatttttgtgtttccgattcttcgccgatcgtcgcagtagatttcgattagatgatttatataaataatgaagaaatctcagatacccagagaaagtttcaaagtaatctgattgctaaaagagatggcttttggggtcaaaatttggtttttgaggtttaggtgagggtcaaggtctctgtctcgctcgcgggttatatagaaagaaagccaaattcgtccccaaaaacagaaaaatataatttggaaaagtaaaaagaccctaaatttgataaaagtgcttagctttggaaactcgaagatcggtaagaaatcaaaatcaaaatcatttcgagccccaagactcaaatactattgagtcaatgaactaaacttcagattttatcttggtattggtgatcccactaatcaaatcgagggaaatttcagatatctatgttaccaaagactcatttttgaagtacttaaacttgtcttctgaccacattacctgtcttgtttcttacataacctcttacctttcaatcatacctaaacattttgtttgcaaaatctttcttttagtggttctatttttaaaactttcgttgttaaacgtctttttcttggttctaaacttctaactaatgatagtgttgttaaaccaacgtatatatgatattaaccagaaaaatggcttgttttattacaagaaaacgaggtttcttttgatatatagccccttcctcaagcaacagcatggtcggactaatttttttttttcttttccatttattttattctcatacccatctcgttaaatttcaaaccaaaaacactaataactcaaattcgaaaccgaccagtcaaccaagttatgaagttgatgtgaaaagccaaaatgtgaagtcttttgacttgatatcgtttgtattatatactgaatatcaaagaactcagcccataatttcaaaagttttatgaatggtaaacattaggaacaaacacgcagcaaaaagaacaggaagtaagaagcctaataatactatttctagaaaataatcacaaattaagaacatggttcatctatatgtacatacatgattcttctcaaaattctatttgatatagaaaaggaacccataataataaaatatgagaaagacagagataattaaacacgttttgctttcattcactatgagaacagccaaaaatctaggaaccagattccaatttttggttcctttttcctacttccacacagaacccgctttgtcaatcagcggatttcgatcttcaagactttttaacattcccttcattaggcagaggtacaagatatgtaaaatacacgcatttgtaaatatttgtaactaaccagtgatgattgattggttgttgaagagggaaggttttgtcttctgtcttttctttttttttcccctgttttaagttagccgtagagccatttcttgaagcagcgttcgtttctgagaagcgtttatcacttgattggtttctgcattctctagaacatctgtgattatagctgctgcgtgacccagtggctcttccgcggctctctttagcatgaaagcctggtgcaagtgaaggtaagtgagaaaactaaaaacagtttcacaaaaaatggttcgagcttttagaggagttaagaaaaaacagaagaccacaaacttttacaatctagtgcaactttttctcagtagaaaacttgatttgaatccagaatctaagttagggaaatggagagaagaacctggccatggtgcgatatggttaaggtacatggttgctgattccaaggctctccatcaatttgcactggtaaaggcgcacaaagttgtatcttgactgctgacccttgagctagccttctcgcacgagacaacccgacctgaagatgtgaaaacaaaacaaaaatcaatttatgttagtttttaggttaccagtcaaatgtatacaaataagacataagagtacaaatataacctgaagtttcccaaggtgccatgtcccagatatactcacaacttcaactatcttgtcgtgcatcgattgcggatcaaagttttcatatgtttcatcttcattctgccataaatccacccctcccatgtaacttccaatgtttgcaaccagtattccttccgcatccttcagagatttagcatagagaagttagagcattaattatcatgcgggtcgtatctgtaaggtatctgtgactcacctcaggaacctcgatgtcaacaccatccacctcaactcgaacttgccaagggaaatcttcgaatgttctgtccattatactccttgcaccttctctggcatagaggactttgttcataaactgcacatggagaccattcaaatatcagtttcatggactaaaggattaaccatacagcttctctacaatatatgccagttatatcatgattgtgaaatatagaaatacagttttcctgaggttatatcaaaattttatcaattaatgttcatttggttacctggctataaaatctctctggattctcctcccgtagattgtgaatctcaagggcaaccttagcatcacacccaacccctgttaagattagcaaagttagcaacaatttataggctatgggttcaagatagcagtcatatcatttacaagggtaatatacacaacgggaatggttcaaaccattcttcatgaatttatttaaagaatctatcattatacaattttaatttatatagactttaaatgcaaactgccgtgttaaattgtaaataattttaaccccgagataagtcttgataagagtaatatatacgggacaaaagttgcaaacagaactaaaggactctggatacaaatgaaactgccccactacttcgacgattagcaacctcacatataattgaaattatatcgaaagcaaagctgtgaaggttttcacctagaggttttgaatttaactgacctatataattgttcatatattttggcggctggagttgctttccttgttgattcagaatcgatactttccaacgatcaaggacagtgactgcagcatgctctatgttctgtaatactgtcgacaagcctccttgtctctcaacagaacccaaaccaccaccccaatttaatactcgggatagatcattcccggttccagcaggcagtatagcaactgcaggaggagaaataaaattctgtttctctatggcatctaatacccaaccagcggtgccatctccaccacaaacaagaactctaaagtgaggaaccttcctgaagagaaaaagtcccacttctggtccctgcactgaactcaattcaaatacctgcaagaaacggctcgcgtcaataaactttaaagactacagattaagaaaatgcattgaaaatgtccacagaatcagatttaagtctgtgacgagttttcaaggcagtatactctacctgcacaggatttagatgaagatgaagacgttgacgaagggaatcacctcgttgagcaccactctttttgttaataaaaaccaacaacggtcttgcatctgaaggcaaatcagctagttcatacttaagtttcgaccttagtgcatgatattccttctgaccaaaagacccggttcttttaacactcggcttcttttccagcttgccattgctgtcactgtccccgttagaagaatccccattcataacgctgatagaattttccagtacggcatgagcgccattaacagttggacctgtatcagctgtgctttctgtggattcatcgcaattgctaccactattaccagtgtcagctgaagtttcattagtttgcttgtattttttgctttgaatcctgatactggcaagggcggtagatgcaagttcgttagcaccatgagtgattgagctcagaaatcctccagagggattccgcgtcaattccttaacgtagagtgggcacaatattaaccttctaagcgggcctaaatcacaaatgtcaccagtttcatttgacatgttactgtgacagtcaacgtgcacaagacgttgacaccacaagcagcaccatataggagaacccccaagaaaggagctactacatgactcgtcacagtagctacaaaacgaggagtcatcagtctgatcagccccttctgtccaccgcactgcccactggtgcaccacatgctcaaatccaaccatggagacacatttgcaatcttttggcgcacttgaagaacagttaaaatgtgctgctgctccacagattgtgcacctgtggaaaaaactttctgaagctacaattgcctgagatggcgacatggacttcaagcaaacacaacagttcaagtttttcgcacgagctatagggtcgagttcccagctatgtggggcaacaggaaccttatgtcgtgcctttggatttttctttgacctggctatggctttcgtccaacttaaattaatatttcttcgccattgaaaagcagtgtaggcgatggtcaatataccaacaagggcagcaacaaaacaagagaacattaaaccacgagattcaaccgtgtcaataggattcttgctggtccagctaggaaagaacatccccaattctccatcgtcgtccatttgtctatgttgcaactctactacaagtgtgaaaatccctgaaatccgagccaataagaagccccaaaaagattattgtattggtcaggtccacacacagatcatcaaaaattcttcctcaaactccatatcatcatcatccatcaaaccagtttatgctcagaaaaagcgatatcgcagaggacaacaaacacaattcaactaaagaaaaacaaactcttcttccctgacagtaagaaaaaaaaacatgtcatccaaccgcataacacgatagaaacaatcgttttcataagaaacactgcagcccaaattacaaaggccctgaacaatgtaaacaaaaacaaatttactacaagaaaattaattgtttggtcattttcttcctcggattcagacttcaatcaaacaatcgtaatcatgcttggacaacacattcttaaaatcaaaatgaaaccttgctctcaagttcctaagtttgatacatattgatgaaaacttactctgctcatttccaacaatactataagaggcaaaacaaaacctttaagcttcgactttaataaacaaaaaaaaaaaaaaaactcgagctctagtgaaaaataaactcagatcacaaagttccaaaaatctcctattaaaaaaaaaggggcaaaaactgcagctttctctctgtccacgaagatccaatgtaaattacaccaacaaataaataaaaaaactaacctgaagaagcgagagggagaagtagaagagatgatcaaatcagaagcctaagagagatctagaaagcgacccgaaaagcgaaagaagaagagaaacccacaatcgatgatgcaccaagcacgaagcttttttactccaacgaaaattcccaaatccaaaaattttgattttgaaaaagcagagatgctctctctttcagttttcttataataattaaaatctttcgtttgattaattcgatcggactatatacaatatgatttgtgaaaggagaaagattctgggcgaaaaagagggttaatctatcgtatccgttttacacggcttggccacgtaggatatatgaatctcacagttcctagttgccacgtgcccatacattttttgtcggcaaagggcccaggcccattactttcatgacacggttcctaaattacttgtactatgtgacattgacccaatcaaaacagaagaaaacatatagaattattcttttgggatttattaattcaatacactaaagggaaaatgtccaaatctggtttttgacatccaaatgtttttgattgtatgcttttgtctaaaatacatttggcaaaaaaaaaaggaaatgcgattgtgatgttgatttaagtaacaaaaaaaagtgttgatgtgtaagacatgattctctctaccactgcatttaatgttaagaaattttttttaaaaatgatatatatctacgcaaaaatattaatattttatatactaatattctttacgagcaacctgcagatacatattgatcaaattcttaacttaatatgtaaatgttgactataaatcttatccaagtactccccatcgaccatacggcattactagcaagaaatccttttgcagcatgggactttactctttgaagtatatgtcactatatattctcctatatatgctcgatccttggactaaatctgtggtactcgacccgatcgatctactccactgcagttaagttcaaaaatacaacacctaaacatgtgttttttgatgatattggtaatttaccttgtatcacttggtacggtgttaccaatctgcttttttagatcatacctttagtagataacaaatatgagaactacataatatgtatgggaatcttaagtaattgtttatgatatgaacatcttcagtttcgactaaacttttgattgctactaaatacgtatagaacaaatcttcttaattatatcttataactaccgtttcttaattattacaacaatatgtcatatgatccaagtctaaactataaatgtccctttgaaaacggacacttcaagtacagctatatcacaaaagatttggcaaatctaagtacacatttagatttggtaaatttgtacagaatcagtgtgttccatttcaacacctaaaaatatagtcacttttaaaaccaaaaataaagaaaaaaatagtcatatcaccgatgcttagcttgatcatcataagcttagcttgatcatcataaggtactgagcctcacggatctcgaggttagaaataagaagagagaaaaaaaacaccaaatcggacggttaacaagttactgacaaaacgaaattatgaacctgagagagtagacactagtcttcggatcttctagactaagatatcaaatctgtttgttattagaagataatatatataatgaaccaaacacaaaatcatttctgctctccataactagaacacctccaatggcttcttccgatgatccagctccggagaacaaccacgtctccgtcttagctagacaagctcgaaacccaccgacacattttttctttcctcacaatccttctcctcgtacttactacttctcggcgccaccacagatttatttcatctccgacatatatctccctcctcctccatcaatatgggtgtattatcctctttggtatattaaccctaaccctaatgtatatgagtctacacaagaacttcctcaacgttactctccaaaccctagccaagagatgactcttccaccgactagtagtagaagagtttttggccggagaagttacgaactatgtgagaaggtgacatggaggacaagtatcaagccggaagttgaatccaacggtgatcacatcacaaccgtcatgcttcgcaatataccgaaccgatacacgtgcgtatataattccttcattttaaattcataaccactagattatacagtatatgttagtatttaaacaaggtgtgatttaatttatttattttgttgtggtggtgaaatgatgaggcatatattgaagctaatgattaacaatatttgcaggagagagatgatgattcagttcatggataagcattgcgaagaagccaataaaagtgggaaaaatgaagagtttacaatctctgcttatgattttatttaccttccgatagactttaggtaagttttaatctttattattattcgttaattagtttcatctttgtttatatacaacgaaatgatgctatatatacaaatcataatcgataatcattgaatatctgcatgttacaacttacaaatttttattttgtgcattaatgtatttgtaatataagtatatataacaatgttactattcatcttgatattattaacttgatcatatataaattacctaaatgaattaaacaggactacaatgaacaaagggtatgctttcgtgaacttcacaaatgcaaaagcagtgtccaagtttaaggctgcttgcaacaacaagccgtggtgccatttctactcaaaaaaagaacttgagattacttatgctagaattcaggctagttccactcctttacatatatatatacacatctttgatctgtgtatcttatcttattcaatcttattgtaacacttgtcggggaaaacaacaatacttttgtgtagggcaaagatgagctggtgaaacgtttccagcatatgacatatccggaggaggcctacagtgcggtatgtttcagcccagctcgtagcggagggaaagatacagttcaaaccacaatggtcggtaaatgcaatgaaccagtgtgctcggtttagtctttccatatatgtaattaggattatgaataataaaagtgtatgcgatggtgaacatgggtctaggatggaaaagaaaagactcagacaccgaaccaaatccaagtaaaattctgaaatgtttagttttggatttggtttttgatgtgtgtgagttttgacttttcataattagtgttatgtttaagcgtctactactctacctgtttctctgatctatatataattttctatgttgttgaactgttgtctggcgatgtttatatacaaaaatatagctatggttttctctttttttttttttgttaatgattattctgatattcaaaaatttggttgaaagttcttttttttggtgaaaatcaagtcatacttcattccagttatagagaagacaaaaaaatctttctacaatgaggattgtttttgcaccaattaattttttaaaggaagtaagccacgaactcttagcttagaaggtgatcgcatgaaaaactagctaacaacataaaaaaaaaaaaaaatgagttggccaaatatcgccggtggatattattagactacgttttcttgtcaacggtggatattttagatataagactttttggaacgtaccaaaaagtttctcttattcctttgaactcgcattatgttacaaaatataactagagaatcttgcatagaaaggtttgcggttttgtcactattttgtatgtgtactactgtactgtacattgaactgttgtgatcttttcaatcatgtaaaaacctactatagaccttagcctattctggcgttacctttacacattccagtttttattgagccgaaaccatcattgttagtttgggtgacgatagattctgcagtaccttgacacaaatcttcgtttcttggggaatggagcgacaagtgtgacgtagatgtgcatcgtaggctcctacaaataatgaccaaaaaggcctttttccatcaacaattgcttctttttcttttctctctttttttgccacttttttccccactatggtcatgagtcatgaccggcttcacataaacgatgttgaatcaaatagctttttgggcggggactgagtggaattaaagatgatggattcagttagggttttgaggtagttcttggcccataatatggcccaatatatgaattttgacttttttcgaattatcgttgaagttcatctcttaacaataataagcaacaactttatgagataatgaattattgcaatacaatgatgtagaaacggaccaatacagtgtcgtgtttgacgtttaggtgggtttggttataattgtcttatcactggcccacactacaacaacaactctcgtctaaaaccaaaccctctgacatggaaagagagttttgatctacgagccaattgctttggacccgagcctcgtatttgcctccggacccgaacctctgtttggctcctccgctcgccgttgaaaaatttccgcactgatatcgatcactttatctctctcccttctctctctctttctcttcttctcctggtttcgttaattcttgaattcgaaaaccctaaacaacttgttcctagaaattgagcaagcaaaggaaagctttttttcatcttcaggtttccatttgttgtaaagctaaacgtgacacaagtgtgtaagttcacatctctgtttccctctgtggaaaccctaattcttgctatatatcctaaaaagaaatgatttttttttttacccaattattgtaccgtgtcgataggtagtgttattgtttgaggttgaattctcggttactgtaatgttcatgttattattaaccatagcttcgatttgcagtgagattgtgtttgcggcaattttgatctcaagtgtgttctcgagttttccaatcaaattctgtatttttttcgaaattagcttaattttcagctgccataagagtgtttatagctgtgaaatcggaaattttcagctggtttttgtttaatgaagttgatgctgtttactgaaatgagctctccaagtttacttgattaggtgttaagagtttctgatgttgactggaacttaggcgtcagtgtaccctaagttccaatctaaggaaacaatgcttattctgtttccttgtaccatgtgggctctgcatcaattctctagtgtctcactttgctgccctgtggtttttgtttcctctttgcagaaacaacacttgtattggctttcttctgtctagtgtttttgtttcacttgttgtgttcaactctaaattttgcagtatctgttttgtttgtttagcaggagaacctatgagtattcaaagcatgccaattggaggtagctcatgaattctggggaaagaggtgtttatatgttcccttttttcttacacattcggaatttagatcaacgaaggcgcaatgttgaacttgtttctgtgtttttttcaaaggctcagataattacaaataatttagaggagctgaatctatgcctggaaacgaatttggggagaagatccacaatttttttggacaagaaggcctatcccaagaccagcaacatcagtctcaggttgttgacagaagctggtccagttttaataatggtctagtcggtaaccagaggcagattgacccatccctcattgccaatctgaagagttataacacacaacaatctggtactgattttgtctccttttgacactgaattccacaacttgcaatcattaatagctacatatattgctagttttctaaatggagcttttttttttttcttatgtcagttgatcatgagagaggtcatcaatcttcaaattcacagcatggtttaaactatactcagcagcctataaggtccgagttctcaagaagtttattgcaagaacaccagcaactcccaaatggttacatgcatgggaaccttgggttgcagacaatgccgaatggggcaaatgttttgggaggtgatgtagaatctagtagggataagttatcagcaaggggatttactccagaacttcataatgttcctatgaggcttgagatgggagaatctccggttaattatgatttctttggtggtcaacaacaatcaaacacacagctctctggcatgctccagcctttgccaaggcagcagatgacattcaatgatatgcaactactgaagcagcaagttatggttaagcaaatgcatgaatatcaaatgcaacaacaacttcaaaagcaacagctagaggccaggcagctcaattctttgaatagaaatgcagtcaatggaagttgcgcaagtgatacccaatcacgtatgattaatggcatccctcttcagaatgcgtctagtaactggtttcagccagatctcatgacaggaaatacaaactggatgcatcgcggcatctcaccagctgttcaaggttcatccagtgggctcatgattacccctgagcatgggcagtcgaacttaatggctcaacagtttggaccttccttgtacggtatgcctgttagtgggacaaatgcacctcaaaatgctttttcttccgttcagatgaacagattagctgcaccgcatggttctgcaaacaggagttactctctgaccaatcagccaacttcatttcttaaccaaggtgatgttcaggatagtcaaatgcaccctcgatccacataccaggagaaagcgttgttctcccagacatcagtgccagattcaaataataggcccaattttgaaaatttccagcaagatgattcccgtgagaggaacatttcagcgcaggataaattttgtcagatggaggattctggtccagcagaaaaatcatttatgaaagtgcctgaaaatatgaatgcattgcagaagtcgtcagcattagatcctactgaagaaaagattttgtttggttctgatgacaatttgtgggatgcatttggaagcagcactgatatgagcttgcaaggaaatcttatgtccagtaattctgacctattcgatgcatgcccctctttgcaaagtgggagttggagtgcccttatgcaatctgctgtagcagaaacaaccagcgatgacgccggtgtacatggatgggttaacagcaatactgtcccacatgcgaatttgcacactgatagtagagcccaggatttgggtgcaaaggcttcaaatccactaagtgagagattccacagtgattccactggggcagctgttcaacatttgcctgacaaggtaaataaagtttcagatcatggcctgtttgagaagcctatggctcaacttagtcaaatggctggtaatataattcattcttcaagtattgatgaacagaataatttgtgttctattcgacagaatgagggcattgaagatagatttggtatttggaaggctgcttccaatccaaatgtagctgctctgattgaacagaagaatcatttcacacaaaatccacaaagggcaagctatggatttggaatagccagtgcaggaaacgattctagtgcttctcgggatgtccagggcaatatccaacagcatttggataataactctgtggagaaggctatccctcaactgaaatcgagagacggcagtcagattcttgagtcatatgcgaggaataatgctggaacaaatgaaatggtaaatgcccgcgatttttctatgttgcctggtggaaaagagacacaatctggtcatgtcggtagtaggccctcgacaagtcgcaaatttcagtatcatcccatgggtaatattgatgtcactaatgaatcttgtcaagaaaaagtttctcatttgccaaccacattggagcaggttcctgtcggaaaccaagggtattttgggcaatcaaagtttcttggtcagtcggctatgaacatgccaattgacagggtaaatgtttccttagattttgaacatgtatttttaaaaatctgaatcccaatgaatattcttttggcttctccatggtagggacatgtctcacaaaacgacttgaattgcacaaatgaggcttttaatggcatgggttcagaaaactcacctagtacatctgcttcagctgacagaaatgttgataggtgtaatcaagtgaagagcgcttcgtcaaggtacttgttctttaatatgtgtgcttaaactattctctctttgaatgcgtttgtgaagttatttagctagtgtggccttttatagatttgtttttcaagtaactgacagagttaccaaactatgtaactattaaactatatgttctcatcacttttcatcgatatgtaattctgactgtggtcgttacgtagctcatattccctaattggttgcattcgtgctctccaatagcctttctgaatctttttcctgtgcagacaaactatgcttgagcttcttcacaaggtggaccagtcaccagataattcctcggaaacaaatgtttctgggattcctgaagcaaatgcctctgctgaatatggtggtcaatttcggcataatcagtcatctgcttctcaggggtttaatctacagttggcacctccatcccagctagctccctcacctgataacgtgcagttttctcggaattctttgcagccattgaattcatttcatactggccctgaaaaaggaggaacaagtcagtctaggtttgctccatgggcatctaatcaatcttatcagcaatccactcatcaaggaccatttcctggaatcttaggaggatccaacatgacctctggtttcccttattccagagggtatcaccaaaatcaacagatggctgttgctacccgacaatcagctgctaacaattcagtcgattcatcttctgagttgtctacccctcaagtgaaagaaagagatgaaagtagtgactttgatcaacgtatgctgtctgcttctcagcctctggtggcatccagctcgcctcagcagagttcctcttctggtatgatgtctgactcaccatccggtatttcagctccgcaacatcagttttggaaccagccatctaagcctcagccagttattttacgcccgcatccattgcccagcaacaacatggcagctagcttctcaaggcaggagaagacaaaccaattgtcctcccaaaatggtgacatgtcattaagtgggagggacatggtgaatatgcatgggttacagagtaaagatatgggtgcaaaacgaacatctaatgttgcttcaatgttctccaaaatggtgcagagcaatcatcaatcctttgatcgctctcttccttcaaacaacgttccaaaggatagcttacatcacgaggaacaaatggttggaagtggggagggcgatacatccaaggtgactgttgaaaatggtgattttgatcctcaagaggtagctcacaaaggggaacaacaatcaccttcaagatctgatggtttagttagaggtgggttaaataacaaggagtcagcgaatcacttgccgcatttaggccatactgtttctcagagtttctcctctaaaaatcatgcagcctcggttagagcagatcatcaacaaattagtcctcagatggctccatcctggtatagtcaatatggaactttcaagaatggactggtgcagcccatgaatgatacagggagatttacccccttgaaaataggagaacaatcgtctaatgttgagagttcggttgatggtacacatactgttcaatcatgcaagcagtgtcttatggagcaaatgtcgggctccgcaccaggagttgagactccctcatccgattcattgcttcatggtgctactgacaagcttctgaaggttgataaaccgaagaagcgcaaaactgccacatcagaacttcaatcttggaataaagaagtcatgcaggattcccaaaggctcaagacgctcaggtgtgtggcttatgcacactaatattcctaaaacaaatttcatatccgttaccgtattaaactttatatttttacagcgaggccgagattaactgggccagggaaactaatcgatttgctgaaaaagtgagtatcctcagtacatgttttctctatgctctttgtacaatgttgttgaatacgctgatggcttatgttctcacaggtggaatttgagactttacttgaggatagcccaccaattagatcaaagagaaggcttatacatacaacacaactcatgcaacaactatttagcccacctccggctagggtgatatctttggttgctagctcaaattatgatgttgttgcatatactgctggaagagctgcactaggagatgcatgtagctccagtagtaccgacaggagtgagggcttttcgcccccaaacaactcaaacccgtaaggatactttctgtttatctaagtgttggagcttttctagagtttgtggttctctattgacatgaagcgacccactcttgtgtaggttgtctgagagaacggaaaatgaaaaaatcagtgaccagtacatctccaaagctgctgaagatttcattagtagaacacggaaactggagactgactttgcagggtaaaaacctagctctctattataatcgattccagtttgaatggctactcatttgggctggttgatctcatgaacatctctggtcattcttgcaggctagaaaatggaactacaattccagacttgagagtcgaagtccaggatctagagaagtttgcagtgatcaatcgttttgcgaagttccacccgccatcttcatctatgaaccggaccgtgaattcacttaagttaaacctacaaagatatgttaccatagctccaatgcctcagaatattccagacagggtacaatgtctctctctctaactattcatggatccatataattcactttttggccaatcttccccattctttgctttcatatctatttccccaaatctttctatttttgggtgggtatgagttagttggtcggaatcctgagtatagtaaaggcctccgttgtcaaaaagcgggagatcctctactaaatatgtagcattactgtatgcatcatcagaaacattgtaagttaaatccatttgtatactttagtaaagaaatatcgctcagtacagtgccccagtaagaaatccagtaaacaagctaaaatatagcagtaagtggcaatttttgtttacacagctacggttctaaccacctctctctctctcaagtccttgagtacttttgtagaatcagttgtgctttgtataaaagtcactgaaacttaaccagaagctgaacttgtgaacacctttcgagatttagaaggtgactctaatttcttccccaaccaaagctaatatctcatccaccctgtaacaaatacgcaacaccaggttaatcagaatacactttgttcccagaattcgggaatgacgatggtgaaaatattttacctatgagtgtcgatgtttacttctgcaagccaagttgtcaagtaaatctgtggaacgagaagaattgaagttttacgatataatgctaacagacaattttacttgtgcggaatcaaaatccacatacctgcaaaatttctgcggttggctggttggtatgtgatatagaagaactaccgatattataatctttcactctggggagaactggcttagctacttccatagaatataaagaacatttggtgagatgatcaaattctccatggtaaagctcatctgaccaactgttgttgatgggttgaggaacttcagtgcttaaagagatcagttccattatgagcaatctctgttaatttccccgaaaaaaaagatcagaagctgatctagagtttaagatacatgcaggagttaggagtagacaatacctttagcattacttcgcgtttgaacatctccacaagctcctcagccatcttctctgggatcatttcaacatggcaagtaccaaactttagagacaacatggtaagtagttaataactattgaacattggttttatgggtctcttaccaaatgcagagacattccaaaaattaaacacaggaatgccaccgcaatctccagcatcatttgaatcttccttagtgccagagaactgtataagtgacccggtactcagcttcgtgtaacatctcagagatctgcttgcatttaccatctcaacaacaacagctacctgcatttttctacagttttgtttatagattccaaattacaccagaataaaatttctcaaattcacaagattttagcattgtcacacttaccatttccttgtacgaagataaaagcttgattcgataggaactctgaacataataagacttaatatgagaattaaaaacagagagaatgaatagaagacaaaaaatagatttgaaatgcaaattttcacctgttgcgtaaacagcttcttcaaagctttcttgtcgatatcaaacatgtcactcaacacaccaagctccatcattggcatatacctattgccatggaaacacaaaagcagtaagaatcaccagggacatcaaagtgaaacagagtaagttgcaaatacaaattaagaaaattccacacttttgtgacagatacgaattgactagcaaagtagcgtgagatcttcccgcagaacaagcgacgatccactgttgccgacaattcgacaggttagaccactggttcctaagattccgctgagcagctggtctccatagcctcatcgatgacgaaaaactccccggagatggagatgaagaagccagcgatcgcgaagaagacgccggagatggagaagcaggcggcggaaactgcgagatgctcatcgaatacaaaacgagttttttgagcttgagtcacactcctaaactctgttacgtcgccgggaattgaacggccggcgatagtttgttttctatttccacccagcttagggctttatgaagaaatacgaaaaggttacaattgtaattttcataaacttctgaacttgtttaaattaattttaattgtaattagcaattatgtctatataatagatcaatagaatctctaagaagaattacagtagatcagatatatatttaccaatcggagcttcagagagatccaaagagagagattgaggatgtctcacagtcacgggaacgcttcgtcggtgaacgatccacggcagccttcggcggcaaagccttacattccacggcctgtagcgccggaggatcttcccgttgactactccggattcatcgccgttatcctcggcgtctccggcgttatgttcagggtaaattttcatttctcctcttctgatcgttgctctgttagaaatcaattcagtcgtagaaactagtactccggttggtgacttagatcgtcggattttataagttgaactcaccgatttagcaacatcaatctctagctagttcgtgatgttttgagactggatctttccaatactcgctagtgattttgaatgttgaattgatttaaagcttacttccccaaataggcagattcatgactgtgtgattgcatcatattataagactagagaaaatgttagatcttgttgaaatttgagctcgagagattgagatagtcagtgtgaaagtggattaaaagatcatcatatgtggagtgagaaattcatcctctttatttatgtggcttgtgtatctctcagtacaagatatgctcgtggcttgcaattatattctgtgcacaatctctggccaacatgaggaacttggaaaatgatttaaagcagatctccatggctatgatgtatgttccttttcactcattctttcttcttatttttaagttaagagtgccaaaagcattgaatagtgaaatgaacctctctattcctgttaaaatccaacatggatcagatttaagctgattgtttctactcaataaattgttgactctgaatctggttttcttgtattaaaaacaggtttgctataatgggattggttacaaactacttagggcctaacagacccgcgacaaagaaataatcctcatgtcttaagagtagtatgcttttttttgataaaccttgtatggctcttgtttccgcaccagagattgctagtggtttgtctttgtgttttcgactctctaatccttgagtagcaaactagaaccttgagctcttgctcatttgtggagttcaaagacttttcagtccagatgcaaaaaatgtgaaatccgactttttctcttttgatctccctgatttttggaccctgcttcttacaacactgttacgcggactaacatcaaaaacactcctcaaaccaaacaaactcctcaatcattgtcactagttcgaatgtctctagtttcttgtttcaatcttttatatgaaactaatcaagaacaagagatttcatgttggcttatgtttttaacttccttatcaaatatttaaatcttctttgcggaataatacatatggaataatgatgtcgacttggcttccggaggtaaaatattgacactcattaaattagagaccttgtaatactctgaagcaaaggaagttaagtttcaatgactgattctaaacagcactcaacgacttgatagagagagttcttcagaatcttcgctgagtaaaaacaaaattagattcactggagttgttaccttgtggaatttctgttatggggcaaattctttactaagtatacaaatggatttgacatccaatattcgtgattaagcatacagtaatgctacatgtctactacgaaatctccggccttctgacgatggaggccttcactgttctcagaagtccgaccaactaactcttacccacccataaacacaaacattttcgggaggattggccaaaaagttaattatatggatctatcaatagttagaaagagagacattgtaccctatctggaatatgccgaggcactggagctacggtaacatatctctgtgggtttaacctaagtgaactcacggaccggtccatagatgaggacgattggtggaaacttgcaaaacgattgatcactgcaaacctctctagatcctggacttcgactctcaagtctgtaattgtagttcctttttctagtctgcaagaagaaccagattttcatgagatcaaactagcccaactgtgaaaccatttcaaactggaatcaaatacaagaagagagatctacagtttttaccctgcaaagtcagtctctagtttctttgttctactaatgaaatcttcagctgctttggagatgtattggtcactcattttttcagtttccgttctctcagacaacctacacaagagtggatccattcgagtcaatacgaaacctcgaagtctagacatttcccagtatttcagggataaacagaagatatccttacgggtttaaattgttctgaagcaaaaagccctcaatcctgtcagtagaagtggagctacatgcatctcctagcgcagctctagcagcagaatatgccacaaactcatagctagtaactaaagatttcaccctaccaggaaggggacgaaacagttgttgcatgagttgtgttgtatatataagccttctctttgatctgattggtgggccatcctcaagtaaagtcgcaaattccacctgtgagaacataaagccatcagcgtattcaacaacattgtacaaagagaccctgcaagaaaatgtgtaatgaggaaactcactttttcagcaaatcgattagttgctctggcccaatcaacctcggcctcactgtaaagaatacagaaaggttaaaatagtaatggatatgaaatcttttctaacaatagaactcataagccacacacccgagagtcttaagcctctggggacgttgcataacttctttactccaagataaaagttctgatgtgacgtttttgcgcttctttggtttataaacctttagaagttggtcagtagcaccacaaggcaatgaggcagatgagagagtctccactcctggtgtggagcctgatatttgctgcatatgaacaatgtaaccaggatccgcagtatttaattgctttgacgattgaacagaatgtaaaccatcatcagaattcccaaggttagaatatcgttctcctatcttcaagagagtgaatctccctgtatcattcacgggttgcaccagtccgttcttaaaagcctcatattgactaaacctggatggagctatttgaggactgatttgttgatgatctgatccagccgagactgcatgattcttgttgaagaaactctgagaaatagttgggccaaactgcagcatgcaattcgctgaatctttgtgattcaatccatccctaattaaaccatcagatcttgaaggtgattgtgtttctttcccaccaggcaacacagacaaatcacgggcattcacttgagtaagagactctggtgagaattttgatcgaaaactgtcacttgaattttcctttcctgagttccccatttcatttgattcagtcatgactttactaacgttattactcgcatatgactcaagaatctgactgctgtccccagaattcagttgatgaatagctttctccacagagttattatccaaatgatgttggatattttgctggatatccctcgaagctctagaatcatctcctgcaccatagcttgccctttgcatttgtagattttgagtaaaatgattcttccgttccatcagagcagctgagtttggattggaagcacccctccagttaccaagtctatcatcaatgtcctcattctttccaatagaacacgaattattctgcacatcaataccagaacttaaagattgaaacatatttccagccatttgactctgcggagtcattggcttctccaacaggccatgatctgaaacaatatttcctttgtcttgcaaatgttgaacagttgaacgggttgaatcagtatggccaccagaaacctgggccctattaccaatacgagaatctggatgtggggcattaatgttgttagcccatacagattgctgtttactaccccattcatgtacacctgcgtcatcactggctgtttctgctacagcagattgcataagagcactccaactcccactttgcaaagaggggcatgcatcaaaaaggtcagaactactggacataagatttcctgtcaagctcatatcagtactgtttccaaatgcctcccacaaattgtcatccgaaccaaacaaaatcttttcctctgttggatctaatgttgtcgacttctgcaatgtatttatattttcaggcactttcataaatgatttttcagatagaccagaaccatccatctgaccaaattcttcctgccctgaaatattctgctgaccagaattatcttgctgaaaactttcaaaattaggcctatcatttgaacctggaactgatatatgggagtacagattctcctggtatgtggatctagggagcatatgactgtcactttgattcagaaatgatgttggctgattagtgagagaggaactcatgtttgcagaaccatgctgtgcagctaacattttcatctgaaaggaagaaaaggcattttgaggagcatctgtcccaccaacaggcataccgtacaaggaagtttcaaattgttgtgccattaagtttgcatgtccatgctcaggggtaatcacgagcccactggatgaactttgaacaattggcgagatgccgcgatgcatccagtttgtatttcctgtcataagatctggttgcaaccaattattagacgcatcctgtagagggacaccactaatcgaaggatgtgattggttatcacttgagagacttccattgactgcgtttgaatgcaaagaattgagctgcctggcttctagctgttgcttttgaagttgttgttgaatttgatattcatgcatttgcttagccatagcgtgttgctttagtagttgcatatcattgaatgtcatctgctgccttggaaaaggttggatcatgccagggagctgattgtttaattgttgttgaccaccaaagaaatcatagttaaccggagattctcccatatcaaacctcataggagttttatgacggtctagagtgaatccactccctgataacctatccctactagattctacatccactcccacaaaacttccctcatttggagatgcctgcaacataaggtttccatgcatgtaaccagttgtggattgctggtgttctcgcaatacacttctggagtaatcggacctcattggctgctgggcaaaatttaaaccatgctgtgaatttgaagattgtcctctctcaggatcaactggaataagcaaaaaggctatgttcaaactcggaaaaccaaagcataatccagcatactaggctctaagctatgaatggaacataaatgatatatgtagagcataagttggggaagccccagtcacaaaggaaacaaaatgcataccggattgttgagtgctatacgtcttcagattggcaataagtgatgggtcaatctgcctctggttgctgactagaccatttctaaaaccggaccagcttccatctcctgcctgaggctgatggctgtcttgggataggccctcctgtccaaagaaattgtggatcctctctccatattcgtttccaggcatagattcagctccgataaattattataaatatctggacctcgagaagaaacagaaaagagttcaatattgtctctccttcgatcttatattcgaatgtaaaaaaaacaaaaaggaacatttttaacacctttttcccccgagaattcatgagctacttccaactaagatgctccgaaatccgaatgctcaagattttcctgttaaacaagcaaagcagatactgtacatttaaagttgaacacacaaagtgaaacaaaaacagtagatactattggttcacaagaaagctaaaacccctacgtctaagaaacactcagacaaagtctacgctccaatcagcttctgaaactatatcacactcaatatccacctgatctagtaaactcgagagctcatttgcagtaaatgaaatcaattaacaaaaaataccagctaaaattcccatttctccgcaataaaccagctgaaattaagctcatatattagaaatttacagaatttattggaaatctcgtgaacctacttgagatcaaaactgctgcaatacaatttcaccccaaatcgaagctctggttaaaatgaacattaccataacctagaattcaaccacacaggagaacgttccagactttaatcctaccgacaggctccaccaattggggaatttaaagaaaaaaaagatagggtttcaacaatgggaaagagagatgtgaacttacacttgtataacgtttggccgtaaaacaactggaaatttgcttctccgacctcaatttctaagaacaagttagggttttttctgaatccaagaattaacgaaatcaggggaagagagagataaagtgatcgaaactccaggttcgggtccgagaggttcgggtccacagcagatggctcgtagatccaaaactctctagtagagacggaggatttagatgagagttgttgtagtgtgggccagtgataagacaattataactaaacaaatacgacgccgtatcgatacgtttcaccatacgattaaattgcaataattcatgaatcattgttatttagatagtcagattaagatatggattcacattttttcaacgaattcatgttttgcatttcaatattatcttctttacataaactagggttgggcatatgcataatataatgcattacaaaagtcagatacgctttgttaaccgaaagtaggataccagaggtgatgatgtaatactatcaggccatcagggtttttgtactaaacaacttttctttactaaagtactgtttacagatgggtttaacttacaatgttatggtgatgcatacgataatgctacatatttagaggaaaatctccggcttttcaacaaatggaggccttcactgatctcagggttccgaccaactaactcgtgcccacccaaaaaaaaaatgaaagatttggggcaagagattatatgaaagcaatgaatggggaagattggccaaaaactgaattctatggggattcatcattggttagagcgagagacattgtaccctgtctggaatattctgaggcattggagctaccgtaacatatctttgtgggtttatcctaactgaattcaaggtcctgtccatagatggtgggtggaatttcgcaaaacgattgatcactgcaaacttctctagatcctggacttcgactctcaagtctggaattgtagttccattttctagcctgcaagaagaaccagagatgttcatgaatgaggtcaaaccagcacagatgagtggccatgccaaaatggaatcagttagctacggttaataccttgcaaagtcagtctctagtttccgtgttctactaatgaaatcttcagctgctttggagatgtattggtcactgattttttcagttttcgttctctcagacaacctacacaagagtgcgtctcttcgtgtcaatagagaaccacaaactctagaaaatctacaacacttcaaggataaactgaaaatatccttacgggtttgaaatgttggggggccaaaagccctcactcctgtcggtactactggagctacatgcatctcctagtgcacctcttgcggcagtatatgcaacaaactcataatttgagctagcaaccaaagatatcaccctagccggaggcgggctacatagttgttgcatgagttgtgttgtatatacaagccttctctttgatttaattggtgggctatcctcaagtaaagtctcaaattccacctgggagaacaaaagccatcaacgtattaacaagattgtacaaagagactcgtgagaaaacatgtaatgaggaaacttactttttcagcaaatcgattggttgctctggcccaatcaacttcggcctcactgaaaataatgtagaaagttaattacggtaaaggatattgaaagaaaaaaagggactattagtgctaatgccacatacccgagagtcttaagcctctggtgcccctgcatgacttctttattccaaggtataagttctgatgtggcggttttgcgcttctttggtttattaaccttcagaagttgttcggttgcaccatgaggcaatgactcagatgagggaatctctgctcctagtgtggagcctgacatttgctgcattttaaagtgctgtgacaattgaacagagtgtgtgccatcaactgaacttccaacattagacgattgttctcctatctttaagggggtgaatctcccagtatcattcacgggttgcaccagtccattcttaaaagtcccatattgactataccaggatggggccatctgaggactgatttgttgatgatctgctccaaccgaggctgaatgattcttagtcgagaaactctgagttacattttggccaaaatacggcatgtggttcactgattccctgtgattcaatccatctctaactaaactatcagattttgaaggtgactgttgctcccctttgggagctaccttttgaggatcaatagcactattctcaactctcttcacagtcatcttgggtgcatcgccctccccacttccagccatttgttcatcatgacgtaagctatcctttggaaagttgtttgaaggaagagagcgaccaaaggattgattattgctctgcaccattttggagaacattgaagcaacattagatgtttgttttgcacccatatctttactctgtaactcatgcatattcactatgtccctcccacttaatgacacgtctccattttgggaggataattgatttgtcttctcctgccttgagaagctaactgccatgttgttgccgggcgatggatgcggccgtaaaatatctgactgaggcaagggctggttccaaaaccgaagttgtggtgctgaaataccggctggtgggtcagacatcataccagaagaggaattctgctgaggcgagctggatgccaccagaggctgagaagcagacagcatacgaaatccttcagctgaatgtccacgttgatcaaagtcactactttcatctctttctttcactgcaggggtagacaactcagaagatgaattgactgaattaatagcagctgattgtcgggtaccaacagccatctgttgattttggtgataccctctggaataagggaaaccagaagtcatgttggatccccctaggattccaggaaatggtccttgatgagtggattgatgaaaagattgattagatccccacggagcaaacctggactgacttgttcctcctttttcagggccagtatgaaatgaattcaatggctgcaaagaattccgaaaaaactgcatgttatcaggtgagggagctagttgagatggaggtgccaactgtagattaaacccctgcgaagcagatgcctgattatgccggaattgaccaccatagtctgcaaaggcatttgcttcatggatcccagtaacatttgtttccgaggaattttccggcgacgggtccaccttgtgaagaagctcaagcctgcacaggaaatttctttcagaaagacaattgcaaagcacaaattacaaatattcgtagcaattaccacgagtgagaaattacatctcaatgagaaaatttgagttttaggtaactttgccagttgattacacctatcaacactaaataaattaagttacaaatgaacagtaccttgacgaagcactattcacttgattacacctatcaacactcctgtcggctgacgcagaagtactcggtgaattttctggacccatgcctttaaaagccttatttgtgcgatttaagtcattttgtgaaacatgtccctatcataatgaaagccaaaataatgttcagatggattcaaatttctaaaccacaatgaaaaccaaaggataaaatttaccttgtcagttagagtgttcatagcaggctgacctagagactgtgactgcccaaaacgagaaacttttcctcgacaaggttcatcagtgacatcaatattacccatggggtgatactgaaatttgcgaggtattgacggcctaacaccaacatgaccagattgtgtttctttcccaccaggtaacgtagacaaatcacgggtatttaccatttcatttgatccagcattattactcgaatatgactcaagaatctgactgccgtctctagaattcagatgagggatagccttctccaaagagttattatccaaatgcctagaatcgtttcctgcaccagcaatgccaaatccatagcttgtcctttgcattgaaggattttgttccttcagagcaactaaatttggatttgacgcagccttccagataccaagtctatcctcaacaccctcattctttctaatagaacacgaattgttctgcccatcgacaccagaacttgaagaatggaaaatattttcagccattagattgcgttgagccattgaattttccagcaggccattatctgcaacactatttcctctgtcttgcaaatgttgaacagctgtccgagtagaatcactgtggactctcccgcttagtgtatttgaagtctttgcacccaaatcctgggccatattaccacgatgaaaatttgcatgtgggccagtactgttattagcccattcatgtacgcctgcgtcatcactggatgtttctgctacagcagattgcataagagcactccaactcccactttgcaaagaggggcatccatcaaaaaggtcagaactactggacataaggtttcctgtcaagctcatatcagtgctgtttccaaatgcctcccacaaattgtcatccgaaccaaacaaaatcttttcctctgttggatctaatgctgttgacttctgcaatgcatttatattttcaggcgctttaataaatgattgttctgatggaccagaaccctccatctgaccaaatttcgcctggactgaaatgttcctttcacgggaatcatcttcctgtaaactttcaaaattgggcatactatttgaacttggaactgatgtctgggagaacaataatttctccgggtatgtggatctagggagcatatgactatcctgtacatcgccttgattcagaaatgaagtaggttgattagtgacagaggaagtcctgtttgcagaaccatgctgtgcagctaatctgttcatctggctggaagaaaaggcattgtgaggtgcatttgtcccactaacaggcataccgtacaaggaaggttcaaattgttgagccattaagttcgcctgcccatggtcaggggtaatcatgagcccactggatgaaccttgaacagctggcgagatgccgcgatgcatccagtttgtatttcctgtcatgagatctggctgcaaccagttactagacgcattctgaagagggatgccattaatcatatgtgattggttatcacttacgcaacttccattgactgcatttctattcaaagaattgagctgccttgcctctagccgttgcttttgaagttgttgttgcatttgatattcatgcatttgcttaaccataacttgctgcttcagtagttgcatatcattgaatgacacctgctgccttggcaaaggctggagcatgccagggagctgtgtgtttgattgttgttgaccaccaaagaaatcataattaactggagattctcccatttcaaacctcgtaggaattttatgaagatctggagtgaatcctctctctgacaacttatccctactcgactctacatccattcccaaaacatttgcctcattcggcatcgtctgcaacccaagattcccatgcatgtaaccatttgtgggttgctggggttcttgtaatacacttctggagtactccgacctcataggctgctgagtaaaatttaaaccatgctgtgaatttgaagattgccctctttcaggatcaactgaaataagcaaaaaaatctatgtttaaaaagcaagcaaccagcatactaagctctaactcttaagccatgaatgaaagatatatgtagcgcataagttgggaattccccgtcataaggagacaaaatccataccaggttgttgtgttctataactcttcagatcggcagtaagggatgggtctatctgcctctggttgccgactagaccattactaaaactggaccaacttccgtcaacaacctgagactgatgctggtcttgggataggccctcctgtccaaagaaattgtgggtcctctctccaaattcgtttccaggcatagattcagcttctagaaattatttttaaatatctggacctcgaaaagaaacgaaaaatatttcaatcttgtgtctcctttgatctaaaacaatcgttgttttctgcaaattaggaaacaaaagtgagtcaaatgaaaatcatcggacaagatcctcaaccctgattcagtttaagacaagaaagtttaaatcttcacgcaggaaaaccctcagaccaacgaagcgagacaacgccgaccaggtgataaggaaagctgaatcagcattgtttccttaaatgaaaaccgtacattgacatccaaggtccactaagccaaagcctaaactccaactcaacttctgaaactataacaaactcaaatgcacctaatccagtaatctcgagtattcatttgcagtaaatatcatcaagatccttatacaaaaaataaacagtggaactctcgcatttcacagctataaacactctatggcagctgaaaaataagctaatttcgaccaatttctagactttatcggaaatctcgagaacctactctgagatcaaaattgccgcaacacaatttcacccaaaatcgaagctctggctaacacgaacattaccataacctagaattcaacctcaaacgagaacctatcttacttcaattttaccaacacgctccaaagaattgggaattcacacatcattttcctattgggacattacacaaaactagggtttctactaagagtaagagagatgtatgcagacttacacttgttctgtcgcgtcgacaacaattggaaagcctgacaagctttcttctccgacctcaatttctaagaataagttagggttttcgaatccgataattaacgaaaccaggagaagagagaaagagagataagtgatcgaagggagtacgaaaattttcaacggcggacgcaggagcaaatccgaggctcgggtccggaagataaatttcaggctcgggtacgaaggagatgggtcgtagatcagaactctctttcaaagacagaaggttagactagttggttttggggcaagtgacggaccatttaattaactagggaaccacctaagatgttaaaacagcatcgtattgatgtgtttccacatgacaatcttttcattacattattaaaaaaggtagatccgatttttataatcttttcataagactttcctagtcaaattatagatactctttgactaactttaagtaagattatggcatcttttataacttactgccacattatcacatacttttgaattgttataagggaaatttgtctttcttggaaactaataaaccgaatattgttgctgataaactgtaaatttcaggtcaacactctcttatcatagtataatataaatactttttaatataaattagaatataactactttcatccaaaaaaaactgaaaagtagaatataattactttcatccgaaagattttgctttataagcctaattgcaaccgtttctgtttcttgggtttataacggtcctgctcggctgctcattcatcttccagcgtttgaagtatcaagtatggagagagtttcccttaaactttgtattcttttggtggtttacgcataatgagatatctcatattgttttcaacatcgtttgttcatgagtgacgagtcatgacattagttgcaacagtttttttatgaacgttttgtatattttctataagaaggtgaaatttatttacatgcaaaagtatccgacagtcacattttgatatcttagcactatgtttatttattttgagcgaaaagtatttttacaagatttgcttggttcgatttccatgatatagatttggaactttagtttaaccgacaattggttgttaatagtgcttgttttattcttctacatataaccatgttcgaggtctacaaaaggcatcgagaaacaacaattttcaattgtcaaatgagaataaggttcaggatcatagggtttcgtggttattacatagggtttatatgatagcttagacgtttcgtggatgatgatgacgatcaagcttcgtatataagtctccatgatatgagaaagaactcgtctgatattattaaaaatcttcgtaaatattcgattatgctaaaagaaatttcatatgaaccaactggtaactgtcggtcctaaaaaaaggctatctcgacgtacattttttggctccttggtaggtagttttgctcaaacaattgacatctttgtggtaaatcttgagcctcattagtttgtgttttgacttttgtggtagctttctttaacctgatattttgtcttcccctttgtacgtaatcaagttaattgaaatgaactgcagagttttgagaattacgaattcttgaatcattgaatgacgttgtttccgtgttgttcaatattgatagtcgttgtctatagcagtaaatccagaggtttgagtttctataaaactaaaatttatgtgatttgcctaaaacctgaaaccgaaccgaaaaagaaaaccaaactttaccttcttgttctggtttaacccatttacttacggtacctcgacaaatatggcaagtcattcttcttgtttttctctgacgtattagtttgattccacatcttcccacatgcaaattattttaatttttagagatacttttaatttgtaataggaattaatatattgacatgtcacatgatacatttattagtccatgaagatatttccatctcctagtatactgtcatcattggtcatctttacctaaccatcctattactcaactttcaaactcatctgcgagcctcctgcttacacgaagctgcaagcctgcaattcatatatattatccttgctattttgatattttcttaagacaatttaattacattaatatatatatgcatatttattgtttttgtcagctccttgagtacctttttgggggccctcttttcgttatggaaaacaaaacaaaaaagttgtttatgatatcaaatgcggtgtatagtccacaaacgtggcctacttacccaaatcccatccgtcgccatctcttgcttttcaatatataattacgattggaactgtgacaaatatgcggttctctcctttggcatatatgctgtgtttacatgcatttattttttacatgcatatttatcatataaatccgggatagatttcgaacgacattgagattaaccttcgagagttgttaatattcaaaagtttgatattcttttacatgcatgatgttgcttaaatctgatagttaataatacagggcccatagttgacagttatgtgctaggttgaataattgccagttggcagttgccactttatgtttatgtacgtgtacatcatgcagttcaaaaccttcgagaaaaataactgtgcgtaattaaaggacaaaactaataaagaacatacaaactataataagctaaaattctggaacaagtataaacttaccaaaattgtattctactgaccataacatatcatccaacattatcaaccacatatcttacctaccattctcgagtttactagctaccacgattaacgaaaatatatggcccagattttccgaatgatcagctagtactacttgtcatttgtcaagtatagctgagtttctaaatggtgatttgtattataaaggattataattaattatataataattaaattactaatttagttgaagctgtaaagctcgcctaggttgtattgtaagtatccgatccttacgaaatttgcttaaactagattacactatattacataacggtacaagattcaaaaattattactttcaccaaacaatgtgcttgttggttggagtgaatttttgtgattaaaaagtttataatttctttgttgaaaaatcttatcataagattatttatgtttacgcttgtgaaatcatggaatttataccccttaattatttatatgcgtgttgacaaaataattggagtgtaaattttaatgattatctacgtacagtattattacaacaaaaaagcatatgtgattttggattaatcatgttatgtatatgtatgtatcttcacatatataatattataacttataagttttatttatttatttattacaacttataagatgttctaccttatgttagtgacttggcttaaccggaaaatgttcatactcaactcacgttctctagaagatagcgctacctttcacagcttatcattcaaatcttacgaacccaaaatctcacttaccagtcgactctctccctttcgcttgctactttttctacataaataaatgcaatgataaatttgtgcacacattcgtatgtttgaaacatggtaggatccacaatttatactttatagactcaaaatggaaaagaaacgtacattataaatttatctgcaatttgttttctcttgctaaactagactgtataataacctctgtatatgctattactcgattgtaaacgtaccccgcaagtcgcaagcaaggtaaataaagtataattatattttcacacacgaaactttaattattatttttatcacttgcagattaacagtaaaaaaaaaaaaaaattgtgactttaacggcgacaaaaactactgatctttctccaatatttaaataatataattaataaacgtcttttcatacttgtattttccgacccgagttctgaaagtgaaaacatatggtactagatattctcgatttgttttgtagccactagactctaaacagaaaaaagaagccaaaaggacaacgttaaaaaagagacactgttattaaaagttagaaaccaaacggtgaaaatccagctacatacataaaataaagccaaggtaccaaactaatgaactgtaacctcttttttcttttcttttttgttaaaggatttatgaactgtaacttagaatgcttggtttgtgggcagtgtaatatatgacacacatgcattttttttgtttgtcaaataggaagacttcttttttctttatcaacttccttattttcataaaacaaaacactgaaaaaagtacagatgttctcacgtacgtcacgtgtacatacatatatattagaccactatataataagatatgaagtgttaggtttaaatcaattaacgaatcccatccaaatgatgaaacagttaacaagaaatcaaaatagtttattagggttacaatgattttatacttttaagaaatcttagaacctatcacttacaaatgagtaaatgaccattactcctcgagaatctaaggcgcttaaggaagcattgcgaatcgggtgtgaaaaagatctatttttgaattatttcacacaatttcttaatgtcaattttcgatgctcccatattctccacggtttaaagcaagattggtgggaaagggatattctcgcatcgattacaatgaaatatgggttgaaaaaaaataaaaaaattactcaatgttgcaccaaaaaccagaaaactctaagttgcgctaataaaaaaaaaagttataaacccaacatcaaaccaaaaccgtactaaactgtcccatatgagatttagctttaaataaattagtacttctcataacgataactaaattaaatttccctagccaagacatacatatagttttgattgacaaaaaaaaaaaaactcctctatttatagcttgtgttttgtttcctcatttttcacttaccattcaaacccaacactatggcaactctatttctcacaatcctcctagccactgtcctcttcctcatcctccgtatcttctctcaccgtcgcaaccgcagccacaacaaccgtcttccaccggggccaaacccatggcccatcatcggaaacctccctcacatgggcactaagcctcatcgaaccctttccgccatggttactacttacggccctatcctccacctccgactagggttcgtagacgtcgtggtcgccgcttctaaatccgtggccgagcagttcttgaaaatacacgacgccaatttcgctagccgaccaccaaactcaggagctaaacacatggcatataactatcaagatcttgtctttgcaccttacggacaccgatggagactgttgagaaagattagttctgttcatctattttcagctaaagctctcgaagatttcaaacatgttcgacaggtaaaacaattataaacggtattctcattttctaacgctatagctcactggcctgtaatcatgtcatttcaatgttttgactttttctttatatatacataattataatttataattgggatttcaaaccctatctctcactatttcaagactagaccggattggaatttgaacttttgtaatgaatattagtatctgcacataaattttatgttaaagttgggttttcttaaagtgaatttatatattaaaaatatataaacgattgggttttactcaaatgaatttacataagagctaggtataagtgcaaatatgcaatactgtcattgtcgtggatgtataaaagtatgatctaactttgatgatgccatggaaaaattggaaagttcagatccagaggaaatattgcttgaattataaaatgtatggaccacattgtttccttaaatggaaggtctcacgagtttctcaatttcagactactgataatatatgctattatagattttattttctaattattttttttggtttaatttaattagagtaaatttttaaaaagaaatatatggttttgttaaccgtgttttaaaatttgatagagcttttagatcataatcataattttttcgtattaattgtgattatgttggacgaaaatacttaattagtattcaagaaaacttttattctaaaaacagaataaaataaattttacaggaagaggttggaacgctaacgcgggagctagtgcgtgttggcacgaaacccgtgaatttaggccagttggtgaacatgtgtgtagtcaacgctctaggacgagagatgatcggacggcgattgttcggcgccgacgccgatcataaagctgacgagtttcgatcaatggtgacggaaatgatggctctcgccggagtattcaacatcggagacttcgtgccgtcacttgattggttagatttacaaggcgtcgctggtaaaatgaaacggcttcacaagagattcgacgcttttctatcgtcgattttgaaagagcacgaaatgaacggtcaagatcaaaagcatacagatatgcttagcactttaatctcccttaaaggaactgatcttgacggtgacggaggaagcttaacggatactgagattaaagccttgctattggtcagttttttgacaattaatttccttaaaaatcgtatataatgaaagttagattgttttttttggttgtaaatacagaacatgttcacagctggaactgacacgtcagcaagtacggtggactgggctatagctgaacttatccgtcacccggatataatggttaaagcccaagaagaacttgatattgttgtgggccgtgacaggcctgttaatgaatcagacatcgctcagcttccttaccttcaggtaccgttaacccaaaccggaatttggaattgttttggttagcgagctattgttgttaatccggttttggtttaaaacaggcggttatcaaagagaatttcaggcttcatccaccaacaccactctcgttaccacacatcgcgtcagagagctgtgagatcaacggctaccatatcccgaaaggatcgactctattgacgaacatatgggccatagcccgtgacccggatcaatggtccgacccgttagcatttaaacccgagagattcttacccggtggtgaaaaatccggcgttgatgtgaaaggaagcgatttcgagctaataccgttcggagctgggaggagaatctgtgccggtttaagtttagggttacgtacgattcagtttcttacggcgacgttggttcaaggatttgattgggaattagctggaggagttacgccggagaagctgaatatggaggagagttatgggcttacactgcaaagagcggttcctttggtggtacatcctaagccaaggttggctccgaacgtttatggactcgggtcgggttaaaatttaactttgcttcttggacaaggtatatggcttgcacgaaaataaagttttaaaacagcgtagtttgatccggagttagctttatgtaagaacgtgtaacgccaaatcaagtcattattaaatattgtgagttgtttgtaacctatatataaatcttgaagaggaagatttcagaaatcttgaatatgttttaggaaaaacattgttttttttacagtagcgcaagttgaattaaaacctattccttacagaaccaaatgcattaataattctagatatttttggccaagacaatcagatttttcaatatttcatatatactaggtggaacaccaccacctgcaactctgcaacacatgttacgttacacaatcacttttggcggttttcaattatttatataaaattgtaaatgtttgtacacagtagaaaattagtaatagtgaattttgtttctccgaatatgtatagcaatatatatggcatggatcaaactagccgacatcctaacttgttcacagctttcctttttacttatctagtcgattaagcatcagaaagtatgttttaatttttaaatttgaaaaaggtgtacttacaagttcgggtgttcacacggaggagagctacaataatgaaaaagctgactcaagaagggctatagaagaaacaagagtcacggaacaagttgtcactctcaatctccagtacactagcttccataactctctctctttcttctctctctaaaagttatcagaatagaaatctctctctctcaacaagtctaacagtgccatttgtatctctgaactccaaccatggctcctctggttctctaccttctcactctcctcatggctggccataccagtaagaactctcactgatcttcttcacctttgtttatggatttggtctctcagtctcactctcgcttaccctttcacattcagctctggctctctggtttaagaaacccttaatctacaaagcttgctttcctcgcaaatgaactaccttacttatctcttatgcaactcttgttgatgatttgcaaacatcttaacctctcgaaacaagatttacaaatcttactggcttcacttacaattttgttcccatttttttcttctttggtaggtgcctcatggtgtgtgtgcaaaacagggctgagtgactcagtgctacaaaagacattagactatgcttgtggaaatggagctgactgtaacccaactcacccaaaaggctcttgcttcaatcctgacaatgttagggctcattgcaactatgcagtcaatagcttcttccaaaagaaaggtcaagcttctgagtcttgtaacttcactggtactgccactcttaccaccaccgatcccagtaagttttcagaaagttgatactcttgtgatctttagaaccctacaaaattttgagtctcagaaagttcaagttcaaggtcttttgattagagtactaaagattcaagtagattcaagtagagatattttttctctgatgtgtgattttttggcacaggctatacaggatgtgcattcccttctagtgctaggtacggctctttgcttctctacacatttattttcttaatggctttatctagaaatttgaaggataccatttatttttttttggacaaagaaggatagccatttaatactacacttcaatgttggattaactaacttattatgcctatttaatggtctaaactttagataacatctacaacaattcaattatgcctttttttggggattgtataaagtttgaacctatggttagtgtattgacttgcgcgtctctttgcaacggttttatcttgttgctgtaagctattctttgaaaacacattaatgataaataaattgaaaagtatagagatggcaattgtttcaaaagctaatctttctgtttgataatactttacatgaaaaacaaaaaattaagaatagtttcaaacaatacaacttgtttaccttgtcctaacaaattcaactcaaatgacatgtgtttgctttaaaatagtaacaactgtaaattcatttgctcttgaaacataagtgcaagctaaagataaacgcaaacaatacaattaggcctaattaagattacgaatattgttgtttgtttatagtggttctagtggaagcggtagcaccaccgtgacgccaggcaaaaacagtccaaaaggaagcaacagcatcaccacatttcccggcggaaacagtccatactctggcacaccatccaccggcttattaggaggcaatatcactgatgctactggaaccgggttgaacccggattactcaaccgaaagcagtggatttgcgctctattactccaacaaccttctgttaaccggcttttgttctctcgtgatgatgctctgaactgaagaagaatcactgtcttcttttagtttatgcttagtcaaaaaatatgttatttatatgttcttgttgttttagagataatttaatctggatttcggttcttttttactttccggttttaagaaaacacttatcaatgtaaaaccaaatctactatcgatcggtttggtacgaattgtttatcttttgactaagatttttcttctttttggttcggattgggtctaagaaatttcgaaccaactaaaccacaataagatttactggtctagaaaattcattttagttaaccggattgatacgaataaaagcatctcggtttggttttagtgtggttttatttgggaaacactctgaatgaatgagagtgtcccctcggtaaaatagaaataaagtaaatgcttacctataaggggttggacttggaagaaaactgtattcttctacttcaagaacacaatctcttcttctctttctcttgtttcgatttccataccatatatatttgacaaatccatcgacttaatttgaagacagaaaacgatggagaatccaaccgtaagatcattacagagacttgggtttaatccaatctgaagacatgtgtttgcaaataaaaatatccattttctttatgtttcttggctttctttggtttgaatctttgagattttgaattgtaaattttctcgattggtgaaaaagtttttgatctgatgagtttctacaatcaatcttgattatcctctaatttatttatttctggaaaccaattgttttttaagaagattttgcaactatttgattggttcagtaaagaaaacttgagaattttgttgttaaacgattatttcatgagatgatctcaaatattatagggattatttgattaaactcatcatcttatgatgattttcttgaaaacccctcagattcagaaaaattgttaggcatgatcctcatgctttcattgctttcgttataaaaacccaactgtttggcgttgatgattccatgctgaattcacatttgcgattgattaaaacttgtatacgtttttgctgattttactcgattttctgttacacagggaccttgtcaggtatgtggggatatcggctataaggatttgataatgacttgtttcaactgcagagaagttagagaacatatgtatgatgactttcctgccctatatcttttgtagaatactctttttttacatgattatgattatcattcttttcaataaatctttctcttttgtgtatacagttattgcgcagcagtcttgttacgatctgtacccggtatatggttatgtcaagagtgcagaacctcgactcgcgtgttacagatatcgcatcatgtgaacaactcaactaatagcggtaagaaagaaacttctatgccggttcaaaatggtggcttgagacttcatcagcctcctcatgtacccatgttgctagcacaatcatctactaataaaggtgatcatataaagtttatgtttatgtttatttaagtatagtgtgtttaggattatggatgatcgtttatataatgcttatttactgaactaatctacatgaggtgtctttttcatagcttctttggtgcccaatgatacatctccaatcaagaaacaccgaccaccttttttggcttttccttctccaaaaagaaaacgtaggacgcttcggcttgcaggtgaaaaccacaagttgttatttgattcaatttctgctagaaaatgagattatgatattgtgcttgtgtattaatgtcattttctttggtttctgttttagaaggacataccgaagaaactaaacgtcaaagctcacatccttaagtgtttcgtcaaattgattaagacatgtgtgttaacttctcctgagcctctctttgctttaagttgcttaagtgagtgcatctgtaattaagatttttagggtttcatcttccttggatctcaagttacttacaagctatgtgagattggacttactgacatgtgacttgctcactttgacattccttctttcttacagtgtatcctgtatatgactcattgttatgatatccatcatatatctttgtttaacgcagaaaatttgtatttagtttagcatttttattggtgagctcccatatgatgtgtagaacctgctaatttgctaaagaaaatgatgatttgatttgttacgaattagacaatcaatacatgttcccagcatttgaattttgccggatttaaaaatgtttttctacttagaaatgatgtaatctaattctaaattttaaattatcccgcgatttttagatgaccgttagaatttggcattttcatatttggttatagaaacgagacacgtcaaatttcaatttaaaattttaaaatttacgggatagaaaaatattttttttattattttaaataatgaaatataattataaactatcccacgatttttaagatgaccgttaaaatttaggattttcataattgattatcaacacaagacacctcaaattttgattctaaacttttgatttaatttattcaattctaaaaattaaataacttctcatgatgacaaacaacattaaaatactatataattgtgactttacggtaatttctagtgataattgattatgtaatggcaattaagacttttatgaaacaaatatacactacttccatatttaatttgaaattttcttttgaaaatttctctccgtttattttttgaaaagttcactccttatgtagtttttatgagctttatttaacatttttgattttatttatcaagtactaccatttttattaaacttcgtgatatttaacttcaagttgcttagattgtcttgtttcattttcaaaaatcttaaactattccataaaatcctacataatttaaattttgattattttaattttatgaaataaaaatttaatgtacattaatgtatatcatagtgagagctatctatgacatttgtcaacaagttaattacttttctttatgacatttgtcattatatttttggtttgtgcaaagacatttattgtttaattgatttaatactaaatcggcattgtaataaaatgacacataccgtcaaacaacatttaacattgtatgaaagcaactatgattcgcgttgtgctgattttttttttactacatcttattctcgtcaaaaactatttatgatacaataattaatgaatatgctactataggtttgttatcttattttcattctttcacaaagtttacaaccaattgtagatgtaaaaatgtatgagagctaatagactatttatgtttaaacaaagcctagaaattgagggtaaagttgtttgtatttcttatggagttatggtagattagtaaaagaagattagtacatgaatggtgaatctaaaacttaattgttttaaaataaatgagttaatatacgaataaagttaatttagtagatataaaaaatatgcaaataatcaagaaaatatcaatagaagtctagtagttagttttttttttttaccaaacaagctgtaaataaagcacaaagtaattttgaagatgtgtaaaatccgagttatttgataaatccgattgaaaaacaacacttttctcttggtaaaagaaactataccgaaccgaattgagactttatatggtttacgtttttcgaaaaccgatcaatcagaaaccaaataaaccgatataaaccggatgtttttgatagtcttcgacagtgacccttagcgaattgttttttttttattggttggaaaatagaaattccggtaacctttggtagctcgtacggcttcttcacaaaattgccggcctatgaagatcatttccttcatttaaccctccaagctccagattatccattgctgtactcacaaagctccaaagtcttgttcttttcttctttgtttctttaattactgctcatgactatctctctgatggaaaaagtcgaagcctttttctgtgtttctctaacgggtattgattgctaagtacttcgatttccgcgtagtatggtacatagttgaagtttgagaatttgggttttgttctctgatattttaactttggtgggtagcttttatatgcttattatagcttctttcttcgaaattgaaagcttgagcctttgattctaaagcttggagtgagttcgtttggattgatgcagatgttgtcaatgagggttagtgtttatgtagttggattggagaggatccaattactcttttgattgttgaggacgaagagagaagaaatggatctatggttaatcgcagctactgctgctacaggatatataaccaagcatttgcgaaatgtatccaaaggtaaatcttcttctgaagatttgactaatgtgaagctagagtcaccgagatgcttggctagtaatgtagtaagagttaaaaaaccaaaagaagaaaactttgaggattgcttaaatggggaaactcttgatctatatgaatgtggcaatgcatatggagtggaagtagcttcgaataatgaggaggatttgggatatgatgatgagattcgttcaggttcttttgggaacagagcgtttcttaggagaaatcagtgtcctatcaagcctttttctttggagaaaagcattatgtctcggttacatagagagaaaatatccatggaggaatatatgcgtagtccgtttccatcaccttgtggttcagtttcgaggcccttgcttgttactgatggtacaaatgtaattagcaagaatactggagattctgttagccagcaagtttcggaatgcgggattcctcagcttaggaagttgaaatcttcacttctttacgctaaaaggggagttggagatgcgaagagcgtgagtagaagatctgataatgggactggtaaaattcttgctctctttttaaaatgttacatttgtttatattgacaaaggagaagacttaacatgttatctttcttttcaggatcaaatgatccagtgttagtgctatgcgttgggatttcaattgggataatgtcatcatttgtagctaaccaaaccgaactaaacaaagtcagagcagagtcaaagcagacagagaatttgggaaaagagttagaagatgacatacacgatggtgaaaaacagtgtgatgaaaagacagcagagaattcagaatctataagtaaaattgaagcagaacttgaagctgaacttgaaaggctggagatcaacatgatttcctccaacattgagacaaaactctcagatgtctttgaggtgagctttatactctagcttttgctttttcctttcctttcactgaatcattgtctcattttggtcgatcatgtctgttcattctggaagttatcccgcagcactaatgatcctgttttctccatatatgaaaattgagcaaaacagatatttgatcataagactagccattgtttaatcatctatagaagttcagcttgtaaattgtttctcaattctgcagctggagccagatttcgaagtagaatttgcgcagggtgagctgagagatgatcaggttgaaagacagcgttttgatgaaaccgtgtccaaccaggaacggagtagcaattccacacctgaatcaggaaactacatagtctcacctcgtgagttaagcttgcgtctgcttggagttatcaattcatgctatgaaaaacggataaaagaacttgagaatgccttacaagagagtcagaggaaagtggagcagctggtcatagaatcagaggaaaagaagaaaccattgtcaaggatttgggaaacccatgaagagatgaaatataagaggggctcaaatcctccagtttctgtagctcatatagagaagaaacataatcctgcagagatccaacctctggttatgactttagaaggggaagcacttgacgcattcaatgaatcttacgaggaactgatggatattaacgactattcagaagaagacgatttacaatgtgtgatgcaggagaatgagcggcaagaagaattgtctttgacgagcaaaagctcaccttggagccataaagattacataaaggattcttcaagaacttcagaggatgtgaatttgtccatgctgcaagatctacttggtctgagcgacgaagaagaagaagaagaagatgagatggagaagcatctgataaagcagattgttgagaaaacaaagcaagggtcttctgctgtgttaaatgcccagaaaatgctattcctcatggaagaaatacaaccaaatctataaaaagcatttactcaaattctcatcattttttgatgaaagtattacacgtctctagttagtgtgtgtgtagatatgcaaagattggtgtaacttatcttgtcatatgcaaagaaactgaagagagaagaagatgtgttgtcaaattcaatgtatatatcttaagaccagtgtcaaagcttaagatgtgataatctttaagaccatctccaaaactccgatggagatgctctaagtttttctggcagaaagaagagtcttttgaaacctgctggttgggtcagagagtttgagagaaggcgccaaataaaccaaaagctagacaagaagaagcggtgaagttttgaaaacgagaataaaattcggcgggaataattaacgaaaaatctaatagctcccgcgcaaatctttcttttacaaaacaaaaccattttgcttcccatttcctgtgaattctaaagagaaagaagagatagagctagagattaagatagagatggagaactcagtgacccaagatggtatcgcgacagtattagccaatcaatcccttgattcctcctctgttagacccgaaattgttgttcaagtcgtggatcttaagcctgctggaaatcgatatacgtaagtttcgatcttgattttgtgtgcatcgatctgggttcttctgatatgtttagaaccaaacttgttatagaatagggtttgagatctgggtattgttagaattttgccaagtctcagtttttttttttttttttttttttgggatctagtttcaggtctgtgttagctttaatcaaattcaatattaactggtcgatgaagtatcttgacatgtgatttgggttctcaggtttagtgccaatgatggaaagatgaagattaaagcaatgttaccagcgactttgacttctgatatcatctctggaaagattcagaatctgggtcttattcgtctccttgagtataccgtcaatgatattccaggcaaatcagaagaaaagtaataataataacaatctcttatgcatctttcatgattaatgattttcaagcaaacagaaactaacctttgttttctttatttgccacttcagatatatgcttataacaaaatgtgaggctgttgcttctgcacttgactcagagattaaggcggagattaaagcttccacaggcataatgttgaaacccaagcatgagtttgttgccaaatcagcttcacagattatcaatgagcaaaggggaaagtaagtatatctttttttaacttctgtttgtttcatagtctctgtcgaagttgttgtaaatgttgcttaaacaagtctctgtggtttttgtagtgctgcacctgctgcaagaatggctatgaccagaagggttcatcctcttgtgtccttgaacccttatcaaggaagttggactattaaagttcgtgtcactaacaaaggagtcatgagaacttacaaaaatgccagaggagaaggatgtgtgtttaatgtggaactaactgatgaggaagtaagactaatctgatgatttttctatggttctggattattgtcttagactttatgtggttattgatttttatttacttatggaaatccagggaacacagattcaggcaacaatgtttaacgcagctgcaaggaagttttatgacagattcgagatgggaaaggtgtactatatatccaggggatcacttaagcttgctaataagcagttcaagacggttcagaacgattatgagatgaccctaaatgagaattctgaggttgaagaagctagtaatgaagaaatgtttacccctgaaactaaattcaactttgtacccattgatgagttgggtacatacgtgaatcagaaagaccttattggtaagagctgttatctatattgaactctttttgtttgtaaacattggtttatgatgaaacttagttagtgactttaatgtttctcatttccagatgttatcggtgttgttcaaagtgtttctcctaccatgagcattagaaggaagaacgacaatgagatgatcccaaagagagatataactttggctgatgagacaaagaaaactgttgtggtgtccctttggaatgatctagcaactggcattggccaagaactgctggacatggctgataatcaccctgttatcgcgattaaatctcttaaagttggagcttttcaaggtaaatctatacttttcattttagtgttaatgctatatatgcattatgttaaaccgggcgctgatgcaaacctggatttctaggtgtttcattgtctactatcagcagaagcaatgtggtgataaaccctaattctccagaagctacaaagttgaaatcttggtatgatgctgaagggaaagagacatctatgtctgctattggttctgggatgagttcttctgccaacaacggatcaagatccatgtattctgacagagtttttctttctcacatcacaagcaatccctctttaggcgaggagaaggtacttcaaaacacttttaacatattaagatatggaaaaaagaaaagttgatttatgagtctcgtatatatattgcagcctgtattcttcagcactagagcttacataagcttcatcaagccagaccaaacaatgtggtaccgtgcttgcaagacctgtaacaagaaagttactgaagcaatggactctggttattggtgtgaaagttgtcagaaaaaggaccaagaatgcagtttaaggtatgatgatagtgagattcgtaaatattcaactcaagaaaagattttggttctggtttgttgtgttcttctttaatcatgtgtacttattgtgtgatcaggtatataatggcggtgaaagtctccgactcaactggtgaaacttggttatctgcattcaatgatgaagcagagaagattatcggctgcacagctgatgatctcaatgatctaaaatcagaggtaagaaaactcaaaacatatatatcaactggaacacagtccttattctccatgttctgatttaagatacgatgttatgttggttttctccaggaaggtgaagtgaatgagtttcagacaaaactgaaagaagctacttggtcatctcatctcttccggattagtgtttctcagcaagagtataacagtgagaagagacagaggataactgtaagaggtgtttctccaattgactttgctgctgaaacaagattattgctccaagacatttccaagaacaagacatctcagtaattctaacttttagcatgttttgtctggttttgtcaaagagtcccaaagttgtgagtttttctgcagtcggttatagtagttcatgtcattagagaattgacttttaaatctttgtaagtgttccaacaatcaattcagagagccatttggaaaaagtagaagcaatatattatgaaatcgaagaaaatggaaacatccatgggtttgtaaaaaaaaatcctaagagaacataaactagcataagaaagaaaagaacaaattcaattggagaatcactgttgctgaggcaaaggagacttcaattcctggtaattgtgtagacttccagtgaaatcagtgaacaaaccatcaacaccgatcttattgagccaataatcatactctaggtaagggtcctgattaaactctaaatgcagaaactggttctcattacggtatgtgtatggatggacctagcaaaaacattattcaacgtgaagtttaatgaaacaaatcagtgatgatagtaagagagtggagacaggagttcaagtcctacacacaaacctgaagattacgcgaatgtgctctcgcaactaaatctgttggtgtcatgagacggttattgttcacaggaacaattgtgtctttccatggaccaatcccaattacatatggtttaatgtaatccaaatatgcgtctgatgtgatctctgcgtaagtctgcattcacattcattaccttatgtataagcaattttgacataatgagaaaggaagaaagtgaatatgtaaataccttattagtgtcttcggtaagaatagtgacatcgtcgatcaaaaacaattttggtgagtctgtcatgtttgaaatgtaaactagcgaagttgctgcaaaagactgaataaatattggctgttttaaccaatcttcagacagatatgagcctttgtatccatatttcttcaaagtttccacaaatttatcttcaaattttttaccatccgcccacttcacctgcacaagtttccaaatacaatttaacatcctctccatttgttatcatcaatgactaaaagttgaagctaagatttgatggtttgcttacttgctgattcatgaaaaccggattcttgatctctggatatatcccaaccactctaggtgcatccagtgctatcgaaatatactcgtcgaaggtaataatcgggaatttaccattgtattgttgatccctgaaaggatacctctgctttgcaccaagtgttttcagctctttgagagtaaaatcaactgttcttggaatgttcaatctcatcgtcaaaatttgaaaaaaatgaaactatatcaaaacaaatgataatggaatgtttttagttaccagtgaagaagccggtcatgttcattccttggacttcataagtcctcttacggtctgcaaactccttatggtctgcaacatcggttgtatcatcgagattaacatcgtggtgacatataagaacaccgtctttggaagacaaaatatcggtttctataaaatctgcaccctcctctatggccctctgcaatcaaaaaaaccttgtgaaaccagacaaaattagtgtaaaggtaagagacttttgtatagatccaataccatatatgcaggagcagtttcttcagggagctctccgtttgatcctctgtgtgcaaggttgtaaggacgggaagtctgaagtggtttcttggttgcatgttttgcttcgcttgggagacgatacaaaggccttgaggcacaattagcaaccaacaatgacagtaaaagcaatggtagaagatctgcaaaaattataacaaaaattgctttaaacgaagaatcaacttagacatagaaacaatggagatttgacacttacacttgaaggccatgactgaatttgagctagaaaaattcctccaacgaccacactgcatgaatccaacattatatagatagacctgcaacttatctttagaagatttagccaaaaaatcgtaacaacccaatcagcattaagaatattcctctgagaaatctagtatgccaatagaagataaactccgtgttgtttgaaagtatattcttcttctattcactaggttttagttttacattttaaatgatcgcagatatcataaggcagtgtagttttagaacgaagtgaagttgcagatccagattgtattgctatgttctagtcttttgatcctttgttaattacaaaatgtacttgcttgtcgatcatgacaagccaagtttgtaaaacaatctctggttgaatgaaattgtcgatgataaaatgcaatcacgaagcggttgtgaatggaaaattaactcttttatagcatcccaagacacaaatcagaaacgagttcacaccaattctagagaagaaaatacaagagtttgagagagtgaaaactaaagagaggctcctccattcttctcaaactcccatgatcctccattcttcttctcaaactcccatgagatccccatagctacgcatgaggacgactcctcctgcaaacataccaagtgctcgcagaagtttctgcaaccaaaaggaattcgtatgagacagatttcgatccaaatacttcaaaggcatgaactataataaaccctaaatctctaagagacccaacatccccaaattcccattcgaacatccaaatacttcaaaggcatgaacttaacttgtgattgataaaccctaaacctctaagagacccaacattcccattcgaacacacaatttcataagaagaagacacagagataagataaggtcatctgatttggcctatcgaagcataggagagaaaatcaatcctacgttaaattctgaaacccaaaacgaactcattaaattcaattcccattcgaacacacaatttcataagaaagacaaaagaatcacattgtacgctcaattgaatcaatttgtaaatcctaaaccgtaattcaaaatcgctgtacaactcattaaattcagccgaaagcccagaatctaatcatgaaacatacaagagaatcgagacttcgatattcaatagacaatcaagtcggaattaaacgaaagagagaatgtatgaaggttaccatgttcaccgcccatttttgttcatcatgaacctcggagtgccagagtgctttcatcttttcgatagagacaacgttgttcaccatcttgctgctgaaaaatcgaaacttttgatcgtcgaaaaaagaagaagctagggcttttaaaacgacgaattgggatcgggaaattttagtcggttaacttattaagggtttacgttttgtttaattaccaaactaacctttactaatatactaataaccggtaaaaagtgatgtgatttggattgatttcaaccggagaagagttaaccactcgccgaacgacacgtgttcaacacaatcctattcctcctagcaatctcaaagcttgtgtgatctacaagctcttggtttctccattgaagaaaaagctttgacaaaaccagggaaagagacagagagagataatggcggctaaactaatctgttcgtctttaacagtgcattcaatggcaaataagaagccatcaccttctgctgcaacaagaacaataacctcaaagaaggtaaaagttgaaaatcaaaatttatcttcttatatgtcccaaaatctaatctctttgttatgtttggcagagcacagcgactccacaggtgaaactgctgacaagagtcgagcagctcaagcttctgaccaaagccgagaaagcaggacttttgtctttagcagagaaatcaggtttctctctatcgaccatcgagcgtcttggattgctgaccaaagcagaggagttcggcgttttgtctgccgccacaaacccggaaacgcctggaacgttattcactttgagcctcggtttactccttcttggaccggtttttgcatatgtggttcctgaagattacacttgggaagtagtgattcaggttcttgtggctctactctctgttcttggtggctctgctgcttttgctgcttctggttttgtctccaatttgcagaaatctgattagcccgatcgttttttttttgtatcaaatatatttacccggtgtagcaagagacttttctgcatttaagatgaaaactttataatgtatttgatctacattgtatcaaccagtcattttcactattttctatctatgtaaatggtttcatatacagaatccaagagaaacgttttgaatttcaatacgtttacttattgtttttgttatgtgcaacaagaagaagttgtctgtcacaacagaacatgaagggtttgaattttccaatagactagacaaaacgttacagtataattagcaaaaacaagtttttttcatcaacagatcaactaaaattgtggtatccattaggtataaataagaacaacatatatctttctttttatctgaaaacaaaccaaacttaaacacttataaaaatctaaaaggactagtaacaatggccagtttgaaagttttttcttttgctttgatccttgttctcactttctcagttggtacgtcttctctcttataactaggggtattttctcgagtgtttataacactaacaaacttatttttgtgtttcaatacaaacttgttactttaattacaaaattccatgaactcatattaggcaaaactgtttcaattttgtgtgatattggcagatgttgaaggatataatgtagagagtggtggttccttgtgttgtaataaccacccgaaatttggaaagtgcaacacaaacaatgacaatcagagatgtaaccgttggtgtcacaatggatgcgggaatggaaaaggcgattactgcaaagctatgtctcacggaggactatgtcattgttattgttaactcacaattaaaaaatttatgcatgcgttaatgcgtttgtttgattactaacatatgtatgagtatgaaactatgaatatcccatgacttcataagtaataagaccacaaagccaaagagtttattatatactctcaaaatctcacccaacttgatgtcagtttcaatttataaagggcttttataaaaccatgaatcatgtattctgtaacatttttataatataatataattgatttggtgttaaaaaaaaaaaaaaatctcatcaccacataatctcaatttttgtaaccaaactagtagacttggatgttaaatctcggtttaaatgtttgaccaatccactatctcagaccggtgtaaccaaagatgtgtaacaaactctgtgatgatgagattgttaagtaggcccaaaactaaaattgaatccatacacatatttcaaaagaataatatgttattttgggccaactataattgacaagatatgtaacgatatttgactggaagtgtaactataaaaccttaggcccaactataatggattcaaattttgtattgggcctactttaacaataatctcatcatcacagaatctcaaaatcattgacgacgtgacgtctctcttctctccgagtttttgtaaccaaagcagtacactgggaggttatttatcggtttaaagtattgaaccaatccaatatatgagaccggtttaataatccttcgatttcgattcgaactttggtttcatctccccaaatcgaagcgaaggtctctcaacaatggcgaaatcagtgtcgacggcggcttcctcgcttgtgcaaaaccttaggcggtacatcaagaagccatggcagatcaccggaccttgcgctcacccagaatacctcgaagctgttccaaaggcgacggagtatcgtctccgatgccccgctacgattgatgaagaagcaatcgtgccttcctcggatccagagaccgtatacaacatcgtataccacggcagagatcagcgcagaaaccgcccaccgatccggcgatacgtattgacgaaggacaacgtggttcagatgatgaacgagaagaagagttttgacgtctcggacttccctaaggtttacttgaccaccacagtcgaggaggatttggatacgcgtggtggaggctacgagaaataatcaggtgattatcaaatttgagttttttttttcttgtgttcggattcatttgattattggattatgagctgatgtaatcaggttttggaccttgtggtggatatattgatttagtttcttcgtaatggcattggaattttcgactttagttttagggttcgtatctaatctcaaggctgactagataactgtggggaattc

SEQ ID NO: 1100 - DNA, 110684 bp, Arabidopsis thaliana
aagctttctttggtgcaaattaagggagaggtcgtgagagatttcggaagaaatggagtgagacgtaagaggagagtgaagaagaacaagaagtcaaaaagacttatggggttttaagtcttgccaacttttcaattatttgaatgattaaatgacatattattcaatttaatgtcgtaataaaagtcttcataatgtcagtttttgatatatgaaattcgaaatagaaatctttagacatttaactgactatagatcaagatattttgagatcaattaagtaccccaaaaatattattgtgaccctacaacaaaacggtaagatacgtcattttcttaacgtcgttttggaacaatgacttatcaaacaccgagacaatactcaacacttttccgagtctgttgaagatttttttcattcaaaaaccctaaaaaataaactttcatggacggcactaataaaatttcaccatgccaacaacactcgttcaaatcgtgtagaaatcttaagtctacgacttgcaagagacacaataaaaccgcaatattgcttttgacaagacgaaattcttggctaaaatctttgaaaattcgatcacaattttcatgtcaagccattaccaaattcgaaatcagaaggtattattttgcatcctttcaagcactttgttcataaagtctcgatttgggaccttgctgttagaaagcggagacgattttgtttctagccatttcctccgaatggagaggctattcattcaagttcattggagtttgttggttttatgattcatcttgttctctccgtgaaaagtcttttgaattttcatgaatgtccaatgtccacaatcccgatcaatggaagggattgagtaaaaattcctaggatatatatggtatatcgatcggcgaatgtgggatccagaaataacaagttcacggataatagacgaatcaatataagaaaagatattgagtattagtcgactatggagtttctcccatgaacgatagatagggaaagaaacagatttcataatttgtttgcgagcaaggcttcggtatcgatacatcgtggaaattcacttctccatcattcttttgaatgattggttatgtatttgtggatatgtattttgatttgcttagtagcaatgtactcttaaagtatcaattcttgtacatgattccaaattaataaatgaaatagatgttaaaaatataataaaaagacataacttcatcataaattttctccactttgatttgacatgttagaacgtactaccaatattatcacttgattcttaaaacgtcattactttatagagacgccagtttttgctcgagacgttttggaaacgtccctctatctaaatctttgtcgtccatcaacggcaagtggtccctgccttgcccggaacatcttggagacgttagccatccggtgttggagacgttaaactgatgccaattaaatttaggtctatagaaagtagaactatcattataaaaactgaagaaaataaatgtcaaccatgtttcaaaaccctttcaaacccctcctcatacgtctccacttttcaagaaatatgaagatgatttccccataggacaaacatctgccaggttcatttaaaactaacaacattgtttcactaaaagtgttcattattgatattaatttccataatctcttctcctaggacacataatgaaaaaaatgtttctaaagttcaaggcaccagaaaggttaaggcgaaaaaaactcgacttctattacctgaaactacggacgatacaaacttatacaaacttaaacaaacaaaaaaatgaagaaggagctgacgaaaatcccaacgctgactaaattcaatcaatttttgatttcatatttgcaaaaatgtctaccgtccacagactattactgatggtgaggcctctgaaattcctggggagacaataacaaaacgccgacttagcaggtgatttcgattatggttcaaacaatgtgtaaacgttgtcgtttgtataagggtagaaaatagtgcctaattatgtctcttgctgttgttaggaaatccgcccagacagctgttccaaaagattctagcaatcgacatttaaaagggcgcagaaatctaataatctcatctgaatctgaacaagaataaacaccattgaccccggttactacacaacatagatgttcaatcttccgatgtagccaaccatggtcatgatgagaagagatctttcatgaaactccagaatgtttttttaaatattattgctctataccgttttttccacacttccttctgttgtacgttccctgaaattataaacattactatccctctctaatcagactttaatccattgctgaataaacaattatctaattacttacacttattacattattgaaaacctttaaaacaaagatgttcacattttccccgttgatttattttccatatttttctctacaaaaccatttctacccaattcttcttccagacattgtaattgctaagatattagtgttctcaagcccaatgacgataatgtccaattcaaaattttagttactttcaaagtttaacatacgttttgttaaaaaactatcaccaattttcaaaatttgaaatatgttttacaaacaacaaactcacattcaaattaacatttatatatatatatatataacaatattactctttggtcatgtattcataagtgaatatagtatctacctactctaataaaatttcctaatgaagtcttcttctcttagagcaaaggaagagtcatccagcgttctcctgattcaaaccgaaggtacggaagtctgtatttcttaaattttctaacttctttcccttattgttaaatttcaatccagtattgttgacttcttccccttactttccactcaatgaaatcaactttctgcgagaagaagtcaacatattcagagtctggagacatgatatggatgaagcacttaggagtctggagtctggagacattgtcaatgaaactctaatgtggcatcgaatggaaaatccagcagacgaaaaaacattgggaggcaaatggatttacaagctgaagaagaaactttaaaaacctaagcttcagaaatcgatttgttctactatgtttctttatattcccgatttgtgattagcaatttccaaagttaaacatttcaatccattcaacattaagagaatttttcataattttcccagatctctaatgtaatcttcaaatcaaatccattctacattaagagaatttttcactatttttcaagacacaaaatttacacattcaaaaaactgtgttcaataaacactaatacgttaccaaatatcaaatgacaggccaaaaaaaaataacaattaaatgcaaaaaatagtcatacgttagacccaaacaaaacaatggatactactcacaaacgccaactaacgattcattatgaaaaataaagaccaaataaacacaagatcaaaccatttaaatacaacaaagtacgattaaaatttcaagaaatttactactcattaataaaaccaaatcaatattctaacgacaacaatagaaaagacacaaaattaacacattcaaaaaactgtgttcaatatatatttaaaaagtcaaaacccataaacactaatacgttaccaaatatcaaatgacagcaccaaaaaaaaaacaattgaatacaaaaaatagtcagacgttatacccaaataaaaacaatggatactactcacaaacgccaactaacgattcattaagaaaaataaattccaaataaatacaagatcaaagaaaaaccttgtctccacatcagagagtgatctataaatatcaataacataaccattagtcaaacatcaaagtttcaataacatagaaagtcttccctattaaccactactggtttcatccggttctgaaaccaaagaacaacaagtaatcaacttgccatcacatcaacccaagccatatgtaagaaattaccattttaaggcacatgtgaatgttgaatggtgttgttccaccgaagcgataaaatatttatttaaatacatcaacaaaggggttgacaaagctaccattgttgtagacggcgaagacaaatcattttatctgattctaaacaacatttagacggcgaagaggcgacatcttagcacatctattattgtaacttgacgttaccatctttagaatttcctatattagcctacttctcaaatctttatttcacaagttatttctctttatacattccgtctctttctctggttctgtaataaaccattatcttattactatagtttgagcatcatatattagtgaggaaggagcataactaagtttgaatagcatgacgtttttttggtttttacttatttcctcccataaataaaaaagtatgttcaacagtttctgattccaaaattttattaacaatatcttccaatcaagaaaatcttaaaacagtaaatacataatcaacatattgaaatacaaaattcaaaacaatacatgtaatttgatttaaaaaaaaaaacattattaaaaaaccttcaacacttcgaaacatgtatatatattgtatatgtattaccatttttacatgtacatagcctcatttcgatttcacctactctttcaaaagcttcacgatgaacactggctcacctaaagcacatgtagagttatcacaaggcctcctcatccatttaacggaacctaacacaggtctgtattaactctttttcctttttccttttttttgataggatgtattcactctatttccaaacattcccactattttcttcattactaaaatatatttctgacctcaatcattttaaccttggatactttctgttattcaataaagcatcatgttaaaaatatatatatttgtttttactgtttttgagccaaaatatcaattcagtattatagaaataatattgtaaacttatgaatattgttgttgatcttaaaatataatttctcaaataataatctgtcaggaattgaagaacaaaatatcagtataatactttctacgccaaaatatcaatttcttttattctaaaataatttcaaactataacccatattataaaattataatatttacttttagacaatatatatatatatatatatatatatatatatatttaccatttttgagccaaaaaatcagttcagtaatatataaatcaaagttgtaaacttattaatatttttgttaagtaaaagaccaataatattgttaagaaaaatatatatttgtttttactgtttttgagccaaaatatcaattcagtattataaagctaagaaaaacgtacaatcggatgacaaaatatatatatatttctacttatttatgttgattagagctcaactgattaaatactttttttgtgatattttgtatttaaaactctttgtaagaatacatagacgaattataatttacgtttgaaatactatttattaaatccacgcatagcgtgggtcgtcacctagtatgatataaaggattaatttgatattttctcaaaacaccaagatcgagagcccaagagcaatatgaagatctccatgagaatcatcatcttctgtgtgacctttattgcagtttatgctacctccatgcagtgtcatgtctgggtttataggggcttaaggtgatttaaactcaggcacggcactgcctccatggctgctacgttttttaaatacattgaagttaaaaatataaaacaatccataaatgtatataaggtttctttgttgacaaaaaatgctatgtatttaaaaacgtttttaaatcacagtttaaaattcatgaaacaatccatgaataaaatgttagtgagattatctaacacatgtgatttcttttagctaggcttttttccaccactctttgttttttaggtgaaaaacaattaataatctttgtctaataataagaaaatatacaccaaatagacaaaataaaacttgatgaattcagaataaatactagaaataactaatattaccaaaaaatattaacgaataaatagaatttgcaacatttttctctacgtcaaattaaaccgtgtacaattggagaaagatctaccgcgtctgatttctcatttctcacaattcccatttttcgatttcactaagaaaattgttttcccagtacttagaatggaaacgtaaaattcgaagacccttatatgtgaaacgtctaaaaaaaaataggggctcagggcacaagcacaatcatgggtttggcaaaaacgtcgttgcgtttctattttctattcgttctttatttgcatctcaactttatttccgtcgtagactaacgatccttacgtctagcttccgttgacaccaaccatgtttccaccatatccaagccagaaggtgttattggctatggtggaaagacgccaaaattagcagtctttatccaaaagggcagtggcggtaggggaggaggcggacgtggtggcggtaagggaagaggaggacgcggtggcagatacgaccgtctaaagcaatctcgcggtggtctaggcgggtttccatatttttatggtatgtcgcaccaccacgctaatcggtcaagcagtagccggaatcttggaaggtcagggtgtggtttcggttggttaggtttattaccggctttggtagtgttgattttggtttcatagagttaattagtctttattagaactttaatttgaaagagtttcttagattttgatttttaatggattttgtaaagcatataatcttgtaggagtatcattaactagtatgtcacggctctttaaagagatcggagggatcaattaggtacggctctgtaaataagtatgtcgaaaatattagaatgaccttgaaggatctgaaagagccgacaataagatccaatcaactaacgctagggagaacaaaagagcaacgaatgccatttggaaatgttgtatacaaaatgatgggatcatattagcaaaattgtttgtcagctacctgaaagaaacgtcagcgcttggtcatacatgcagctaatttaatatataccttgttatctatactaactagtggcatcgcataaacatgcctgaaaaaacataggttatgtgcacgacaccataactatagattccgctactattccattgaacagctcgacggattttggtaccgtataattagttccgtttagacccaaaaggccatccattccgcaaaagttcagatagttcttttacatgatatttttggggtggtatgttctactttactaggcttatgtatttattggtgtattaaccatcagccaaaaaaaaaaaaaaaaaagaagcaaattctaaatttctccagaaatcgaattagcctaagaaaacattctatatatttaaaatcatttaaataacaatgtattaacgcttgtactttgtaccgtttcatttactagtatcaaaaaatgtaatcgtatttataaatgtatctaatattaaatttgatatgaatggtatatctaatctacctaatatatataagtattctaattggacttcaaaactaaaaaataaagtaaaattcagagataaattgactaaacacatgaccattaacattaagtaaacaaaagacaataataaaagcagtttcatcttgactaggcatggacgttcaagtatagattcgatttcatttcagtctggttcgccgattctttcggcttttaagtttaggatccgttcggatattcttttcaaatattttttgataatttagttttttggggcatttttctatattttcgaatatttttggatattttgggtaatttttgattttttgaatattttttataattttggaaatttagttattcgatctaaaaaataactaatatttttgaatatataatcatatttcagatattttcgggtacccaaaatatggactgaaccaatttttatttaccattcacaaatcatgtccgtagtggtgcggaccaaaaattaaccgccatattggtcctgaaatcgaattagcataaaaacattttatatacttaacatagtttaaaaaaaatgtattcatgcttttacattgttttgtttcattttactagtatcaaaatgtaatcgtatttataaatgtttagtgataaatttgatataaatggtacctaatatatacaagtaaattgtcatttcctttaatagattatgtcaatggacattcaaaagtcttacattttctagaggcagaactcacacaaaattaaatttatcctttcccaacgaccgtcgaagctagcaccgatttaccgctggataaacccacgtcagtggatgaaaacgttttagttcacaaattcaaaagtatttgagtgaacattttgacagagaacgccaattaagaatacactaatatacgtagtattaatttagaaaatctaattacgttttatcaaccaaataaaggtcaaactatttatcatccaaactaactaaacatgctaacgtgtcatagaggttaattagtttttaactttttataacaccattattgttgaaactgttagaagttagaatcataggtggaaaaatttacgcggttaactataaatcatgtttttatttttaccatttacccttaacagcaaccaaaaacaaattttgctattaatttccagccaatgagattatgccatctcagcaatacaagtctttcccaccattcttcttttctcaaagtttctctgtcttgtctttttttgaatctcctttgatgtcttccctctctgtctaacatattcctcgattcttgagctttccaggtatgtcgaagtcgaatcatcaatatatgtttagaagcttattctaatggtctgctgttataggttataattgtgaatgcgtgcgtaacacgctaggtgctctcgtttgatgcagaaatgaagagtgaaggagaaagtggtccatttcagggaattcttcgagatatcgaaggtagacgaaaatgttacaaacaagattggattcgtggcataaaaaccggtattaggtaaggttaattatatttcaatctttcttgaaatttatattgatgccaaacattgaattacttgatttcaatgtttcactagaattttggctccgacttgctatattttctttgcgtcgtctcttcctgtagttgcctttggtgaacaattaagtaaacatacaggtatatatataaatatttcttttccatgttgcttttttatgaatcgcctaaagaattaactttgatgatttttacttaacttgttgttgaaaggtggagctctaagtgcagtggaaacattagcttctacttcgatatgcggaatcatccatgcgattttcggtggacaaccattgttgatagttggagttgcagagccaaccatcattatgtatacttatctttacagtttctgcattagtagaccggatatcggtcgagaactttacctagcttgggttgcatggtaatgatcacaacaaatcaataatcttgttagtgtacgtgcatgtaatctgctttctaagagtttgttgttatatgttgtttctatagggtttgtgtatggacttcagttttgcttatccttctttcgatatttaacgcgggcacaatcatcacgaggtttacgagaatcgctggggaactttttggcatgttgattgctgttctgtttttacaagaagctataaaggtataaccaacttcattttctaggttacttagtcaacaagtaacatacttagttataatacgttttcagggattgatcagtgagtttcacgcccccgagattaaaaatcaagaaacagggaaatctcatttcctcttgatttatgcaaatggtttgcttgcggtaattttctcgctaggccttctaatcaccgcgctaaagagtaggagagcaaaatcttggaaatatggttttggtacgtcattgtctatttacattagttcatgaaaagtgtacattgatattcacttagaccacttataactatagggtggcttcgaagtttcattggagattacggtgttcctttaatggtcttgttatggacggcattgtcttacacagttcctagtgaagtccttccaagtgttccccggagactgttttgtcctcttccatgggagccagcttcattgtatcattggactgtagtcaaggtaagattaaagatatgcaaaacatgattgagtgatcaatacaaatgcaaaacttatagaatacaaaacttattatatacaggacatggggaaggtaccgataatgtatatcttagctgcgtttatacctggtgtgatgatagcaggactttacttcttcgaccatagtgtagcttcacaaatggcacaacagaaagagtttaatctaaagaatccttctgcttatcactatgacatcttcttgcttggaattattgttagttcttaaatgttcttaaaacttatttcaaagatacttatttcatggcataaataccaattaaatcttgttgttatggtggtgatctatagactttgatatgtggactacttggacttccaccttcaaatggtgttcttcctcaggctccaatgcacacaaagagtcttgcggttctcaatcgtcaagtaagaacaaatacatatatatatatgagaagaagaaggagagttgaaacagagatgatgatatattttttgcagcttatacgcaagaaaatggtgaagaaagcaaaggagtgtatgaaaatgaaagcaagcaaatcagaaatatatgggagaatgcaatcagtgtttatagagatggagacatccccacctcaggttagtaataatgccttctcctatatttatagaaagaaattgtttgaaattaaagaaaaaaaagaaccttaaattttttgcaggataattctgtagcaacagatttaaaagagttgaaagaagttgtgatgagaccagacgaaggaggcgatacaaaaggaaaattcgatcccgatgttcatatagaggctaatttaccggttagagtaaacgagcaaagagtgagcaatcttttgcaatcagttcttgttggtttaacacttcttgcagtgacagtcattaaaatgatcccaagttcagtactttggggttactttgcttatatggcgatagacagtctcccgggaaaccaattttgggagagattgttgcttctctttattcctcctagccggcttttcaagttagttaatatatatcttttctttagtctatttttagaaaggtctgcctttctcaatcactggtttcatctaaatgcagagtcttggaaggagtgcatgcttcatttgtggagttggtaccatacagagtgattgtaacattcacacttttccagttggtttattttctcttgtgctatggtatgacatggattcctatggccgggatatttttccccgcactcttctttctacttataagtataagagaacacttgcttcccaagttattcgatatgcaacaccttcaagtgttagatgcttctgactatgaagaaatagtagcagcacctatccaacactcaagtttcgcatatagggtaaacctttggtctcttaatgagtttaaactgattcaggggctttttgtgtacacgtgtgtgatacctttaaaccattttgtgagcagaaactagggtcttctcatcatttatcagaaggtgaagatgaattctacgacgcggagatattggatgagatgactacaagcagaggtgaaataaggatccgaaccataagttttaaagaggtaataaaaacaaattatatctattctacacaatccaagcattgatatgaaaaaatgcatataaacaagaatcttgtttcaggtgcacccggagcctgaagagaagcatgtaacctttgaaccacattaaaaagaatcttttgcaattgtttttgtacacaactgtatttgtgcataggcatacattgactatgttataactttccttatagtggaactttgtttcagcaattaaatatgagattattcagcattcaaattatccagtacttgctgcattatggccatttattcgggtgacggtgaaagcattatttataagcttatatatatgtcttccgcttcatgaggatagctaatagctattctctaaatccggatcgatcacctctgccatgaataccttgtcacctcgtattgcttgctttgcaagaaaaatgcgccaaatttcaagaccagttaatagctagcaagaataacaatggtacaccagtcaaagttattttagaggagataaaagattttcacaacgctttttgctttacacgtcatctctcggttattcttctgacacatagcgtggctccaaagtaatcatattttcaacgtattgcagagagagaggtcgaagaagataatgatcattgtatagtgtaaaggttcaaagttgattagcatatagctctgttcttgagtgatggataagaatggagaattaggtcttgtttcttaatacttctcgtcatatacgagttattgtatacaaatgcatacattgactatgttataactgtcttatagtgaaacaatgttttcagcattagtaacccttatatagtttctcctcaaatctgagctatagcattcagattatctagcacttcttgcatggttggtcgcatcttcgggtctacctctaggcattgtttaataagctcgcacataagtcttcccgcttcaagtggatagctattcttcaaatctggatcgatcatctccacaatgttgtactttttattttttatttctcgctttgctgagattgtgaggtcttttcctaaaccagttaacattttaagtagtataacaccaaagctatacacatcgcccgccatgttcgacatcccttcatttgattagtgcaatcaattaaggttagtctctttgaatttaatggtcacttttaactttaagatataaggaagaagcagaagattgttgcctgagagtatgtattcgggaggtgggtattgatatctaggtgctacatttgaaaacccgatggtgtataccaattcatcgagagaaacttttggctttccaaaataggaaactcttgcgttgaagtcctgcatatcccataaatgtcactttaaaggtaaggagcaagtattcaagaaaaaaaacaaaaaaggcaaggtgaatacaaaccgagtcgagcaggattttcgaagcagtgagatatctgcggtatagaccggcttgcttcctagagtgcaagaaggcaagacactgagccgctcctatggatatcttaagtcgtgtctcccacggcaatgactttggacgactatctatgatattatataaaccattaaatccaaaaggaagatgaattactattggatctaaggttaagatcgtaaactcgtgagagctccagaaatcaatttgagcaactctctttattccctctctatgatattaaattatctaggaatcatttagcttggtgttcttcaattagtatattttcctcacttccactaaataaagctctaatgagctatctcaatttttagatctagttttaaagctcttattaagagctcttacctttgggtcttgctcgagcaagattcttcttgctttgagtctactcacaagatataatgacgaaaaggagatgaataaacttaacttccttacctctactgatgtaacttcctaagcttccatttggaaagtattcagaaacaataaacaacatatcacgatcataacagtagccaattagcttcaccaagcttggatgagagttatgtcgtagaaactctacgtcaacctacaaaaatatcatctctaatgttaagacacactgacccatctctaggggtaggcaacatagacatttaccatccaaaaacatcaaaaaatttagaagaataaataagtaacaagaaacttaacaatattattggttttgccgaaggttctcctatagattgagatgatataattacttacaagccaatcttgaaaagcttgttcattggctaagtaaattttcttgaccgcgacggccatgccaacacctttcttggccggagataacgttttgggattgatgtatcccaagctctctcctagttccatctggtttccgaaatcattagtcgctttcttcagatctgccaccgtgaagactttcacaccctcctccactatacatatattataacaaaacttatatccattatagtaacattcaaatcaaaagtacttaaatccgcagagaaatatatatatgtatacctgatttgggagcatttggttcggtgggaagtgtcgaagctgagagacaatttcccattcggatactctctgctaaatcttaacactagagttcaatgaagaagagaggacttttagtttttcacaccgaggagcaaagtcaacgaaaacgcgtttgagagtcaacggttgacgcgttttatttggtgagtcatacgacgccgttttttgataagagtacatactacgccgtttggctagagtttcatacgacggcgtttaaacagatgtctctggatgcttcttccttcttcgttcccgggttaaattacaaatagcggcgaaggggtttcatcacaattcacatcttcaacgttactccgaagaagataatggcgtcgtttctccagagactagtagatcccaggaagaatttcttagctcgtatgcatatgaagtctgtttctaatcgcctccgcagatacggtactctttctttctctcttaccctagaaaccaaaccctaattctcttctggctgattttgggaattttacgattttttaggtcttagatacgacgatctttatgatcctttgtatgatttggatattaaagaagctcttaatcgtttaccgagagagattgttgatgctcggaaccagcgtcttatgcgtgcaatggatctttctatgaaacatgaatacctcccagataatcttcaggtatgttttagtctctaagtaagtgacaacagagctaaaacggtatatagctatggagtttgtagatagagcttgcaagatttgacttaagacttgtattaggatcaagaacactctgttttcagaaacctgttttggttctgtaatataattgtaacttgataagctttgtaagatcttgtctatgaaagaagttttttttgagatagtgcttgttagttgtgagataggaagcttatgtaaatctttttttcttttccttgtctctgtaattccacaggcagtgcagactccattcaggagctacctccaagacatgttggctcttgtaagaacaaaaacagttttatctatcttgtagtgatagaagaatcatatagcaaagttctaacacacgacacttcatgtgcaggtgaagcgggagagagctgagagagaggctttgggagctttacctctctaccaaagaaccattccttaagcatgttagtctctcttgtgcttatagtagggtcactgttttagtactctttaggcttcaataccgcacaatttgcttttgtatggttatgcatggatatgtgaaccttatgtataagattttatgagattgaattggatgtgtaatgtaagcttgattgagctattacagaaatatgagtaaaatatcccacaccggtaggaggagagtaaatcatgctacataaagacataaaggcacacaaacccttaagctagcttttggaaatgttttcacagttcctcataggagctctgaagagaggcgtgtaacctctgaaccacaatcctttataacccttagtttgtcctctcaaatatgggctatagcattcaaattatctagcacttgttgcatggatggtctttccttgggatctctttcaaggcagttttatgagcttgcacatacgcatcccctcttcaacacgatagctattctctaaatctggatcgatcatttccacaatgttttcttttctattctctgttgcttcctctgctaagatgatgcacgggtttcccaaaccagttaagatctcaaatagtataacaccgaagctgtatacatcgcccgccatgtgtgatctccctgtatatgcgtattaccgtgcaatcagttttaggttagtgtatgaattttaatggtcattctgtagcttgagagaggacttacctgagaatatgtattcaggaggttcgtagtaaattctaagaaatgcgctcaatacaattttctagcttgcttactcctataaatgtaacgctctaagcttccgtttggaaagtattcagaaacaatgaacaacaattatcatccgaaccgtaaccaatgagcttgaccaagcttggatgcaggttatgtcgtagaaactctaggtcaacctacaaacctcggctgccgtgttaagcatacatatatgagtgatcagtctctctcgtagaggttaatttcttacaaatcacttttgcaaggcttcttcataggttaagtaaaatctcttaacggcgatggccatgccaacaccttccttagatggagataacgtcttgggattgatgtgtctcctcacacagattcatatatacctggaattgttgcaagttgttcggttagaaaacagtttcccatgcctataagatccgctttcttgacagttaaacagagtttgaggaagaagatgattcaccttacttatctagatctactccaccgggcttcaaggttctggagtaagccattgagtatatggacgtctcaagtcaatgtgttaaaatgtcaacgcgttggaaaatgtcaacaagggaaccaccaacttttgtagtttatagttatagttttaaacctatgacgtggagcacaatattcaagtttgtagtttaaattgatcttgcaagattgaacataagacttgtataaggatcaagaatcgtctgtgtttaaagagcccttttgtgaacaaccttacataattagctttttcccatagccaattttgaatttttttttttgtcgtagccaattttgatttaatatacacaaatattcatattcatattcatatctttttttttcgtagggttcatattcatatcttgtgctaataatgatcaaagaataatagtttatataattttatgaatttgtagtcttgtagcatgaacttttctctgtcttgtagtgttagggggcttattgcaaagttcttacacgatacttcatatgcaggtgaagcgggagaggcttcgggagcattacctttctaccaaagaaacattccttaagcatgttagtctcttgtactatataactaaagcccacttaaccaaacattccttatggctctttaggctccaatctaccacacaattttaccttttatggttatgtacggttcacttaaacactgaacttatacataagattgatgtgtaatgtaaacttgatcattaagttagatgttaatgtttacacaattcctcaaagatgccacttttaaacattttttacatgaatcatatatatacaacgatgctttgcacggtctagtgaataagtgtcgaggtagataagaatgagataaggtatttaaagtatttaatagagtggtgtcagtagagagaacgatatggatttgtatttgaagacatttccatgtgagtcacattagcacaggagggtcctttgcctaaattcattaatgaattacttaacagaaataaaatgacaatgttcaattaaatgtgagtagacttactcctattcttttctctcacttgccaaatgccaaattgccaataattatttattactgatgattattaaaaaaaatatttttctttttgcggagatttattaaatattgcatgattttaaaaaatagttatagcctagcttccaaaaagccaaatttatgtagctaaatgttaaaacaatagtatatggccacacttccaccaatcagtcttactatcatttgtctcttatgcggttttgaaaggattttggtgcttctaatttcgaatttagagggacaaactaaaattacgcaatatttgaaaagtaagaattattgctattaaaaaatcttgatacgattcaaaaaaaattatataaaaaatacggtttttaattatttaaattttcagcatctttacacaaaaaagaaaagaattcattctcatgttcaaaactatctattttgttaactttgtttttgaattatgcaattttaaatatatttcctaataatactagggatgtttgatcttaaaataaaaacaatttggtcttagtcatcaaattttaattttttttgggtttttttttgccgtctatatttattatttattgcaaattatgagaactgtttcatatacaattctacccagaacaatttttacgactcttattagatctacgagagatgatatctccttcttcttctccatgcttttgatagacatattcaatgatcctctttacgtagaatcttgacgaacggctataattgtacatcgttggagatctcatgtacatttacctccattaatctgcaaatttgttaataaatcttagtatctgggactcgaacctcaaattttttggtataaaaacattaataaacctttcgtcaatcaaagggatttccaaaatcacgcaatatccctacctaaactggaaactccgacccaaaatcaaacaaaaatttgaattcaacatccctacctaatactacgtatattatatgaatacaacgtacctcaaatagtattttgtctttaccaatataaattatataattataacggacctactaatatatatacaaaaaaaggttatcgatatctcttctctgtacaagagatcgagtcatgaggaaatgggcccgtaaaagagtaaaagaaatgtacaatgaagaggagacaaagccatgatcctgccttttgctttgatctcttcttttttgtatgggttccactacgttcgttacccatgccccacccacgttttcgacggttcctcgtctttttttggttcttctctcactcttattatacacttgtttatcttttttagattcaacattttaaatagtgattgttgtttgttcgaacttgggtcttataagtcctaatcaacatttaattggatccattagaaacagttctttcattggagctacgtgttacgtttttctgatatatgataaatattacaaataagactagccattttagattttcaaccgtaagtatgtgtagaaatacacggttttaaatttataatcaacaaggtagtagaaaagatagatagtccacactagatatgagtaaaatatatacatcaagtcatattatataaggtgggaactatttgtggttttattataatcgttagaacgatatctcgaatttatttagctcaaaaacaaatatcactagaaaactactacatcaaaatcaataccatttcttacaaaacaatatggcatattgatagaagaatgtacaaatcttcgatgccataaacagtcgcatcagaacagttgcatgaccgtgaccatgcgaagtagtgtacatcctcatcctcacgttcgaatgaacgttctcgtaaatcgttcctacaacacatatccctaaagagagagcaacacatcctgtttgtttaatgattcggccactaaaataaacgtgtagttaagaccaaaaacgtaaagcacacctgattagaatattgatctctaagagtaaagaacgcatatattggtggttttggcggagctaaattccaaaaaccgaacataagacaggtagttagaaatgattttagagtatttgtttttaaaaatgaaatcctttagaaaatgcaatttcttgggacgataagaatgagaagaagacacgattctgaatttttctgaggccaacttcatggccgactttggaaaccgcattcttagccactgaacggcgcccttaataccatagactattctcaattttgttattaaaaatacagccaagaaacaaaccaaaaaagagcacgaagaagacaaaagacttaaaaaaaagtttcaaaaggaagagatttgtgggtgtaacacatgccacgataaacgattctcctagtaatagtatctgtccaccgatgatctaaacgaccaatttggcatttcccagttactatcataattaatcatatttgtcacgtagattcagatgtaagattactaaaaaacatctcaattattttcacaatcttagacttaagtgtttatagcatgtggataagggatcatgatcataagtttatagttatgtttagtgttttgtttttggtagttttagtttcaggcggttttgaaacactttttccgatccgacctatactcattttattttttttgttttatttacaatttaatttacagattagacattaacacatattttcaatttctcaaaattatccaaaatattcatatcttaaagatgtgaaaatttatcagaattagtgaattcgaagtgtaatttagacgatttaaactatccgaatccgatcaaaactatacgattaaaactatccgaatccgagccaaaacggtatttagtaaatttaatattttattccgtatatttctagcaatatatttaaatactcctgcccattacctgtttatacgcaattacctctaatcatctacaaacctgtcccaattggacacttctggcttccccagtcacagcctaaacagagcttgactcaataaacagcaaatataattgcatcaaaacaatactttttttttacaaattttttattccggaagtaaccccaaatggtcaataaggttccaaatctctgaaaaggaatgaggtcacaaccccacgtgggataccaactagccacagtggcacacactcgtaatatatagaaacctccaaggtcattttcatagttctatccccttataagcaatagccacaactctctttgctaattacattttacactcatctcgttctctcttccgtcaatatggaaggcgtcaccgtcgtgtctttcttccttcttttcatcgccaccgccatggccgccaagtccaccgtctccttccgtgacggtaactctatttacacatatacatacacatacattcattacatattccggtttactacattaataacaaagttctgatttatcactttcaagtctgaaaattggaattggggtactatacaattcaagttttttttttccttcaaagtatattaacatacctttttttttatgttgatatatcttgaagaaaaaaagcttaaattgtacctcaaatccaattttcaacctttgtgtacagtaaattatggcaattttattttttattttcacaaatttagtgggaacaaaaactcatttcactcaaaattttatatagaagcgagaaataaaatcttataattataattgtgatatgaataatcaatataatgctggtacctaaaaaaaagtttctgaatggttatgaatcataactttgttggtatcactagtacgaacctgcctctgctagcgatagtacttaaaaacaaataaaaatattcgttttgttacgctttaaaatttagattttttaagaagacgatgtaataaaaattacagcttcctttgcccatgtttctgacacaaacacaacaccataaagtttttggacatttccaatcaatgaagttgagagtaggtcctttagttcatgttacatttaggaccagtttaggctgtcttcggacacacctcacgtgctctatgtatatctttttcttttaaaaaaattccaaaattcctaatattcacaaggacattttgataatatccacaggcatgttaccaaacggagacttcgagctaggaccaaaaccatcagacatgaaaggaacagaaatactaaacaaactagcaataccaaactgggaagtcacaggattcgtcgaatacattaaatcaggacataaacaaggagacatgcttctcgttgttcccgccggtaaattcgctgtaagacttgggaacgaagcatcgatcaaacaaagacttaaagtggttaaaggaatgtattactcactcacttttagtgctgctagaacttgtgcacaagacgagagacttaacatatctgtagcacctgactccggtgtgattccgattcagacggtttatagtagtagtggttgggatttatatgcttgggcgtttcaagctgagagtgatgttgctgaagttgtgattcataatcctggtgttgaggaagatccagcttgtggtccacttattgatggtgttgctatgagatctctttaccctcctagaccaactaatagtaagtcattactataaatactctgtttcttgctctgtttttataatccttgaacatgtgaataatgatgattttcttttatgtttgatttggcagagaacattttgaaaaacggaggatttgaagaaggtccattagtattacccggctcgacaactggagttttgatcccaccgtttatagaagacgaccactctcctttacctggatggatggtggagtctctcaaagctgtcaagtacgtagacgttgaacatttctcagtcccacagggtcgcagagctattgagcttgtagcgggtaaagagagtgccatcgctcaagtggttcggactgtcattgggaagacttacgtgctgtcttttgcggttggagacgccaacaatgcttgcaaaggatcaatggtggttgaggcttttgcaggaaaagatacacttaaggtcccttacgagtcgaaaggcacaggagggtttaaacgagcttctattcgatttgtggcggtttcgacccgatcaagaattatgttctacagcactttctatgccatgaggagcgatgatttctcgtcattgtgtgggcctgtgatcgatgatgtcaagcttataagcgttcgtaaaccatagatgaatcaccaatcctattacaagaaaatgcatcgtgtggtcttcttttattttccttaaactgtctttggtgtgtgttggattttattgaaacgagaaggtgaaaaaaacagagttttatttacgagagttagggttttatataggcagatgggcctttgcttatattgtattttcttgtatgagaaggcaaaagaaacgttgcctatatcttatgtatctaggccttttaatttttatggaagagttacaaaacttacaataaagttgtatgcatattttacttctcacgagcatataagactgaatcacaatcgagcatttccaatgaagtaacagaagcataagaaatttagcatttaagttttgttaaagcaacataagggtcacatataaacattacaatagtaagtttggtaaacacgaatgttaaagaaaagagactagagaggactcatctcatgttttattgatgaagtgcactctaacagcagtaaccagttctccagagcgttcaagttcacaaaccatagagtctccggttttcagattgtactttcgacataggtccacccagccattgaaacaaggggcactgccaccgccatagatcttagtggagccatttattttatctccgggaagaaggtaatgcatgggggacaaatggggaccaaacttcaagccatacttcttaatcactgttttgggcacatactagttgcacattgtacatgagaaatagagagaaagataagtcttagatttagaggcaacaaacgtaaactagaatcaaaactgatgaaaacactgctcttattaccaaaacgtcattcccttttgtcagcgttttcacaaagtaagggtttttggggtttagaaggtacagctcagggtttttgatatcagcacaaccatgtgtctctcgccaattgtctgaaaattctgccaaaacagaaacaaaaagaagcaaactttggcattgagagaaaagaaaagagtagtattgagtatgaagagcatcaaaacgattctttcattctgaatatagccataccagaagcagaagcagaggcagaggcagtggttgtctccttgtgagaattttttggtgtagtaggatgaaatggttcagtttcaggttcaacttcaggaggtgcatcgatgatctcgttcccatcattcttaaagatttgcacttcaagaaacatcttgtcatcgtgtctgaagaacacgttatcatttgggcctaaatggttgtcatccacaaactcatcccaatcttcttctatcataaacagatctttttcttctcgctccagccagagttgccaagaattgccccaacgaacactgaacacaactctgtgctcaaaagccccgggcgtgcttttcacaaactcttccggaaaactcctcttcataaagacagaaatcataacagttgacaacaacaaacgatactgacattagaagaaggaaacatgagactaaaagctaaaatacaatcagcagaacacgagcttgtcaagcagaacaagaagcaggaatcattgtgccattaaaatctcctcaaatgtttcttgaaagatcaaaagctttttcgaacaagaacaacaaacgaacaatagatctttagagcaaacaaagaagttcaatggaaataacagtgagtacaaaatcaaaggagctacattttcgaaagattagaaaagaagagagactaattttgttttaccatggatttagatttccagttttgtcctggagacagagacttccaaaagcaaggcttgctcacatttccttgtatcttatcagtagcattcctaggcaacatcttgttctcttcaaaagctggatggattcggcaaaattagggttcataaacaaagacgaagatgacttgcatgtaatgaaatcagtgaaacagtaaaactggataaaaattaaacctttaatgcgttatctcgcttttcttactttcagtagctaaacccgaaagtgttacaaagcagagaacacgaaaatggtgactaatgagagacacagagaaaaacgaagaaagaagcaaaatttgtacggtcaaaggggaaaaaaacttaggtcagaagtcagaacaaagtaaatgcgtaaaaggcaagtaattgcgtcaaaagtaacgtcgccggagcatgaaattcacgcaccgtcgcagtcgaagaagcttcctctcgctgctgtgtctgctcttctcagcccttgttctccaaatcgaatctctctgctttcagaaagagaggagactcaacagtcaacagcactgtgacaagtgtcaaatgtgtactgtgtatggaaataataaaatggtcaaacaatattattgggccggatatggcccatattagaaactggcccatcatactctagaatcgattcgattgcaagtgaattgacaagtttgttaaactaacacataattgacacatttagcattgttacagaaagttgtaaataacatattgttgttactagagaggattggtctagtctttcttgacgaaatgcactcttacagcggtaaccacaccaccggagcgttcaagttcacaaaccacggagtctccgatattcagattgtgcctccgacatagaaccgaccagccactgaaacaaggtttcccgttatagattctattctcgccttcctcttttttctccccgggaagaagataggtaatggtggacttaacgggaccaaacttcaagcgatagctctgaaccaccggtcggctcacatacttgcacatacagcaggaaacaaagacaagctttagctttctaggccacaaatggaataaaaagctgacaatgtaaacacttgtattattaccagaacgtcgttcctttttgtcaccgcttgcacaaagtaagggttttcaggattcaagaggtatcgctcagggtttttgacatcactagaacgttgttttcctcggccatttgtccctccatttgctgagaattccaccaaaacagaatccaatcaaacattggcatagagaacaaatgatagtttggagtttgatgattctatcgatctgaatagccttaccagagcagccagagccagaggcaaaggaagaggcaggggttgtctccttgtgaggtttcttgggcgtaggatgaaatggttcagtttcgggttcaactccaagaggtacatcaatgatctcaaccccattattcttaaagatttgcacttcaagattcatcgtctcatcgtgtttgatgaacagattatcatttggacctaaatgattgtcgtctacaaactcattccaatcttcttctatcataaacagctcgttcttctctcgctccagccagagttgccaggagttttcccaacgaacactaaacaccactctgtgctcaaaagcaccacgcgttcttctcacaaagtcttccggaattatcctcttaataaacccagaaatcaacaaaacaatacttacattcaaaagaggaaacatgagactaaaagttataactttctacagaaaaaacacaagcagcaaaaacacgagcttaaaagattggattgtaggtcaagaaatgcagagaaaaggactagaaccaacactagcataaacatgagctaagggcaaacgaaacctgcgacgtaaaagtacccataacggtagctaaaacaggtcaataagtaacaaaatgaagaccaagcagcaagaagcagaggaggcattgtgccattagaatgtctccaaagtttcttaaaagaagaaaagatctgaactttttcaaacaacaacaaacgggtagttctgtaataacttgtctataaaagggctaaactaaacatgaaaggattatcacatcttactgttctagcaacaacatccaaagctataaacttgtaacaaagcaaattcaatagaaagagtctaagaacagtgagtaaatatcaaaggaggagtgagtcataattgaagttaccatggatttagatttccaagtttgtcctggagagagagacttccagaagcaaggcttgctcacatttgcttggatcttctcaatagcattcttaggcaacatttttcttttcaaagctggatcagttctgcaaaattagggtttgtatgatgacctacttgcatttgttcataaaattagagccaaaaaattggaaaagtaaaaaaagaacaaacactttgtacgtacaaggaggaacaaaatatctctggtcggaaaaaatgaagaaaagtggcgaagaagcaagtaataacgtaaaagtaacgtccctaacgacaaaccttaggtagtaccgccggagcgtgaacttcacgctccgtcgcagttgaagaaaacttcctctcgctgcggctgctcaaataatttaaagtgactgagagagagagagagacagtcaaaagactcatgtctcatgccaatattatggtcactttttacggaaatttgggtaagaaattatgattaacgggccgaataaggcccatttaaaatactggcccataaagttaaggatcgataacaaaacgtaagttcatcagtttgaactttatcagtaaacaaaaaagtagtagaagcttgttcaggagaataactgattccggtaattggtcgcgtcacttagtgcatcaaattgtgtagtcaagaatcgaatagataccgaagcagaggagccaccactgctacacttaaactgtttccaagcattgcgtatctgcacaaagaggagttcatgagattcatgttcttgtgttcaactatttccacatttcaaacaggaagtacgggagaaataagggtattatgggttaaattctatattcgaatcaaaacggtgcctctgttatacttggatgcacataatctatatagacagtagctttttctggcttagatggtgttgacggtatgaacagcgtacctttgtcgaaggcttatgtgcttggggaactcaaaatcttcagggaatgagtgaaagttagctacctaaacaaatagaaaccgaacatcatctttcaatgaaataaagctgactttttcagtgaggcattagtagtaaaagtaaaggacagtgcttaacctctctaggggtgaagtatctaagccgttgctccttcaaacaagattccttacccttgatttttggctgcgtgatcacagattcacgataagcatttcttttcactttgcaaatacagaggaaagtaatattgtatactccatggaagaacgtacctggacagttgccaatagggaacctgtgcccttcacgtatcgataataactctttgtgaaacaacaacatctctttgaatcagggtaaacaatgtccattgcgtttccccatctctctatcaaactaactggtactagatactgatgtacagagtctgggacagaatcgccttcttgtccacaacaatctttggacccattttcagagtcatcaacactacttggctcgccatcaacatgtgcagctaactcgagaaacttctctactggtttgcaaaactcaagtaatttatccaatccttcttctgcttgacattttccaaactcaacctgatcatcacgcccatataacgggtctggagaccagagtagtttgttattactgtgttgggacttaaatggcagaggttttcttttggcctacaaagacaccaggtaaatcaaatgatttcaaagttagtgacgttttaactaaaacaaaaagattaacgcatatacatgagaaagtgcacactacatgagaaagtttcataatcagcatatacttatacattctcagactactaaaattaacagttttaggtacacagatatgcactacgcaatcataaggtaaagagaaagtaccaggcagaaataacgtggtcttgaatacggcacaccaaactgcagcggactcaatataaactcttgtgtgacataatctaattttgttaatgtaccaatcatttccatatgtgtatccgaagtctgcaccaacaaacaccaccaataagcaaaaatgtcacgacttcaaagaagatgatcgagaacaagtactctagctgggaagcataagcaaacactatacctcaaatccaacaacattctctacaaataacatttgtggaggctttgttgtatgcggtataagctcaagaatcctgagaaacgaaaaagcccgagcatcaccagagtgtttctgaaggcctaaccaaaaaaaaactgttagtatccaaaagcaagtcatgttgatagtaaagaaaacaacagtgaaatgaatcaccttgtctagtataaggttgacaaggaggagaaagaagccaagcatctgcattatacttatctaaatcagcagcagtgagactctgaatattcccctatgaaaaacaaccaaaacaataagaactaatcatggactaagtcacagaactagcatcatctatgatttgcaaatgtaacaatgcttctattgattatatcatatataagcattaagcaacctgatagggacgatgtttgaaattatgttgataaacatcattagcagaatcattgatctcaaaagcttctactacttctgagacgatgcctgacgccattaaagagtatctctaagagcaaaaaggaattagggtttatgagacagagtagacttcactaaaaacatagaattggaggtgaaggagactgttaccattccaccgattccactgtagaactcgagaacttgccatggcttcttctcattgattctctgtaattcttgttccgccatgcttcttcttctgctgctgcttaagcaaaattaatttgggagtttttggttattgttcttattcgtttgggtaaattaaaccgtttttttatattgttctgtttagtaatagaaccataccacgcttgttcggtttattgttagaaccatgttttttgttttttgtcgtttttctttattaattagcaagaaaaccctcaaactagccaatatgtttcaaaataaccctcaacttacaaaaaataaaaaacaatccttaaccaatttttgttttttttttcgttaaccaattttagttaccactgttttatatattaaggttaaggatatgttattttggggaattacatggcatatcaaacactttgctttttagtatgtgtgaaagtatgttgtgggttttttatgtctaatctttcatttcatggggatataaaattagctaacaatcaacaaattaacaaacaaacaaaaaagactctagctaacattgatctaggctgaatctttggaccttctagtgttcttcatgttcatactatatgaactttgattccacgtaggtttgtttggatggttttagtgagattgaaaaggattgatagaaatattttataagtaattcatagttagagtgaggtacaaagttgatttacaataaaattgagaaagacccaaactacaatctagaaatttaggaattgatttttttatttcgatacgcgaacacggaacctacaaacactatctatttgatctccattcatatgcgaggaattaattactcttgcattattgatcatatgtaagtagataaattaactttctaaaaacatttcggtcgccatcgtattagttgagatttttgattactacttatgtaagtgcggatgaggtaataataaagtgcagaaagtaaagagataagaaatttgttaacgaggttcggtttttcctactccccgggaccacgtccagatttcgatttcactagaacaagaaagcaaattacaatgaattcgcaaacgcgtaaaacaagcacacccctcttgatttaccgctcccttctataaacgtgaaaccttaaggataatctctacccttaactaaactcccctgagtctagatttaatcaggataacctaaccctgagttaaactccttctgagcctagacttcaattctccaagtctctggaataaccttcacgcaccaacaaacaagcttgatcacacaagcaccaaacccgcgaaactatgtcgcataaaaccgtgaaactatgtcgcacacacccttagaaagctctcaatgatttgtctttatgtctcagctctcctgcctctccaagacgtcctacctcctccttatgtagccaaaacgatttcctaatcaccataggagaagatttcctttttccataagaaaaagtaaatttactcttatcctttttctcatcaaactccactttcatcaagtcttccaaatctctttaagtcctttttcttttttgattcatcctctaaacacgctcttctcaaatcttctagaaaccgatactcacacaaaactgtcgcatcctgaattatttcttgaatcattcagcaattttatcagataaaatcatgtattacttcttgtatcattcaacactttcatcagcagcagctacatcttcaacttagtcctgtaatttattttcttaacatacaattgaattcagctaatcgtccttgcgaatgatcaaatgcatagataattgtatcatcctaaataaaagacgtggggaaatcatatgacatctagaactttggagaagggggagataagtgatgatgcatggaagcatttcccaaagataatcgaatagattctctcttttcttttgtgttcgtcagtttttctttaccattccccgagacaatatggtgggtttattaattattttgattcttctataattcttcccattatttttatatattctttttaagttacccattcttttttcttcaatgtcgagacgtcgagttagttagcttttacggcgacttatggataaggcattacgctcggagccatggactgagttggatagatataatgcgtataatatttaatccccataacctatattttaattcctatacattgtaatggtagcatctcaactttaaggttagagttggaaccttaaagtttatgaatattacaaaacacttgtatgggggtggagtgcatgaaaattagagctgggatgtatatatgggaatatatatgcactacattatcttacattttacattgaaaaaatattagaagatattgttcttcatttatttaagtatatttttactgctggtgtattctactgccctatatatatctcgaaagttaaataaattcatatgttatataacttttagtcattcgtggcattcttctgttacatcttactgtggatttttcgtcttattatcttatagctgactcttactttagagagacaagtataccacaatggaaagggtgatttgacggtaaaaaaagcgattgcagtgtacccacaaacgacaatttataatttgtatgtgggatatatagtaagggaaataaaaatcatagggttaaatagaaaaagtgaatgaaactgtcttgtagttgtagtagacgaatcaaaaggacacgtagatggtcaagatacgaacctcaaagccttttccctcccatttaatgattcttgtttttgttttaatctataatttttcatgattttcttaagtctttgttttgaaaatcacgaacgaataagttctgatggatgtacttgaatattagtaacaagactaattgaattaaagaaaagagaagttattcctttgacgtttataattttccgcggctaagggaacatatacgttccttgaaactgttgccatgcaacttttgctttaacagtttagagagttttttacttcatgctacatcctttttctcctgacacacacaagagcatattatacatccatgtacctcctccatcgaccatcaatatatagatacatgtgattattaattatctacataaaaagttataccacgaagttgcgattgataatatgaaagtggtacatgctcgaaatagataatgagaatatatcagctttagttgtctcatcgttagtcaatctatatgtgcatatacagttaacaagaaatctataagcatatacgaactggggtcccaataaggtctaagaatcttttttttctttttttcttttctttgctttgctttagtttagtttgtgaaatttagtgaaaatttcattttgtctcatagagaaaccacatgttagtcaaaaattatatagtaagtccaagaaaactatattaatatacccatattaccatatagtcggagatttctagtatctctagtttagttcttcttattcattatcaattcaagtgttataaaacctcgagaccaataaaataggattcactctccttcgtgcccccaaagatataggtttacatatctatatttccacaccaccattttaaaagcaagagttaattaaagagatattttttagtcatcttggtatgtaatctggtaaactttttagtttgttatcttgtataaacaaccagtaagattttggttcttttgtaaatacttctctttgaatttaggactagtgttttaaaattactttcctcccatatttttgttttgatctttcaatttaaattaaaagttcgtttacaacccatgcatgcacacttccgaatttaaactcggattataatttggcactataataatctattagaatacgtcttgattaattttaaaatatttaggtgtcttaaaataagtacgtacgttgataaatatggagatatatacatctgtcaagtaaatggtattgaatttgccagtattagcttttgtgaagctgacgcaaaatgaaaacggctgatatctaaagctttaaccttgtgtttcttttttttgtttaaaatagtggggtctagaaatgataaattaatttaaagtcctcgatatatataaatagataaatttgtttcttttgggaataacgtagtttacggagaaacccaaatgttaaagggaaatgcattaaagctgtagcaaaataagaaagtaaaaaccaattgaaaccctaatttcacttcaaaaaatgttcccggttgttaaaggaagggccttttgctttgtccatataaatatattgtgagagtacaacaacaccttcataagctcttacactcatttcaactctctttttcgtttccattaccctcaggtaatcataacatatatataagttacatttgtagatacatatgtctttagttttgtgtaatttgttacttaattattattttctatggtgttgtagaagaagatgaataggccgggagattggaactgcagattgtgtagccacctcaacttccagaggagggattcatgccaacgttgtagagagcctagaccgggcgggatcagtaccgatttactcagcggttttggtggccgtccggttagtagctccttcggtttcaacaccgggcccgatgtgcgacccggggattggtattgcaaccttggggattgtgggacacataattttgccaataggtccagttgtttcaagtgtggtgccgcaaaagatgagttttcatgctcaagtgctgctgcaacaaccgggtttatggacatgaatgttggtccgagacgtggcctttttggttttggcggcagcagtagtggtggtggtggtacgggccgttctccttggaaatctggagattggatttgcccaaggtacttttttgtttgattgtttctatgtattgatgttatttttttgcaataatatgttttgatggttaaaacttaaagccaaaaaagaaacatgcatgctggcttacgtaagctaaacacgaccgtttaaattgtattaatgtatatgcatatcgtagaaactgattggtttaatttgtatattataggtcaggctgtaacgaacataacttcgcaagcaggtcagagtgtttcaggtgtaacgcaccaaaggaacttgccaccgaaccaccctattagtcatttagtcctcctaccttcttcatcatttccaagtacttttcgtttcaacaatagtcttaacttctgatcagaaacagttcgacatatatatttggatgatagaatttgttaacatttacaactttattatatcgtaaaagtttaaatagtagtgtgaaatacactaacgatagtactttaacgttaacgtacgtatctttttgattattttttttagtactctggaagcattagaggagagcagaaaggtgaagaatcgaagcaagataccgaccgcccttaatctcttgatttgtttaatttcttagatttgactcgttttatatctcgtagtagtcagacctatgttagaatgtaagcatgtcgagagttttccgaagcattttgttctgatatcggtctcctagctagtatgtaagtttgtttgaatgtattcttatttctgataaagttgtttccttctgattccgcaatcacgattctcatctaagtttgaaacacttgagttgttgaacgtacgagaggctgagagctgttgagaacttcttctgtggccgcaaatccaaattgcatgcaaatgttattatatatgcaattaaaattttgttatataatttgtagtaggaatgtagttttacgttaaaccaaacacaaactctagtaaccgtttgaaatgggtagatgcatggaccacaacgaaaccttttgtccaatgcctcaaaaaaaaatatgcatgagcattcatattatgatgtggcttggtgataatgagcttaccaccaaatcgaatgaaaatgtatgagttccactctaaaatgagaatagttatcagaaaatattaattatgttatatatcattaattagtttagaattctaatttattttcttggtaacattaagttgcaaaattaattttaattaaatacaaatacggatttcactatatattaaattgcgtattcaaggccatcttttcgcacatacattcgagcagtcgaacaaaacccataagaagatttttgcaatgaagttttgtcataaacaacaatattgcaactgatcgatgaccgtttccttaattgtttgtaatgggtggtatacttaaaaatttgttttcaaaatgtaagtaagaaagaaaaaaatcagtaacgcatttttcatatttaccattcaacttttgatcctgcttatttttgtactgtttgttccgtctcgcagtactaattagaactacactttttttggtcaaaacactaactacattttttttgcttgatctactactcaatatatttttgtttttatcgctcgttctatactgccacgtacgattgagactctaaaatagagcaagcgtacgttggtacgtgtccacacacacgttgcattttgcataggattccaatttactgaactcatggaagtgtagttaagattatcatcaacgggtcaaaaaaaaaaaagacaaccagtctttaatgtctgctactataatccattgcttagcttttattttttcgttaaagggttgcactaattggctttttactaaagaatctttcgtttttcccccactttgaagtcaattcatcatttgattcttctttggttttagtgaagtgaaagtacgtcttaggtatgattatcatgcatgcatcatagtgaacgtcttcccactttgaatttcaaaactatcaattattagattcgatttagatatgaatatataataatagtatttcaaaatgcataaattaggttgtgaattgtagacgataaaatacaaccagcttagtaatcttcttctaattatcaaatatatagcataattcctaaatcatatgtttattctcattaactaacatagtaggtaattctgttcatatgatttagctaaatgcacggtttcataatcacctaaagatccataagcaatcatcaaattacaattagtgtcaaactaagcactacttaaaattcagtgttggcggagaataatataagacacatctaattacaatggtaaggatagatgtgtgcaacagtgcaagtatatgtatagctttaatcataacttattagtgtttcttttaatgagcaaatgagagagacttgtcgatgaccaatctaagtaaagtgtacatcacttgttaaataaacaaatatattcttactgttaaagtcaatttttataacaaaagcaatagcaaagataactttttatccatttcaaaaacacccttacacaacgctaataaattcttaaattttgggaaaaattgcggtaacttttataaaagttttaaaatttatctttaacccacataaaaaagcaaagcatgttcatctttctaagccctttttttcttagcccttctttcttttgtttcacatttccacattcttcctaataatttctatctttatgcaaagcacacaattgacatggatggagcatatgcatatgtatttgatgaaaacttattttctggtacagtataattccaccagaaaattgaagcctccacacgaatattgtttttttttttttcttttttttttacaagatgtgatatacataatgatttaaatttgattggtgacacgttaacgacactaagacagattgtgagtttccacgtgagtttgttatcaaagtatttgtttaacatttgaggactcaagattcatattctaacattatcaaatactattttcttacataaaatgaaaatatcacctattgttcaattaggaaaaaaaaattgaaggaaaaagaagataatttaaaatacttttaagttggaatgcatgtagattaagattattaaaaaattagaaaatggcaaaaatatttaaccaataaacggtggttcagtgattcaaaagttattctaagatggtacgaaatagagttcacattttgtcatttgttttctatcattgttggtaatatcgtgggcattttaacatgtactaggtataatattgcaaaataaaacaaaactgtgcaagatttggcgacacaatccatcatgattccgatggttccactctgagattgttcatggattagttcgaagagtcgatctcacatgacacgcgtggaatcagtgatccaaggttttgtgttctgcattgttgatagcttagtttcttcggaccccaagtaaaacacttccactgctaagaatgtgtttcatttgtctttacattttgcatcatcgtttttcgttctcaatagctcaatgcagtgatcttcaaaatcattttcacttctttagacaccgataatttcattgctttcgtcgagtcgatgaactgatttgagtttgtgattttgcttcatgcttttattttattttactatgagaccaaaaataaagtttaaaatcttgatcgtaaacaaaacattttcattgaatcatttttctgggccaaaagaggcctttttaatggcccattaatgatccaaacgcgattaccaagctcttcgcttccaactacatctcctctctcacagcttcacttcacttgtgtcatctaaagcttcccttgaatctcttctctcaaattcgctttacttcttttcgcgatacagattcacttgcattaaaatctgttttctcggagagattcttcccgtggatgagataagagatcccaatttcgccgtttcttcattcacaagagttgcatacaaactgtttgatgaaattcctaagagaggatctgattattaggtcgttgctatttcactaagctgattttcaaatgtgggttaatgggtatcatcaaataagaatacatctaaactctgaactcagtttcaaggcaaatccaagtcgcttcttccgttcattccaggttttgtatcatccttcagttgattcatatgaagatgtattgcctcatgaatggtacgaaacgaaactcccagttctgaagaaactaaaccgtgcgttgagagatgttgatttagtcgacggaaagctagaggacatcaatggtgtcatcgtttatgatgatggtatcacaaagaaaatgcaagcatttaaatctctagctagaatctttattgggtctccttcaattcagcagaagcttagagaagagggacggttcaagttcccattttttgggagtgaaagtgaaagagagccattggtggtgaattcattgactaaagtttgcaactttctcaacgtctcggcgcaacagaggaagctagtgaggagcactgtgtgttcacaggtaacgcagtatcgtatatggagaggtactcttgaagatatattgaatggtcttaaagaagaagttgattggttagttgaacatagagagatgagtcaaggtagagtattggctcagcaagtgatattgtcttgcctcagattcttatctgaatcatcagtttcatttgaagtcgagaaatcaacttcttggatgcggcctgtgccagctagatatgcgaaagctaatgcttctgcgaaatgggaagatgtacttgatatggtgaatgatctgagaaggtatcttgaacatgatgaagaaatcacagtactttaccatctggataagcttgtatcgatgaaagaagggcttttgcagatcaaagatgtgtttttagacaacactattggattcagagaggttagacatcaagagcaccttgtgtacagaaagctctcaaagctgttgggcagtccatcaccgtgtttgtttgctctcgtcatgtatttcctctatggccgtgtgcgtgacatcgaagttgatctctgtggagggttttacaaggagaagagcgagttcttgtgcttaagtatggggaggatcttgacttcaacggatgagaaaatgttggagagagggatgaagcagttagatagggcattgggtctctttgagtttgtgtgggaaacagcaggaatgaaagagactcttaacctacaaggccatttgtggtgccttggagctgaagaaagatccatcacatatcgtgggaagacgttcttcgtgcatgaccttagtctctgaagttttgtgaggtacaagcaactacctgtaaactttgatgtgttcccataaaccttttgatgtttgttgttgtttagagccatagttgaaagaaaaaggatatataaacttaattgattgatacaaagagtttgataaaaatctgcagcatggtttcattgctttaaaagaaagcaatagaattagcattaaaacccacacagctaacaacatcaaagttatataatattacagagatcaacctcgatgaaaagttcccaagactatagcttaagcaacagccactccatcatcttctcgatgttgttgctttggataaactgtctgtgaattggtttaaacgctatttagcaggcgatggaggttgctcgaggagttaccagaacagcagtctttcctgttatcggcttcatacttgctgcattctctagccttgcccatacttctttcctcttttccgcagcagaacattgctttgcttcgtcctccttaaagcgggcgtggcaagacatgaacagagcctcgtccatttcgcagaacatttttcgtacgtttaaggttaagtttagcacggattggttccagtggttctgagcattcttttctaaagcagtgaacatgattggtaggatggcttgccggttatgtccaatcaagtttacaatttgatcgttgttccacaagaataaagctctttcagaaacctgaaacacaagaagaccaattggttcaaacttagcttatcttagactcatgcagatcaatcatatatgagaactatgtatgaataggaatgtacctgaaagtgggaactggtgacacaacaagcaatccgcaagaacaaagggaccatgatcttttgaaactccatcacactcattgcttctacaatttcttcgacctccccgagaaacatcacttccttctgactattcgtgataggccagaacttcaacaaaccctttatcacaacactgcctagtttcggctctttatctatgaactgagtgatacaataagaaagctgctgaaagtagtttccaacagatttaggcttgtgcaatggaatcaacactctccacaagaagatcttatgctcttctttcaaaggcaacgcaaatccactcactatactcccgaaaatctccaaaagctcagcgattccgctatgcttctctgtctcaaacacaaaccggtagaatatattgctcatggacttgcgtacaaatggcctatgaaccatgaacttcccatatacccgatgcagaatcgtcttcaaacactcccgttctctaggatcctccgaatcaaacaagtcaagcaacctcacaatgaaagcatgatctaaatacttttttgccactttagcatcaagacacggagaagtgataaacttaagcaacaaatcatacacaatctgcaaatgaggccaagcagggtcaaacatcggttcatcatcatcgttttcgccaccagaactagaccgataattcggaggaaagaccctaaagagattaacagcacacattctacacattgcaagaatagctggctcagtgaacttaacagaccctgaagctacaaaatccaaaagctccaacaatgtctgccttttaacatctttctctatagagtttttaccagggtcagagaaatcaaatgtcacacaacagagactaactttactcacaaagagattcaacttctcagagcttggtacatccttaaacggtaccaaaggctcaataccagcaacaacactagctgggaacacagcagatgacatacgcttccctgagttagatcgaaccggacccgaaccaccaccactagtaccggatctctgaaccggagacgataccggacccgaactcgaacgattcagctctcctgaatcagattttgaagacttcctcggaagtttactcagaaactgcttaaacattctctctttcccaaaaatttcaaaactttcacaaattgggaatcaaagaagctcaaatccacatattagccctaaattctccgacaaagaacatggatctgacattaaaaaaaaacagagaaacgtgtaatgtgggtttagatccgaagaagaagcagagaaaaaaaaaaggttgacacttttataatacccaatacttgaaaaccctaatcattaccttgctttctccttcaaaatcttattctcatgattccagtatccacgaacaaaaacattcctagagagagagagagagagaaaaaaaaaactgaagctagagagtttttcaaaaaaagaaaccaaatctggaagaggaagaacaaaaaacagagtttggattttgagaaattttatgattcgttacggtgttttcttcattgtttttttttagatttctgagaaagaagaaatttgcaggaaaattattttaactttcctaattttaattttgtttttttcctttttgtctcgaaaagacagcgttttcgtttcagttttatttccgataatataaaaattagaaaacatctcgcatgcaaattattaacgtccgtttgatgagacgttgacacgtaaatccaaccgttggatttgtctgagagaggaatcctaagtaatttggttcgctaaggcccatttattattatgagcctattattaaagcccatttatgattttggccttatcacaattcacaagagtatcctccactaatctctagaagaaactgttttcgtcaccgaaccagctgaaatctttttcgcaacaaaacaaactctatccccaaattcagaagctttttagggtttcttcttcctttcgcacatatcttctccgattgattttgcagtgaaattgtgtatctttttgttgttaatcaggtaaacttttcatggtcgccatgtttattttttcgctagatcgagctttttttcttcagtcaatttcggattttatttggtttatgttggtgtatattttttgatttggttgttgttgaatcttcttagaaatgggttttgtttaattttgaattttgattttgtttttcccctaatcggaaatgatgaaaatggagatgtgtgttgatcggagtatgttataggattgaatcaaagtttctgttttttttttctcagagctgttgaagtgaatgtttggatatagctgtggtggtttcgtatcatgtccagtaatatgggaacagagcttattgatctggagactgtgaaagcggattcagatgcttttggagaaacgaatttgatggagttagttggatcaaatgatcctccttctcttcagcatatctcagtttcagagattgagcaagagcctatggaaatatctgtctctggtcctttgtcattccaatttgagccagaggctgtctcttttcaatcatctatgttggttgatactcagtctttgatgcctcagttgcaacttccatattctgtagagaggtcagtagctgcatgtagtaactcagtgacagggaagcggaaatcgccaccagagtctactctcagtggttctgctacttccgagaagttagatgcatctaacaagcgagtagagccagtgcaccacagaccatggctagaacaattttattcagaatgtattcagcggggtcatatgccaccacctgctactctttctaccaagacagaacatctaccaacgcctgctaagaaagtaaggcaaatggaacctgcttcccaaaaatctgggaagcaagtgatgaacaagaaacaagcaggcttgtcacaagggtcggtgaaaacactgaatgatggtaacgagtctttgaggtctaaaatgaaggaatcattagcagctgccttggctttggttcacgagcatgaggagtctccgaaagagaaaaagaattcagaaactgaagaagcaagtgttccagtagctgatagtaatgagcctgcgtcagcctgtggtaccagtgttacagtaggtgaagacatcacgccagcaatgtccacaagggatgaaagttttgagcagaagaacggcaatggaagaactttgtcgcaagagagttccaaggacaccaagatgaattatgttaatcaatctgatgtacagaaaactcaatttgacgaggttttcccctgtgatgatgttcgttttagtgatagtatttttactggcgatgaacttttacagggtaatggcctctcatgggttttggaacctgtttcagattttggggagaatgaaactcaaaagtcgtttgaggatccagagctcttggcatctaaaattgagttggaactttttaagctatttggaggtgtgaacaagaagtacaaagagaagggaaggtctctcttattcaatttgaaggataagaacaatcctgagctaagagaaagtgtcatgtccggaaagatatctccagagagattatgtaatatgacagctgaggaacttgcttctaaggagctttctcagtggcgacaagcaaaagcagaagagatggcggagatggttgtcctacgggacacagacattgatgtcagaaatctggtgaggaaaacgcataaaggtgagttccaggtagaaattgatcccgttgacagtgggacagtggatgtctctgctgagattacatcaaatagtaaacctcgagccaaagcaaaatcctcgaaatcatctaccaaagccactttaaagaaaaatgactctaatgataagaacataaaatccaaccagggaacatcatctgctgtgactctgcccccaacagaggagattgatccgatgcaaggtctgtcaatggatgatgagatgaaggatgtgggatttcttcctccaattgtatcccttgatgagttcatggaatccctgaactcagaacctccatttggcagtccacatgaacatcctcctggaaaggaagatcctgcatctgagaagagtgactctaaagatgggtcacattcaaaatcaccttcaagatctcctaagcagtctccaaaggaaccgagtgagagcgtctcttctaaaacagaactcgaaaagactaatgtaatttccccaaaacctgatgctggtgaccaactcgacggtgatgtctccaaacctgaaaatacatctttggttgatagcattaaagaggatcgaatatgggatggtatattgcagcttagttccgcttcagttgtctcagtcactggaattttcaagaggcaagtctctttcattactttaaactcttatctcgtattttggagtggaacatagtgataacaaaccatgatagaaatgggttattagtaccaaagatatgcatgaagctaagtttagatgcttgtttaataggaaatagtcagactgatgcttgtttaatttgttgaagaacagatggaaggagaaaaagatcttagacataaatgttttaggtatctctgatttatagattatctctaactggaattgctcgtgcagtggtgagaaagcaaagacaagcgagtggccaacaatggtggaggtaaagggtagagtgagactcagtgcgtttgggaagtttgtaaaagagcttccgttgtctcgaagccgtgtcttaatggtatacaaagtttattacgtgcattatctttgtagtagcattattagcattagcttcactctcttccctgttactataacgagcaataatactagatccacaaaatctcatctcaatattacaagtcgtttcttaatgcagagactaggcttctcattagctaaaacatggaacccagaaagcaaaaaagctcactgttgatctacatctgtgaaacaggaccggggcagtaataaaaaaaaggcctgattgaccagagaatcaatcaactgtggattgaatctgaaattttgtacaaaatcatgaaattttgtatgccaaatcacttgtagatgtattgttaactaggtaggatatagaatcatcaaaaatgttaccaagaatctcttacagagagagagttacaagaccacaaacaccagaacttggtccattaacttacgtgcagatcatgattcatgacccaaaatagaatctttcgaaacatataactttgtcttataggaaaaagtttctacttttatgcatttttcgtaagtagtgtaagtaattaagttggtacatcaaattgcaggtaatgaacgtggtttgcaagaatggtatctctcagagccaacgtgatagcctaattgaggtattaattctaattctgatttcattattattcttttaatttttattgcataagacatttattagttttgctttaaagtctttgcctttgtcctttttcttgagtcaggttgctaagtcatacgtagctgaccaaagagttggttacgcagaaccaacctcgggcgttgagctttacctctgtccaacactgggtgaaaccttggatttgttgagcaaaatcatctccaaggattatcttgatgaggtcaagtgttcagaagatatcgggttgattggtgttgttgtgtggaggcgtgcagttgtcgcgtctcctggctcacgccataagccgggattcaaacgtcagcattcttctacaggcactaagaggtctgtattggctccagaaaaccaaaagtctagaagtgtgagtgttacgaatccttctgttgtaaatgttgaatccatgaggaatcatggtttggttggttgtgatgatgatgatgaagacatgcctcctggatttggtcctgtagctgcgaaagatgacgatgatttaccggaatttaactttaattcctccagtggaccggttacttcttctcctcgaccaccgttgcagtcccggtctttggatcaagtaagggagctcatactcaagtatggaaattcaacaggtagtggtagtaaacgaccatgggatggtcatgatgatgatgatgacgacgacattcctgaatggcaaccgcaactgccaccaccacctcctgacttgagtcctcaatttcatagcggaaccatggccagaccaccagcacaacgacctgttgcgggaccaccgagtggatggaaggccaatcaaaacgcacctaggcaacaacagtacagtgcacgtaggaacagaggattttgatctttgtgaatacgtttgtgtaattaaagtttgttaggtctattgacgtctctatcatcggcttttaagtgtttctatagaattgtaaacctttgaataatggagtcttttaagcataaaagtttgaactcaacacaatcaaggatttgtacagattacaggaagaaagatctcggttcttcaacccgctaagacccgcttgagagcggatttctgctccgttgtcaatcttgcgggaaactgaacatcgaacttaatcttaagatcacctttgtttcttggttctttagctattggcatcccttctccaggaaccacaaactcatacccgggactcacgatttccgcgacaccaacgggtagattccgcccatcgagggtgttgatattcacagttgttcctcctatagcttctgcaagcgttactcttctgcttgtgatgagatcattcccatctctcgtgaacaaatcatgtggtttctcgtctattacaaacaccaaatcagctggtaactgattcacttgctcatttcctttgtctggaaactttatctttgtcccttttttccatcctggtttcacaacaatcgtcaaaatctctgtctcttgcgcttgtctcctgcaccatccaaagaaacttgagaaacaagtctaaaaagattaaaaaatacaaacaaagtaaagactatagagaaagttgttacccattagcatcaacaatggatctagagatcttcattttcctagttgatccagaatacaactcttcaaggctacaaggcaatttactctcaaccggtggaggtttcttaggcgcaggagtgccttcactgtaagttctgaatatattgttttcgctaccgttgtttccaccaccaaacccgccaaacattcctcctccaccgtctgattgaaacctcattgaccttccaggaccaccagctgaaccaaatccaaatggactacttccaaagaactctgcaaatatatcttccgcatttctagggttaaaacctcccgctcttccattgtttcccgtgctcccgggaggtggcatatcgcttaatccttcttccccgtattgatcatacaccgctcgcttctgcggatcactcaaaacctgaaacattacctcatattcttagcaatgcagcaacattacctcatatgcttgaggagatacattttgttttgcttatatcccaagaaaacaaactcatttacatataactttgaattattagctaaagcaatggatctaagggaacaagggaataaaaattagcaaccaaaataaagactcgcctcataagcctcagagatttgcttaaacttggcttcagcttctgttttggtgttagggtttttgtcaggatgccatttcatagccaattttctgtaagatttctttagatcatcctctgttgcgttcctattcactttcaatatatcgtaataatccaaacccatcttttttttgctctcgttttatataatttaatcttctcttctaaaacaaataaagaatcagatctttaaaatctcgaatatatgacaaaaaaaatgaagaagaaaaaacttcttgttctgtagaaagaggacaaacaaaaagatcaccgacttgttttttttttgtttttgtttcctttctttctattggaacagattgtttttaataatttactctaaaatcattatatgacagcttttgcaggtttaaacacacagaaattcacggaatctattttcctcatttttcgcctctgttcaaggacttatttagttgattctaataatagtacccagagagagacatatgagcgcaaaagtacctgcatatagatttatggcatttataattttacataccggtagacaaaataggtccaaactgtgtttagattccatctttttacattgacattaactacaattattttggttgactaacgtaagtttcggtcataattagcatttaaataaggaatgaaacatagcaacatatcattgatacggtaatagataagagagattcatattaatatcgagcaccaagagcagaggttgtaattcatagcttttctcaaaaccacaaaagaaaattcccaaattctcaaactgaaatctttcttaaaaactatacattgtactctcttttcccagagacaaagtggggaaaatgtagaaagagatctcctaacaatatatcatgaacttcatatcatccatttgcaaaagaaacttaagaagaaaaaaacttcacatttttttaaggactgatcaaatcaggaggaggatacgttagcgttgcggatacccgaagatgacgatgcactactcccatcattcttttgtttcgaagactctgtgatgatctcaggtacatcaccaatgtccagtgtgtctggaaggtattcctcagcttcagtactgtaaatctgtagaaaagaaacaccaaacgtcattactatgcttaatgcaggaagactgaagaatgaattacctcgagttgattcagcatttcgatagttgcatcaagatcacaagtgttagccaagtaaacatcattgatagactcttgtgaaagaccagggtatgtagctaatagatactcaatatccatgtccatctccaaatcctcatccttcagctgatgattgtataccatctcagatggtgacttcttaggtgacatttgagttccttgataacttcccattccttgaactccatacccataataaggttgttgctggtggtgctgctgctgcatgtgttgttgtgtgacaggctttgtatcaaccaaagaaccttctcttttcgagagtggtacataagctgctgcgtaaggattcaatgtagaacttcctgacttcattgctaagtgacacaatccaacaaacgaaagaagagttcaaatcggtgactacaaatcagatccctaattgttcaaaaattgattccaataagaagaaacgtgaccttaacctaactaatcaaaattgatgccacaaactcgatgacctaattcttcgtgatgcttttaggtacagatcaaaatcaatcaacgcaatctttaacagaaacgaacaacgaaaccctaaggaatcgattctaagattctaaaagcttcataaacatagttgaatcatgaatctaacggagatagtagataaacatgaatcatgaatctaacggagatagtttcttctcccatgatcgaccaatcaaagcacgattcgcgtatcaaatcaacatagatcgaagaaatcaacagatagaatcgaaagaaacggattcaaaacggaagaacaaaaggcgagatgattgcgattacgtcaacgatcgtcgtaagacgcttaccttagagaagaaaatccaaaagcgtcgttgaagaagaagaagacaatggtgaatatttgcagagagagagagatctaagaaacgctgaaaaagtggggagaggaaagaaaacgactcttttgatcaataatggacttttatatgcaacaaagaagaagaagcgtttacttgaaggtcgtatcattttaggggtctgtttggaaacgtgaattatcttatccctaacctggttattgttatcctaatattcgttttctttataaaaaaaaatctttgatatttttacctggtatgctgacgtgtcttttacaaagtggctacctcttcgttcctaaatttatctctacatttgaaaaatgcgtgactaaacgagatgaaagtgattttttcttatgtcctactaatcatgattatataatttgttaatgtattatttaaaatactaaatcaattagattttctataaccaagaaaaaagaattaggtcaatggaatctgcccaacctaatcacggacgatgttttggttaaacatatcgttaagatttggatgaatcttttatgtcatgtatggccggttccaagtgtgactacaggatttgggcaaattaacaaacacatttataaaacatttataacataatttagattaaacacacaatttaaaaatcaagtcttagttttattgtttggttttgaatctatatatcttaaggtcgattaatggtttcgtagtgcttcaatatgttatatatggtggtgctcctcttttgtaagttatgatcatcagatttggtttagtagacatttcggttaacttaatattaaggttcacaacaaacaaacaaacccccctaaaaactagcatcatcacatactgttttatgagcatcatcatctcagacgctaaagtagtgggacaaattcatttcaaatttgccaagtcaattcaaaataaattataccaaaaatcttaatttacgctaaactagtgggtctttttctccctaaaactaaacgtgttatttacttattcatcgtctcattgtaatagaattgaaaatgaccaagagaaaacattagtttttagacattctcggtcaaagccaatactgtaatgaaaaaacaaacagtttcacataaatctactaaaaatagcgttacaatttttttactctacactcacatctaataataagaatcactacctttcactgctaatctctctctctttacaaatccaaatcttaaagaaaaccaaaaaaataataaagaagaagaagaagaagaaggagagtgattaacaaaaacataaaactccattagagtgtgatgaggatttatcaaccaaccttattaatattcaccaccgtcgtcttactctccatctccgccgtcgctcctggtggctcccggcaacttttgtacacccgagacgaccctataaccatacctccgtacctaatattcgaaaacgtacggctcgaaagagcttacgtggcgttacaagcgtggaaacgtgccatgatctctgacccgtggaatctgacaactaactggtttggatcacgtgtgtgcgactacaacggtgtagtatgctccgaatctctcgacgaccctttggttaaaactgtctccggtgttgatctaaaccagggagatatcgctggtcatctccctgaagagcttggcctcttaaccgatattgctctgtttcacgttaactcaaaccggttctgtggtacactcccggtcgggttttcgcagttgagtctccttttcgaacttgatcttagtaataaccggttcgctggtaaattcccggaagtggtaatcggtttaccgaaattaaagtatcttgatctccggtacaacgagtttgaaggtgaattaccagaatctttgttcgataaagatcttgacgctttattcctgaatagtaaccggtttagaagtaaaatcccggttaacatgggaaattcaccggtatcggttctagttctagcctcaaaccggtttgaaggatgtataccgccgagtttcggtaaaatgggtaagactctaaacgagatcattcttatggataacggtttacaatcttgtatacctaatgacatgggattacttcaaaacgttacggttttggacattagttataactggttggtcggagagttacctaagtcgatgggtcagatggagaatcttgaggtgttgaacgttgaacgtaacatgctctccggtttaataccggatgagctatgttcgcttgagaagctaagagattttagatacgggtctaactatttcaccggagaaccagccacgtgtcgctatctagagaattataattatacgatgaattgcttcaaggacgtgagggaccaaagatcgatgatggagtgtaagatgtttttgtcgaaacctgtagattgtgactctttcaagtgtagtcctggctcttcgtgtttttctcctcctccgagtcaaatatcaccatcttcgcaaccattggcaccggcgccatctcctacttcaccaccattgtcaacaccgcctccggctagaccatgtccgccggtatactcaccacctccaccaccaccattgtcactggcgccgtctatgaactgatctatctatttgacatttgtagaaaaactagaaagcgcatgtttagatgttgaaagtaaaagccagatgagatatatctacggtgtttgtagtgggaaccaaatgaggttacaagtggaggagacaacaagctgaaaatctttaggacaccgagtgtataaggacttgtctcttttttatagattgcatgcatgtgcgtgtgtttaattttaacttgatataattttttgagtccatatttcttgttgagtgtttttcagtttcattaataagaaccaggttagcaacctctttaaccaaaaaaaagagtaaaggttaggaaccatttgacggcacggatcaacgggttagttttggatcctatgactatgaatgtgggtgaccacctaataaagtgtggtgcatgcagtatcgacttttttgtcacaattaagaccatatatcgaaatgtacgaatgtttttgcaaagtcacatatttttgaaatatgtacgcgggatatatggagtatatatatataatatgtgcctttaaaatgcatatcaatagtggttaaatggattttagagtcaatttttgtagtactttgataaaatttgtattctgaaaggattgaaataaaagtttttagctggtgtatgtctacatcactattgaaataaaacagccgttacaaaacgtggcctaacagccgttatcgttggtttaaggacgaaaatagttgttagttacgctgttaggagagctgttaagaagtattaacggtgagtcgatttggccggatcaactataacttataagttaaattaaaagtcaactttttactaaggtataaaacggtcatttcaaaagttcacggttaatttggcaactttttgaaaattcagttattaaataacattttttctcttataaattagagagatttccaatcatttaagttgccaggtcacacccacccgtgtctcttaatcaagtccaacacgtaaaatcttttcgatatttatttgcgctttgaaggtcaaacaaatttaattgtatgattgagaattaggtaactaaataagacattcatgtaatggcatcaaatatttatgatctcagacattttggaaagtttgaaattctttggtgacatctggtcttatagatattttgctgtcaacttagggcctgactggtttaaacgcagcgggtgcggttgcggttgcggaagtttgcggaaacgggcggttgcggtttcaagcgttatcaagtgttttgaacgactggttgagcgtttggtaatgggtgcgtttgcgggagttttatgactggtaaaccagcgggtgcgatagtaattaaataaaaaataaccaaaataaatataatatattactattaaaaaaaaaaatacaatatattattatgataaattgataatatttgaaaaattaaacatacttaataattaaaaccataaataaaactgaaaattcaaaaataaataaattttataagaaaaagcttaatactttatgcatttggtacatcaccaaaattgcatcaagtagtgtgataaactgtaaataacgttgaactcgcgggttttccggattgcctctatacatatgataaagtttcttcaagatatccaaacgatttttaacacatctccaactcaaattttttccaaacgttaatattcttaagaatattttctttttgaacatcacttagaaatctgattttggggtctttggattcttccgtttatttctccacaataacctgttgcagtaacgcaaatgtggtctcgtttgaccaaatgattttctaatcgagaaaacaaatcaaaacatgtattcaatcaaaaaactcaaaaaaaaacaaaaaaaaaataaacaacaatgccatgaaatattccgagaattacactagctaatgaatggatgaaaggatagatcatacttacgtttgattcttgattttgactttgatttttgtcagtttgggtggatgccataattgagagaatagggtttcattgattagggttttctgataagaataagtatagggtttgggtggaagatataattattttaattaattaatttttttttttaacctaaccgctaccgtccgcaaccgcaaatacttgcgggaaggagcttttgaaatctggcaatttcgaacggtatctagcggtttctatgattggtgccaaccgctaataaccgctaccatctgcaaacgctgcgtttgcaggtggcagaaggagaaccaatcaagcccttaaaacatatagatttggttgacgtttcttaacccaaagaaacaatcaaaattcgaagtatgtggaaacatttcctttataagaaacccacacgcatttttttttacttatataaatctcctcacctgcaagagaaaaaaaaaactttcattttattcgtcgtcagtttcatcttgttgcttcggagcgagcgagaattatcgtcggagaatttatcgtctctctctctgaaaattctgatcggtgaagaatcgtcggatcgaaagttcgtttatcttctcgtttacgtttccgtgatttaaatcctttggggtttttttttcttggtaatgtctgtgtttctgaatgtgtggttgatttttgttcgtacactttactttgatcgattaggtttatgtatagttaattgaaattttttggaagatttcagaagaagaagagaagaaacaatccgtaatctagacccttgaattgacctaataataggatacatatgatgactatgaagcagtctttgagtggcagggttcttaggggggtctttggtatctatctgtaggagggcttttaggtgctgtttcgggagattaaagccagattcaaggtgagtctgagagcttggttcttgtatcttcttgtttaccaatgggaatctaggtcactgagaaaccatccttcttgttgatctagtggaaaaaatcgattatttttctatcccaagtagttgctttttctttcttaaccttaacttgtgcaatcttcattctacctaagcatttccccttgataatgaaactctttaatcatctctgatttggccaagagtgttctttttttttgtcatctcatctatggtggattaacagaggttcctcttagttattcttcaagaaggcggcatgaatgctcactttgtttgtagtctgcttatctcagctatggtctccatagtgagtttcccttagagcatatctcgttgttgtccatgatgaagtttttgctccatgcggatcttgtgaacttgctagtagaatttttccgggtaacggcatcagaagatttttattccttcgattatggggttaccatttaggtcaagccaaaacaggtcagctttaaagatgggggtccattaactaggagtacccttcaagcctttgtttccttaaagaaatttctgattcgtatgttgactgaagagatctggtgcaaagtggcagtgggaggtaggtctatcctctttggacacttacccatctctttaaaacccggttatcccaagttttatgtcagtcccaaaccttgtttgatggtgtttgccttgcttttacgataggttggtcatatccggttgaaactggatagatttcccaagattgaaggactgaagtgaacactcaatgtgctaagcttttatttctctatgaaagctccatcaaccaagagggctgtttttagttgtttaacagggtatttgtagatcttcttgttttggtgattgttcctcttggagaaagctgattggagctgtttcaaaaatggattgtcttggtgtggtgcaatgtagatggaagcaacagttcatcgagtttttttgctggattttcaggtgactgataatgtttgcgaaatgaggaatagattttctaaatattttcttacttgcaggtttcataagctttccatcaactagcagtatctgccaatatcacagacagataattcgtaatgggagacgtatatttcaaccatttcgctcagcaactgcagatgtctgaccaagagaagggtgaaatgtcaagacattcacaccctcattcaatcaatgaagaatctgagtcgtcaactctggaaagggtagcagcagagtcattaacaaacaaagtccttgatagaggactaatggagtatgggtaggttttactccctatttgtatattcttagctttgagcttgtttcttggatgaatacccctatgttcttgcagatgtccacattacagaagaaggtgttgcattagagctccttgctgtaatgagatctttggttgccatcactgtcattatgaggcgaaggtagaggcttttttcaagttatagatttcaggaaactactttttgtaaccgctgttttcacaaaatctgtatacttactcttgcaatcatgtctttggagcagaacaacataaatgtagatcagaagcagaggcatgatattcctcgccaccaagttgaacaggtaaagtagtctatatatcttggtttctcggagttattattttatgttcaattcccagttgacaagacctctatcttcttcttcacaggttatttgtttactttgtggtactgaacaagaggtatgttttaactcttacactttctctggattttttctgcgtttagtaatcagacattttcttaactttgttggagatgtaactctgtattttctctggtaccaggtgggccaaatttgtatccactgtggagtgtgcatggggaagtacttctgtaaagtctgcaagctctacgatgatgatgtaagtctctgaggagaacttattgctaagcttgtttgttgtatccatatcctttttcttatgctatataccatgccctgagttttccaggcttttttttgttgttaatggttaaccattatgttgcttatcttgtttccagacgtctaaaaaacagtaccactgcgatgggtgtggaatttgcaggtacattcttggacttctctttaacatacaacatgtttgatttaatccacacgatatatatttgttcataactaaaatctctttttcgtttcagaatcggaggacgtgaaaatttctttcactgttacaagtgtggtaagccatttactgcatcagatttcagataacctcaaattttccgattgggcaccgctatatttgttgatttttacaatctaaccagctctctgattctcaaaccaggctgttgttattcaatcctcctcaagaacggtcacccttgtgtcgaaggagcaatgcatcacgactgccccatttgctttgaggtattacttattgttggtttttgttctacttctccactgtaaacatgagcgtccctttgttaacaaaaactgtcctggctggttttcttccagtttctgtttgaatcacggaacgatgtgacggttttaccatgtggacacacaattcatcagaagtgcttggaggaaatgagagatcattaccagtaagtacattataaaattcaggggcttgtgttccattttgaaatgttgttgtatatatcaactgacaactccaaactatgcctgcagatatgcgtgcccactttgctcaaaatctgtatgcgacatgtcaaaagtgtgggagaagtttgacatggagattgcggctacaccaatgccagaaccataccagaacagaatggtcagtatgagaacaaaacttacttagttacaccttatcccctaaccaagaactaaaagtctttttgacggtgacaaaaacaggttcagattctctgcaacgactgtgggaagaaagcagaggtacagtaccatgtggtggctcagaaatgcccaaactgcaaatcatacaacactcgccaaaccagaggctgaagctttttttgaagttgatttgctatcaaatgcaattaagagcttttcacttgatccaatagtgtcattggatccttaacttgaggactgggtctctcgagtctatctcttctcactctcttcttcaatattctctgagtcgtctcttgttcactagtctatatgtttccttggtgttgtttgatggtctggttagtttccattgtgattcatctcctttgtaattctgcggctttattgaaaagtttcgtttaatctgttaaaaaccctaaaaaatttgaacttgtatgaataaaaaattttagctgctcgcatatattaataggtttagagactcttattaaaggccaaaagcacacgtctcaaaaatatatccgtttcctcgcttagatacgaaacctctctctttttgaaatctctctgactctctctcggcgataatggcggaatcaccatcgcagagtgatgcacagcttgttgctcatcaatctcctggtcagcaagctgattcggatctgacgtctctcgtcttcggtttgttttttcctccttttcctctgatccttgttcatccaatttcgaatttcgactgacctagaaatcaggattaagcgtgagttcttcatgtttgtgaagtcaaatgctcttatgatttggtatttaacgagatttgtgcttacttaatggcttaatcgcttcatctaatcttgatttcgcttaaaaaactgtggaatcgagatgtgtattagaatccgccattgttcgttgcttctctcgcaaatagatctgtaggtgatacttagagtgaaagatgtgcattttcgttggttttatcaattttggtatctcagagttgctatattttgtcatccagattctgtatactctctatacactcttctttaaccttttggcttatgcaaattgaattagtaaaccttgttaaacgtttcatggattagatcaccagtgggtggattgagattacaagtcaatgttgtgtctatttcgcgaattctgtatgctctcgatacactatcctttaactctttggcttgttcaattgcatattagcaaacaccataactcgttttaaaggtttatcattatatgtttcatggattagaatcagttgatggattgagactacaagtcagtgttgtgtgtctacttctttagccatctcctgactgtgttgaaaacaaacgcaattgcagaaatgtcacagcaagttcagatggggatggagaatatgctcaagatggtttagtaagtattgtttatcttctgtttactacaacgaatgactatttctgctgagtgctgatccagtgccttccctgcagtgaaatcgatcaaaactcggttggaatcaaggaagagattgagaaatcaaaggattttgctatggagaagaaaaggatcctcgaggaagagaaagaccagtttcagaaagctgcttacactattctagacatgctaagcaacagccgaggctaaatccaagtactcgattttaaacctcttcacagcttcacttaaacaatgaaactgctaaattcattattacctgatccacttcctcatgtatcaggtgatgctcatgaagaaactatatcaggtaaaggaaatattagaaatgtcaacaaagactctcactggtttggttttggatccacatatataaggtcgtattagctttacattgctattactgaaacttttatcacaaagtgtgaatccagtatgcagtatatattcgtattcaagtgaaaaactcgtaaaaacagataacaaatggaataagtatctgctcaacttgtcagaattatgtagtatatgatagaatttctttgggccgtaagtttagtataaggaatcaattatgtgttcaagtcgtgtccaactagagcaaaaagaaataaaagccgaattactaatttttccagaataaagggactaaaatagaaatataagaaaatacaaggaagaacaaaaagggaaattaatagccctagggtgttgtagggtaaattagtaaatagtaaaatcatttcctcttttggcgggagaattcccccagaaaaattctccaattttatacattttccactcccacaaaaacccattcatcttccactttctctctccgacgaaaatggtaacgctccgccagaggacgatggtggtcaccggagaaccggaacagaagaaggaagaagaacgactctgcgaagacttaacgattctttcctccgattcagacaacgattcttcctccgattcggcggtgaagcacttgcgtggacgttgggaacttgcttcggttctcaatttcttcaatgtaatgaacctcttagtcgtacataccaaaggattcgattttgcctttttcagatgaatcttcgttgtaaacggaatattctttctttctctctctcatgtagtagattctagggatttgttagagcttttgcttcttgcatgcttcaatttcatgggaaattaaacattttgcatcgttggtcatgtgattttgctaaagagttttttgttgttgtgaattgtgataggtctttggaccacttgtctcggagaaattgaagttcacagctgaagaaattgagatgggtcttatcgagtccaacactacaaatgctcagcttcacattgcacttttgaaggtttttgatttttgttctgttattgaccttgcagctgttaatggtatctaacaagctcaagtttatgtgtttgttgccttataagaaaccttctggatgtgaatttttcaacaggggataccaccggtgaataaaacgcttgacgatgcaaatgcatggatcacggtgttgtgtaagaaactagctccatggtggccatgggtaaggccacactgaactcttttgttagcttatatcttctctgtggttttctttattgactcctgtaatgtcattgttgcagattgctaagggtgaaattcatattactgttaacaaagggtaagtggtgaaataatgtgaatttattcaggttgagttggtattgataacaactttcttctcttctgatgtatgaatagggaggaaatatctgaataccaaggacttgactctattaaccgcctgaagattttgaaggcactttgtgagcttcgagttcaagtaattttcttctcttcatttaagttgttgaagtgtatttttaatgcatgcctctttggttacacatatggaaagaaaaaactatatcattactagttgcatttgttactcatcgtcttgtttccattggtggatggtgtagcaagatgatgcacgttcgtatattcaagaaaataccaaggaaggagactgggattctagtttacgcaagaggaagctaggaggagatggaaagaagacttcttattggtagttacacttacttgtcctatcacttctttctatgttactacatctggtgtgaatgtgatcaacttttatctttttttttttaatttcgttctaggtttgatggtaatgatatccaaggttacagattatatagggaagtcaatggaatctcaaagaagaatgctggctcagatttatcttgtttgagctgggaaactgaagcaaccaatctagatgaatttcagagtgtcgctgtaagattttgattgttgtttatgcttctcctctttaagatgtgtggaactatttttcattcattaagtatgtcctgtaatggcagagagagttatcatcaagcaaagcttcttctttggctgcaactgggcagatgattgagacagaagctatacccgttgttgagaaatatcataaagtatctctcaaattccttctttatgtttatgcacatatctgctatatcatgttttttatggtgtttcaatttttattgcaataacagaagagagaaagggccataaaaaagaaaatgaaggaagagatggtcgttaatgtcaatttctcgcgtcctctccgaactactcgttcttgtcgtaaccacatgcctgctacttacacctttggtatagtcatattttcttgcgtttcttccgcttgtttgatatattatttacctgttggcgtggcttattagtttgcatatcttattatccagacgagtatgacaagatgatcagtgatgccgtggaagaaacagagtaagaacttgacttctttcttaatccaagtcatctatccaccaatatttagcacatatgagatagtattttcatttgggtaaatcaactctcaaataatctgatgaactataatgaaaccactgttgatcccttttcaatggcggatatgtgtagactcgttttttaatgtgtaccattggtttgagattaaacatgctaatgctatagctcattcttttctgtctattcatagtaagagatgtaaattgatttactgacagctttgtgtcggtttgatgagaaagctttagcatgagaaaaccccatcattcacttctcttcttgatcagggacaccgatggagatgaggtagaaggaagggatcaacaaagtgcctcattggactcaaacgataagtcaacagaggttgaagcagctgaaatccacaatgacgatgataaagagaatgagataagcaaggaggacgcagagccaaaggaagagtttggtgccaaaaacaggttgagacaaagagttaccaggaactcagccatctgttaatttaatcctcaatgttgttgaagaaatagtaaaaagcttttgaacaacaaaacatcgttttgtctgttggtggagagaccaagctttttgattagaaggtttaggactttttttggtgtgtggtgatataatatatgatgatgatatactccattcctaacagtgtagatttgactcttattaattattatgtggtatctccccatctttgatgtatggtaaactatattctcagaaaaaaagtttaggtattcgattataagtagtttaaaatagatatttcattgtgaaaatatgattgtaaagagtcagggtggccgagtggtctaaggcgccagactcaagttctggtcctcgtaagagggcgtgggttcaaatcccacttctgacatttaattttattaaatttttagcatgttgtaattttgggcaatggcattatgttgatataaattaattaacacaggcaactcagtaacaatactagataactacagaatctggtcacaaaactatgcttaatgttcccatcataatacaacatattacataggttaaatagaactaaaactggttcaagaagattcagtggctccaccgtttgatttctgactctgcgatatgattctgagcttctcatatgagtcagcacaagcgtgagcataatcagacagtgccctgaagatctcaggcaatctgatcttcaaactgtttagagatttctccctcacctgaacacaatgtctctggtgagcttcttcttcttcttcaagccttttcttcagtgtctccacagcaattctcctctctgtgacatgatctctggagcttgttgttgcgtcgtccccgccttcagcttcctctgttggccctctcttttgcaaatgtttttgataccaatcctcaaaaccttgcttcttccgtataaactctcttcgtgtttcttcgcatttctctttcagtttcatctcctcttcctggtgcagcaagatggttttgatgactgccgcgaaagaggagatagctgatttggcgacttcatcgggaagtttctcaagacggtcatgccatgagtggagaagagcttggattggcgggcgctgaggccttggaggtgatgaaactttctctttaagactactctcgatggggattagatttagcttcagccagttgttgagagagttaatgtactgcttctgatgggtgacaagtgtatcgaactgaacatgccattcttccaagacggtgcagaactggcgagtctgatggtgatgctgttttgtggtttctttgagagaagttgagatttcaagggcctttagctctccaacaatacctagttgggtgtcgtggtgtatacacatgtttgtccacatcttcgccatcctgcatatccacgagccaaaaaaattggttaaagagagaaaggctttgcagagaatcattagaaggagaagaacttacccttcaactaaggcaacaagtcttggatacaattgatcatcccttaaacggtttacttcagaaaccgttgaatccatggattgcatgtcaacaatatatcttgtgtgtagatgacttacagccgcctttgttttctccacggtctctgcactcgcacctcgtttcttatgcctgttgagtaaagataccttcttctgatactctatcttcataagctcaccttgctacaccaccaaaacaatgcactcaactaaacatcattcacttctgatagcaatgatcagcttaaaagttaaaagtaccttcacttcatcatagagtttcttctcccatgctaacaatttatccaacaccgtagcatgagtttcatgctcatctgattcttgatcatcttttccaccttctccattcgaaatgcctcttaacgatttattccaagttataacccgcattactctagctgaatgatcaacatatcctgcgaagcaaaaaatttcattagcaagaaagcaacaattgtccaagaaacattcaacataatcaatagaaacagattaggtaagataatggtagggaatagcaagtaaaaagaggttaaagtgttagttagtcaaatcaagaactttttttaatggctttaaacggaaaaagggcaaataagaaaaccaccaaatctattaagtttaaggttcatcttagattctcataaaagttaaatcacagaccaaaaagtgcatcaaagactcatactttaagaatatttgcatacactaaaccctgatgtaatctacaaaagaaaaaactgtctcttctggttttcttttttttgcttgtttcaataagagaaacaaagactcaaactttctaaacaatccaatcacagacacattatgaatcactttaaaaagcagcaacctaagttttggtaagacaactctgagaaaagcaaagacaaactacaatagaataagctttgaatttgatgattggctagggcacatcaaattcgtgtcttgacagtgacactcaataagattcaccacattgcaagaaaaacacacataaatactttgatcatagactagaccacaccaataagattcaccaaatagcaagaaaacacacacacaaatgcttcaatcacaagagtttcaatacctcggttatctgcaaaattcgagtggtaatgtaaccttgtagcttcaagcatcttagaaacctcttgagcacattctgaagccttaaggaatctatcatcaatctcatcaagaatcttcatcaaattcacacttgatgatgcagcagcactagtcttagcaaccgcacgccgaaactccggtggagcagtactcgaatgctcaatcttagctttccctttcttcttcttctttacctccaccaccacttcttcttcctcctcctcttcctcttcctcatcctcttcctcatcttcctcctcttcttcttcaactttctccggcgtcttaggctccatctcctcaactactttaccagaaccagacttcttccgatatatcccagatctttcctcttcctcttcttcttcatcatcctcttcattaaactgaaaatgactactctgattctcataaccattcctaacctctctatcatctaaattaggtccaggcatattctccaccatgaaaaaataatcccaagccatactatttgccggagaagcactcacaatctccggcgttgttttctccaatctcttcctcccattactcttcccaacattctccggcgttctcggttcctcctcctcctgagcagtgtctctaccactacccttaacttcctcttcctcctcttcatcttcttcctcttcctcaatcgccataccatctaaagtctgaacctttcgacctctaaccgccatagaaggcaaactaatcgcacgtttaatcggagaaggagagaatttaggcaaaggaggaggcggaggaggaagattctcaataggcggtggaggaggtggctgaggagaagccggatctacattgttacgactctgtttctcgtaatgttgttgatctaacaacacatcgtctaaagctttttgatcagattcgccatggccatagtcacttaaagcagcaccagtgtttttcaaagcaatagcgtaagcgaaatgaccggcggcgaatgctttgcttgcggaaactgcttctttgattacgtttcgtcgttctttgcatctagctactgcttcttcgttatcaaccctagattgagcacaacccatttgtaaaaagtgaggctttttttttgtttgggagagagagattgataatgaagggaacaaaaatgcagcagagagatagagagaggaggaggaagaagaagagagaagggggtgttttgtctcacgcgctgcgagtggaggttatgttttgtactcgctctctcacgctgtagtggtgtcttgtctctgtattcatatttttatttgttgctaacggtcacatatctcaacgcactacggcgtcgttttgtagcttttgtacacgtaacgttttggattgaaccaaaacattaatgaaaaaggttttttctttttttgggctttttagaataaagaacttcaatagttctttcgtttttttcttttgctttttagaacaatttaactcttgatatttgagttttcaatagcagactatattgttttatttttaggacgaataattgtttgtagataacaaaagtcgtctaacgtgccaacgggttttgttcgttctatatacaatataagttattcaaatacaaataatggaattttaaaccaggaaaaactaagttgatatttctgccaattataatcggtaattataaattaagttggttttgggtttgaccctaggaaggaattacatcacatgtttcttagtatgatatattagataatgtaaattaagagaagtatcatgatctttttgtcaatgactgttcttgaatcttgacggttcaacaaaatactaacataaactttttggggtgaataataatccaccgcatagtactattttctttttgtaaaagggattcgtagtttgtctaatgcattttttcatcctcactattacaaattaaaactaagtttatttctgcaaattctaagtttaaaacaaattaaaaccaaaaaaactaagtttatttctgcaaatttttatatgaagttggtttgggtttaaaaaaaaaaaaaaaaaaagaagttggtttgtgtttgatcggccacaacatgtttttagtatgttattacataaactaaattggcaaaagtctcatgatctgtctcatggaaagttcttgatggttaaagaatactaggacgacaataaaatgtaggaggcccaatcaatttttaggcctcatgattttggcaaaattgtcaaaagtccttatgattttggcaaaagtcccaaaatttgtaaccagtttgtagtaaaactacttaactacgtataactaggacgacaataaaatgtaggaggcacaatcatttttaggcctctttcaatcagttttttttttaatgagaataaattttagaagttaaagaatctgatatctatttggaagctccaatagttagacaagggtttattaatgcttctacatcaagaggtttggggtttgagtctcagctactgcgatttattagcatatttgcatattaatgaaagcaaatgtgcatgagatctacaacgatgtataattatagctgtttgccaaaattctatgcagagaagatattaaaaggtgtccatcaaacgtatggagaaggagaaaaagtatcatctgtcgtggatctaataaaggtcggaagaaattatccgtggtagaatcgtttatgtaacaattttcataatttgtaataaataataaatctagacggcaaaaaaaagaatttgatacttattttgttgccgaaacctaaaattggggacttacaatatttatatattattctcttcatcttactttaagtgatgttttcgagattttattttttcattttaagtggtgtattcaattttctatgaaaaaataaaatctattcaatagtttttttaactaaatacattgtatagtatgtttttattttggttgaattagttatagctaatgattttttgtgttaaaaagataaaaaaaaaaaattttaataatgtttttccaatttgtgtggcaaaatccttaaatatcactaaaaatgaaacaatgtgtatattgttttgttgatttgtcgatgggcctcataaatttagtagtctgagactaatgtttcaccttatttacccgaggactaaccatggttataacttataactatttaataataaaaaatattatcctctctacaaaaaacatcaatcacaacctaagtgaattcaactatcttaaaccacatctattttcaggaccggcccaaatttttgatgcctaaagcccaatacaattctttgccttttaacaaattgaaatgtataattatcaaaacatttaatggaacaatgctcaaactcgtgacattacgctattaaatgagacactaattactagattacaagacttttactcaaatttggtatctttttaaagtaaaatataattgacggaggttttaggtctggaccggttctatatatctgaaaccacctccatccatgagttgacggagtagttgggtgtctttaaaaaaaagtaacatatttagattttagacacccatccaatttttatagtatcttcctaatatctcctctttttttttttttgccaaaaggtgttgttattgatattaaacattgtacaatacaacatacatagactgtttatataaaacaaggacgtctagatgaagaaagcaaataacaaatattacaagactagttaaggaaacaacaaactgattaaggttttatgtacaaaacagagacgactaccaaaggagagggccagacgtggtagcagtggtggaagacaaacatcctgacatctcaagaagaacaacaaaacgaaaaacaagtttcgtagttgaacttaaagcttccatcttatgtggtgagcttcttgcataccaacatgtcaaacgaccaagaactatcagtagcagagtctttctgtgagataaacctttcaaaagtgtaacactatcaagcagctgcaagtagaacaaaaagtgacagaaacctgaagcaatcaaagagagattgcccatccaaaagcctgaaaagaaactatgtttcctaagtactaagaacttactaaaaaccataaccttaccccaaaaagtgtaagtcacagagtataagggtatgttatactctgaggagcaacagtcatagcagatctatggtgtgttatcagactccgaataaaaccttactccataatctttgcgatattgtttcttctttttatcaggagtaaggtcaatctgctttccttttctgcgtttagaactctcaccacatgcatatcttgattgatcattaatagcagtaggagtggtggaatcatcagagagagctttaggacttactaatggaacacttgaaggaagatgttcaatagcaggttcattcaagtctaaacccggtgaagcagaggttggtgcctgtgatataggtctgtgagaagagatatcagaacttgaagagtgattcgcaggtggagggggtgtaggattgttcgatccccctccctcttcccaaacaggaaccatcaaaacatccgcttcatcatcaacaacatgagcaccatcattatggtgatcccctgaggagccagataaggacagtgatcaacatcatggttgatacggcagcagttggaacaaatcctgtgaagtcgttcatattcaaaaccaatcatggcaccttctcgtgattcaaaccgcacccgtcgaaagaaacgcatcctatccgtgatggaaatcctcactttcactctgataaaggctatctgagtagaggtctcttcatcaaaatcaagccccgtgactggccccagagtactagcaataaacctgacagtcatagtagacacatagagaggtatgcctctaacttgaacccaaagatcaatataggtaagaaagtcagcacggggaaagtcttcccatctctgcagaggtacaaaccattggttgaataaccatgggcctctcagcatgaccgaagccaagtcaataccagagcgaaaacgaaactggatgcacctatcatcaatgatgcggccatgtacacgagaagccataccccagctgcgaggcaaggccctaagtactcttctgaggtgttgagcatggatgttaagcggtcttgcaataagactcagtctgttgccagcaacaacaacaccataagctgcctgaggtacaaaaagttctggatcatcacgacccaaaaccatgtactgtatatcatgccaaatctcatcagccatcaggaaacaagaagaagtaaagaaaagaagacactataagaagtgaaaaagggagcgatatcccctctttcaaacactcatattaaactagtaataaaattaattctacaaaatgttttaaacactcatattgggtatcaccaattaatatggtctacttgctgaaaattaaaatttcctgtcaattaagccaaaacatagaaatggtaacatttcagctctaattttattataggtttttgcaaaaccacaagatacagaccacaaaagacagctacgtaggttaataaaaaaaaaaacatatagatgccttcactcttatatggaaaccacgcattactatatgtatatgtatgtatattcataaccaaaacatcccaaaagatagattatctgaaacgtaattatacataacccacaataagatagaaaacagatctatctagtagctgaaccacacaacatgagtctccgggaggaagtggcagaccggaacggtccctggcttcacctttaagactttgaaggccaagtggtttgggttccaagctgaggtgttcttgtggcataccgcaactgctttagctcgcatcccgttctctccctcgagcggaaccgcgtagacggtcgtcatcatcgccttgtggcagtagaacaccgcgaatgggtacttctgtttgtgacacaccacagatttatcgtcagacaacttctttaccccagccgccgcgattttgtacttctgcatcggtgcgttcttcttagccacctgtagtaaccaaagttacattggtttatagccaaaatattagccacaatatatatggtgtggacatacaaatcaactgcaactaaaccgaaccatgtgttttcatgaatggttagattggtttatatatgtaaatccaaagaaaccgaagctaaagccaaacgtaaaccaattaatttgagtataaacgaaccacacgaacttaaattaagaaataatttctatgttaaactatctaagaaaaattagatcgaaccatgtttaatatttcttaaaaataattatagctaagtacatagtagctatttgtatatgttttttacatcaacctgacccaaatctatcatagttatttatgtcttatatttattttttattcataaaagaagaaaagtaaatttgacagaaactacatcaacctttccaaaaaattatccaaagaaaaccgaattgattatatacaaattatcttatatttagtattaatcttatatgttttcagtcaaaactaaaccggtaattaaaaaacagtagttagtatttttacctcagtggaaacagccctgacgtgatatttaccaagtttcgaaacactaaagtcgaccatcgactccaaagacgtcgcacaatacttctcctctccactaacttttctggcttcacactcctcaatggtcttcttcatcatctccgcttcttccgaaccagcttccaccgagaaacgtttcaacgtctccgaaaacttctccgatccaaaaggcaccgtttcagcctctccacgtggcaagaacgcagttttgcctccgtaaccatcctcagcgttaaaccggacattcatttctttcccgcgaaccaagtccttctccaagaagaagagagccgcgttaggatcgtcgtggagctgagtctccttcgctgcatagttatacacgaaagggtttgctcctggtttcacaccaacgtaaatcggtcttcccttgtggcgcgtgtgcaccgtcacaccgcctttaccgactcctacgtcggttcttttaccgggtttacccgtgtggactgcgacgccacctccgtgaccttttccgctgccaacgctcacgtgtgtccctcctccgggcttgcccttgcctgtgtccacgcgtacacctccctttccaacgttcacggcggttccgctaccggttttacctttatgggtgttaacgtttactccgcctttacctacttggacgttggtacttttctcgtcggtaaaatctgcaaaaaaaaaaagtttggtaaggaaacatttattttattaacaactaaaaaagaatacatttatttgctacatacaaattcagaaaaatatgttgaaatataaaagaaattgtaataatacaagtcaaacacatctttatttgcatttatgtaaataaatattttttgtgtgttttaaagaaaagaaagaaaaaaaacagttaattatggagagagttgggaatggaatggcaaacatgtatttctaacactagtgaaaaccataatataaattcataatataaattcagaacaaacatgtatttctaacattaagaacaaaaataagtgagagagttgggaatggcaaagtaaaatattttaaccgaaagtcaaaagattatggagagagttgggaatgggagtgtttggtaaagcagtgctccaataacgctccggtgttaaatcagccgcaatcgccactaccttcaataataaaaagaaaataacatcaaaccacaatgaataaaaagtagtaagaatgtaatcatgttttgttcgttttgagtttataagtaccatgaatgaaccaagaagacagatcagaggaagacgaatcgccatttttgggagttggaatagaaatgggtttgatgaatttgaggagaagaagtggtacgtgtacgtagaatttatagtaaaagggttttagtagaaaggagctgaggttgaagttatgatgagtatggatgatatagacggctactacttaccaatctatttgggccgattaattatatcacataccttctaaccactacgtgccttctgctccttaaatgctcttgtatccatgtgtggacatgtgtttttaatatctctagtttatttttgtgtgttacgttatactacttcgtttcgtgtctttcttttttttgacattcctatttgggtcctatttgttttgctgccatggaaagcaaacaattattcacgaatgttttctttgggtgatcactgattagttttccttagctcaaaatctttgattaagttcggagttagcgttgacaggtgaaatttgtaatagatcaatctggctggcccgcccaatccgatccaaaatcgtcaaaacccacaagtattgaagtacatactgcccggtccaaaccgggattatattttaaaactactaacttagttcagatattttcgagttatttcagatattctacgttatatgttttaattgtgctagtcttaagatcctttgattaaggatattgattcaaattttattgtaagtaacaatttttaaaactttcaatttctactagttaaaactggaaacaaaacaaagttaagatttcagtgaacataatagatcttaaaccttttatacgaattactcgaaaccagaaaatcccgaatagttgaatatcaagacctactttgtatcactattattgtgtatataagttttagtttcatataaagattttttttgggtaggaatttaatgagtattttttgtgctaacatgttattattattgccatacttcatatttggatttatagatttatagaaccagtaaaccagttcttaaaacaatgtttttatagcaccaaacgaaccccttgtgaagcttagagaattcttattttgcagttaatggtcctacaaagtggttgcaagtaaaaagttgacgtttcaatgaactaacaaaattggccatattccaaataattatttgaaatagattacatctttaaagaaacttctcatgcatccaatatatataattaggattttagtaccactctgactcaatctatcgatcaagcttagtgtgatagttaaacgcggtagatagctattaataatactttctctgtttcattatataggatgttatagtgtttttattttgtttcattatataagctattttacaagtttcaatacaaattttaaatgtattgattttatgactttttagattataccatctcttttgtgattggttgaatttttaaaactacagtattaaatgatagttgcgtttaacccaaacatcatatatatagaaacatagggagtaatacttattttatttttgtacaaaaattaatgttttcaaattttaaaaagcttagattcacattacaacgtagatacattataacaatatatagtaattagaagattttcaataaaaacattttaatctgaaaacaaaatatggcataacaacataatttgtgtattaaatataggaggattataatgagagtaagttttagaagtaagaaagttattaaaaatgataattattttactttattctttgaatatttatttttcttttccgatatcttaattttaaaatatcaattaattatatcaaaatcaaactactaataatgatggacggtcgttgcccgttggcatgtttcgacggtacttcagtgtcatgtgccgaagaaattttttcacttcgatcgagaatatgttcaaaagcaaaaccaaaagagtgtgggggatctggtaatcttaactttcgtgtggacttttcagacaaagagaaattaaaacgaacaaccaactcatttatggctcaccaatattcattcgttttcatcattattttcgatattattttgtttcatcaatccatggttggagaatgagtgaacacctatgtatttaatgttgttgattttggttcaaatagttttgatagtaactctcatcccaactacggacgctatgcttgccttttttcttttccagtgataacattataacatttgtactgtcccaaactaattggtagtgagtagactcccaaataccacttatatattacggtttaatcacattttgaatgtggaattttcattctactcacttgcaatatatcctacttgagtcattttacatgggtcaacaatcttaacgttaatatcatgaggttctaaattaaaaccagttgacaataagtaaaagcgcttatgtatcttatacattactctagaagcctatcaacttctgatatggcgaatagaaacattctaataccccttttccgcttagaatggacatctaaacatgaagtttgaggaaatgaacatacaaaggtattttaggaattatcggcctacaattcaaaactaattggtggtactgagtgaattattatatggtacatatacattattataggcttctcaaacttttaatgtgggattcttaatatttagttcattaatttctgaagctcgaaacatttttcgattgaccctaatgaattccataaaatatttatttgtgtgtttgtcctcacttagttgtgtcacttatcatagttttatcgttacctaaacgtaaacctagttttatactctcttgtgggctaatattcggctaactcaacacttccgattaagctccgaataatgtaaccactatatacctcgttatttatggctataaactcttatgatattttgattagataaaaaaaccaacattaccttcttttttgagatgtgatttgcaaatacaatgggccttatacccaaaaggcccgacatcaaaaacccaatatcaccttcttttctggcaacaatcctctatcactgtgttaaacatatttgctttcaaatgtgaaagtgcattttctttgtcacatgttcatcagttcaaacgagacagtggaatattcactgtcccgaaaacaaaaggggctcgaatggttaggtgacaatatacttagcatattgattaaattttagtgtaagtcactcaattatttgtatattataggatttgatagttatacgtagcattagccttttaaaaaaatctattatgtgaacttgaatctaatttttttctttctttttaataacatacaccgcttagattccacttagctgtttgttctattaagcaaaataatcataagtttttctttttttttatgtttgttgtgtttgattgatttattgtatcacatacttctttccaacactctctacctaccatgtaaatacttttgtaaaggttgctataaccaaatcgggaattcagacactcaacagaaaaaaagagacttggtatatatatataaacacacacggtgagacttgagagatattattttgatttcttactactaaagaaatgaaaatggaaattgaaaaagaagcataaagaagtgacaattttgggaaatgggggatagtgagtgactgagtaattaagtgttatcacactctcatagtgtcatgctttcaccaaccatcagccccacaacttttgctaagctccaattgtatctgatcatcacttgaccaatctatacaataatactttggctgatacagagctaatgtgggagttggatttggcttggagagtccaacaaatctttcaaaaccaagagaatgtgcggcaacatattttacggtatggtttagaagattgtgtaaaattctctttacataaaattacaataaatcataagaatttgtcttgtttacacgacttagtgatacagaacaacaacaacaactacaacaacaacaagagtgtcacataacgaataaaatggaatatccgttgttcaacacttataagtatatatatgtatatgcattggaatctaacaacactttattctttctcttgtaatgtaagctaagaaagaaaaaacacaaaagagagacaagtatccaattatgagtatgcacgatcacgatccgtcatcttcgattcagctataaaaggaaaaaaagagagaagaagagtggaccctaaagtgaagagacatcacttttgtaatcttaatcgctattgcatttcaccaggaaggcattagtatcttctgagaccttttagtcaggaccactctttgcacctcatttctacacttatttccactttagaatctttgtctcatctcttcgcatgtgagaggtttttgtgtaatcatctggtttttcacacatgcacccgtttatagatacattattcttcaatatgacatgtttttatatcaatcctcaattatttgtaagaatgattatatatgctaaaaagatctacgtaaaactgtttaaaccaatttgtcatagaattaataaaaaaaacaaaattgcaacactatcttttatttagatttgtaaccctaacttaacacactacttttgatatgtatatacttcatatgtcattttatgttgccatttaaccactataagtgttcttttcaaatattagaccttctaatgtaaaaacataagattgaaatttgacccaaaaatataatattgaaatacatgacagagaaaaaaatattgttgattcaaggaaatcgaaaaagaaaatatgaaaacaaattgcagccactatcaaatgattttagtaatttggcatgcgagcaaaaaaataattaatgaaaaatttgatgaattgaactccaagtttttttttatccataatttctcgtaatacaaatataaaagcggataacatgacgcgaaaaatttgtactgaaccgtttcatatcacttatataaacaatatttttcagattttgttcgtttgagttctatataaaatcgacacaaaaaaaaaaagtccaaaatgcttatttgccatgtttttaaatcaggtctagggtggttggatcaaaattttcgccatgttaccaaaccgataaccggtacaagcccaaactaaaaccagtagatatatatatatatatatgttttgttttcttctaacggtctacaaccatgttgactaataatttgcagtttgtctgcaatttgactaccgtttcccgcatagtcaaactcatagagtcataggtaatagtttccactttgatatttatttcatgaatgtcttaacttttctaaaatgtatttgtttccactttgtctttattttttcttttaaattattttcttcgaactattgctttctcatgattacttgaacagattgttaattgtttggctttcgtttccttatttagatatatatttcaaataggaagaaagtattcaagaatatcacctacaccaaagtcaaatacaggacatcaagtatgtatattcggcatggtcatatgtcattgatcttttgataaaagtatattaacgtgtaaattttgctgccagattaccagtagaatgattattattatttttgtgaaagaaaatacaaatgagtgcaagcatgtgtagtaaatcttaatatgcaatttcctggtgtagatgatcatatggtcgaggttctcgtcatatatgtatgtctctaagttagaaatgaaatacaagaaaattttaaaaaggatttagaagataaaacataatctatcgccaaaaacatgtaggcatgtaaagcaaggccaaggtccaagatgttaatatcaacttgatatagcgctagcttacttaatattataccatttatgtgtatatctcatcaattagaaaaaaacttttgagcatatattagcaaaataacaagcatgcgtcatcctttctttttgttaggttactacgtgatgaactgatgataggctacgaattttgttagctattgttgttctttttcttacgagtaattagagacttggagtgatgctaatagtttcttgatcggagatggatggataaaaaaaatatcagcatcactccaaatctccaactcgtaaatattttttaatttcgaatagtctcaccgtagataaaataaattctaccataatataagcacattagctagaaagaaaaactaaaacaaaccaacatcttcacttttatatatataaataattataatttttaaaaatttatttgtgtattgagttacaaagaatatgttatggaattaagatactccaacgcatcactcaaaattttgttggccaacgattgagcttcaaagcccagcctaaaaacgaacctaatttgtataaccaaatctgtaaaagctgaaactttggtgcaacacaaataccgcaattagtacaagtctcattagatgattcaaaattatggaaaacaaaacaaaaacattggtaaagtttggtgtggcttttattagttaaaatcctcgtgagtaattatggagagatgcatcgtcacgtcaaatcttctgacatatattaaaattccaagattactcgtttttaatcattgaacaatgagattcataaccgaacaaaacgaaaatcataaaatcacagccgtgagatgataggacatgtcatatttgactgctaatatcaccgtccgatcatcttttcccatttaattaaatcaattaacggacgaaaactgaaatggtccatttgagaccgttaagacaatgaatgcgaaggaccattgagagtttaaagcattttggaatcggatggttcacaaataattgggaccctttgatgccaaatgtacgacaacggcttgttcgtccagcgaggtctcttcccttgtggaggaggactcattttggaccactaataaatactttgcaaattttaattatgtttcaaacctattttccctcttctatgtgagcttattgttattattatttttgttaaaggttttgtgaggttatttttatttcccgcggaattttaattctttagattattattttttctctcccttatattttttttttaatattacaccattcgtaacataatatgattttttggagttatatacgttttaaaatcagcattaagtttttagaggttgaatcgttttgagatcaagaagtaagagttttaaagctaaatttgttttaaaatcggcacatgaacggtaacatgcatttcaatgttacaagtttaagtctacttctcctcaaaagttcaattacaaaatattaaacacttttttttatcgacaactttattagattaacttaaaaagattaaatatgactattaataactatacaagatttcttttcaatttatatatatttttttaaaaaattctaacttactataagtcttacaatattattacatatatgtagataatttgtatacattaactacataagaattctcatcaaaattcagttttatttaatattattttcattttattctgtttttaatacaaataaatgatgatgcatttcttattttttataatttatgatgcaatactttgtgtaacatataaccaagaaaaccccgtgtagaagtcattttaacacgacgctaaggcaaaaatgataattagtacgtagaccacaacggaaaagcaaatcagtctcttgaggcaacattgccattaattcgactaaaaatataattaatgttttacatagctaatttacatactacaagtaaatatttttagaacgagaatcagtgaaacttttttttttttttggtagaaacgagaatcaatgaaggtagagcgtgccaaatagagcattagtgactgtgacacgtcaaaccaaagccttgtcacattgctatcatgcaagcataaatgttttggtgctcgaatctaatgcatacaaactccagagttgagttcatgcttgtataaactacagcaaccacgtcctaataaacctaaaaccgatattatatatgctgtgactcaagaatatgtttaaactttgttagattcgatatttgtgtcaaactctacagtctacgtataagcaatctactttgcatatcaaactaatatatacgcttataactaaattgcttccaatacatgaaaatatgtgaagaccttaacatagcttagaacttaactagtacaagtttatggttttctgtgaattgttttgagccagagtggtaaacatatgaattgttttgaatcaccgaatatgtttttttttatgtttttttttttggaggacactctggctcctctaatattcaaaatagaaaaaagaaccaatacttcgtggaaagtcacaaatgaaattgtaaaagctagaaacgagaaattgtttcttacacaattagtcgactatgaattatagactccaacatgttttcagttctcaagctttcaaacctattttacttctctaacttgaccaagttcttccattcacccaatttagcaaatgtttcatcctttaatttatgtgaatgacataaaaccatgggtatctagatagtcatctatgatggacataactcaaagttatatatgtatgtgcataccaatgctaaatatatagagttccacctttttttttttaattgaaactcacctttttttattgtatgacaaagtgttcacaaaattcaacatctccatcattttttttaaggatgctctttccagaaagaacaaatagcttactaaatgctcatgttaccaagtccactatgccatactgatgatatatagatacccttttcggtagaaaattgatacagctcacattttactgtcttcctgtctaataattttagtccattagatccttgtaatgtcattttctagttcttgtaaaacaccattttccttgttccacgttcatgtgtatcttcataaacatggattttattgggttttttattcagaaataatagtggtcattttttgttattacaagttgattaagcagctgagctaattctatatgtacatgtactagtttgtacagtgataagttaatcagttttaactattttaaaacgaactcttttttatttgtatacagtgcaagaaaatatagtgaaacaataatctgatattacagttgtatgtataagatataggggacgcaatcatctatactatttgatgtcaaagagcaccaatttccaacacaatttggttgacaagccaaccatataattcagagccaagaaaaagcataaaactaaaaaaaggcaaatattaaagaaagaaaacttcagaaaaagcagaaacattatttgaaaaaagtaagtgctacttatgttaaaaatgtgggactaggaattgtaatgataaatagaatctgttcgcctatttggagtcagccactactaattactacaaccagattttaattgaaatgaaaaagtgaagttttgaattaaagattcgatgttgacaataataaaattgaaagatttgatttgggatctgaatatctgattttgtttcctaaaatttccccaacagcttggcaaaagtgtagggctccagcttgttacttatgtgccttttacaaaagtaaatttctctgtaagatccttgttccccttttttccttttccattatacttgccataattttctctttatttcatgtataaatatctcttctcatcaattaaaactccaggattttaaataggtatatttctgagtgggaaaaaaatgaacccatcgcgtagagaaatatatgtcagtatacattctctaattacattgactttttaaggtcatcacatgactaatggtccaaagacttcgaagagaaaaaaaaaactcttatttggtaggaaacttgtaattttgtaagtttccaagaaaattttggtactaattcagcaatttgtgtttctgatgaagttatggatataagttcgacctttagttagtccatatcactccaaaataataccattttttctttgggattgaaaagaactctaaaagttggttttttgttaactaagtcccgtagcttggtttattggattaaaacatagttagagagttttaaaaaaatatttccacaatttctttacaagctgtaatcgtgttttgaataaaagtttgtgaatctccttgttagacaaccaaaacaatcgcaagactaggggtgtcagtagtgtttttcatcttccacacttaactaataatttgttgtttaatgaatctaccatctattactatatagttttgttcaactttaaaacgaagatgatatagaggaacaaagtagtccaaatttcaggtgactcacacaagagaaggaaacactaaaattgagacactccatctactgattactctttttcgacatgatggcttacatcaaccatgttactcaagaccttcatcctcatctagaacattagttattccatccaaaaacagtcattgggtttgagaaggaaaaagaggcttcaatgtacgtagagtggcatcaagctcaaatacctaggctcagctctttctcgccacatatcataatatctgtgacattctcttcggcgagataatcgtgaaaatattgactgtgggggacacattacctcggtcgcgctttctcattttaggatcaaacactaaaaatataatcattatcagtttttccttcaacttaataaatttaacgcctatatcttcgttgttattcctacaataatcatattttttcaaacgttattttttgtaaaaaaaacttttaagtagtcttcttttgcaactttagctctcatctccaaaaatacagctcaattctataaaatcaaaataaatataactctcatacagatcttctaaaaggttttacaatcacatgcattagattttcaaagttataaatgtggacttgaacttctcgttgcgaggattttgaattgatattactatttatcaaaatttacaaatttgacaatgatgacaaccacttatattgccttgtacttttaattttgcggagttgatatgtatctttttagaaatggaagttaaattttcaaaatatgaacaaataatgtgttgttgtgtatatgtgatttatgttagtattcaaaagtcgttttaaacaccataacaaaattaaacacttttcacttttagaaaaaaaaaagcgtgaaaattctcttaaatggttgaacgtctttcagattcaaaaggaaaattaccaaaatacataagatatatcattattcataaataatttcttgttgtaaatcacttgttggatggactccataaccgtggcccatgtccttggaggataggtccgtcagcccattggtgtgacggcccatcgaccagtcggcccaccagtccaccggtccatcggcccgtcggtctgtcggcccggcctatggagagaagccacagttggtccggcccgtaggtccggcccatggagactagacataggtcggtcatatacttaagtagttatgggcttttgtaacctagcccattagacatgtaacctcctcaagtatgtatatatatgtgatgtaacctcattatgaatcgataagaaacaagttagttcttcacacgttatcagcacgagcttgctcttaacaaaaccctagcagccgtcgctcaaccctagctcgtccgccgtccgccgtccgctgttccgtcgaccgcctgtcgaccgtttgctgaccgtctgtcaaccgacgatacttccgtcgaccgccgactgtcaaccagcgaccaccgtttgataaccaaggtctttagctcccggttccagtccgtacaaccccaaaggagaaaggtaattcattaaaccctaaaactaaagaaccctaatcgaacatggatctaacaaacggctcccggttgattagtgtttgcaatatgattgcttgtttgctcgattgtttgtcttgttattgcttatcctaaacttgcaaatcgaaaacatcttaacctagaatccgaaaccctaaaagacataaaccctaaatcaaaaacactataatcggatcaaaaccctaattctatttcgtgattgtttgaagttatctagggtgtttagtttgattgatttcatggttgcatgcatgaattgttaaaatccctcatgttgcataaaccctaaaaccaaaaccctaaggaaaatagaaaatcgctaaaaaggaaaatttaccctaagaccgaaaaaggaaactctcccaaaaggaaaaagaaaaaataatccctagagaaaagaggaaattctcctaaagagaaaagggaaattatcctagagaaaagaggaaattgtcccaagggaaagaggaaaagagaaagtcaaatccttgagtaaatagaaaaatcgatttatggtcttcatgacatttacgatttgtccattacatgatattgactcgtaacttcttcattgtagatgtcgaagctcacaaacctcatgtacgctgcactcttggcatctggtgacaattaccttcaatgggcattggacaccaagattgagctgaagtctaaaggactcgccgagtgcattgtggaaggcaatgagaaaacggagaggtcaaagtatcaggcgatttcaatcatacgccatcacatagcagagagtttgaaaaatcagtaccttacggtcgaggatccacttgagctttggcttgagttgaagaatcgatacgaccaccaaaggaccatacaactacccaaagcccaacatgattggcttaacctcaggatccaggattacaaatccgtggaggagtataactccgagctctttaagattgtctctatcctgaggctgtgtggtgagaaggtgactgagaatgacatgctcgagaaaactttctcgacctttcacgcgaacaacgtactgcttcagcaacagtaccgtgcgaaagggtttacgacttacacaagtctagcctcctgcttgcttcttgctgagaagaacaatgagctgttactcatgaacagcgcattgagacctcccggatccacagctgtgcccgaagccaatagagccgaaatggccaaagcgcctaatgaacctcaggcgaccaaggaatccaactacgtccataggggtaaccctcacggccgtggccgtggcagaggacgtggtggaagaggtcgtggcaatttctacggccaaggaaaccactatggtggtagaggccgtgggaactatggccgaggtagaggtagaggccgcggtgttaacaaaccgcgaggaaaggctaagtccgtgtgctataggtgtggcatggacgaccattgggcaaagacgtgcagaacctctaagcacctcattgaggcatatcaagagatgataaagcaaaagggacccgaagccaatttggttcatctcgatggtgaaggggatttcgaccacgagaacgatgacctaatggattatgagacttcggacatcttgggaaaatatacatctagttttaaatttgctttgtttgctttgctttgtagtttgatctctattgcgcgatgtcttggatttatttattttaatggaattgctttgcttcattattgtttgctttatcgcctaagatatagttcttgtccacatttagaaatggccgaggacaaggacatactcatagtggacagtggctcaagccacacgatattgagagacaaaagatatttcataaatctaacattgagaaatgccaacattagcactatagcgggtatagcgagtctcattgagggctacggccaagcccatgtactcttaccaaacggcacacatcttgaaataagtgatgccttgtattcacccagctcaaagaggagcttgttaagtttcaaagacatacgtcttaatggtttccacgttgaaacaaagggtgaagggaatagagaattcctacatgtaacagagatcgcccaaggacataagagagtcctagaaactatacccgcattgtccactggtctttatcatactaagatcaacatgatcgaagctaatttggcaatgaacaaagagttcatagaggagttcactttgtggcatgaccggcttggccatccgggtcataacatgatgcgaaagctaatgataagttcaaaggggcacaccctaaaagaaaagagagttatcccaaagaagctcacgtgtgctgcatgtgcacaagggaaactcataataaggccattaccggcaaaggtcaataaagagaccataaactttctagaaaggatacaaggggacatatgtggaccaatacacccaccatgtgggacgtttcgatacttcatggtcctcattgacgcatcgacaagatggtcacatgtttgtctgttgtcctctaggaaccaagcatttgctaggttactgacccagatcattcgtctgagagcccattttccagattttccgcttaagactatacgtctagataatgccggtgaattcacgtcccaagcgtttaatggctactgtatgtccatgggggtaagtgtggaacatcccgtggcacatgtacatacacagaacggattagcggaatccttcattaaacgaatccaattgatagctcgaccattactgatgaggtcgaggctcccagtagccgcttggggacatgctgtattacatgcatcggaacttattcgtatcaggccatctagtgaacacaaatattcaccatcccaattgttaacgggtcatgagccagacatatcccatctaaggatattcgggtgtgccgtatatgtaccaattgctccaccacagagaacaaagatgggacctcagaggaggatgggaatatatgttggatttgattctcccaccattataaagtatctagagccaacaacgggtgatctatttaaggctagatacgcggattgtcacttcagtgaatccgagtttcctgcgttaggtggtgagacgaacaagctgggtaaagaaataaaagagatagcatggaatcaaacatccttgaattggcaagatcctcggactctgatgtgcgattcagaggtccataaaattatacatttgcaaaagctagctaatgagttgccagattcctttgctgacccaaagagagttgtgaaatcgtacataccagcttgtaatgcaccagtacgtattgatatccagaagggaatcaatgtaattgctaccaagtctaacccacagaagaaacgaggtagaccagtaggttccaaagataaaaatcctcgaaagactaagaaaggtgcaatgggaaccgaggtaaaggaaaccatagacatggccgcggcaagtcctaaggaaccaccaaatgagatttgggacgccgaagctcatggtcctgaaggaattgataatgatgagatctcaataaactacatcatgtctggaataaaatggaaccgaaaagaagtcgacgtcgacgagaaatttgcatatgaggtagcatatgagataaatgaggatcatgaacccacgtctatcatagagtgcactcaaaggtcagattggctaaagtggaaagaagccattgacgtggagttaggttcattaaagagaagagatgtgtttggtccaatattgaggacaccatctaatataaagccagtaggacacaagtgggtctttgtgaggaagagaaatgagaaaaacgaaatcgtgaggcataaggcacggcttgtggcacaaggattctcacaaagaccgggagtagattatgaagagacatactcccctgtggtggatgcaacgacttttagatatctaataagtctggcaataagagagaaccttgacttacggttaatggatgttgtaaccgcatatctatatggtccactggataatgagatatatatgagattaccagagggtattgagctcaaaggaaaagataagaatgggtctcgagaccaatactgcataaggctgaacagatcgctttatgggctgaaacaaagtgggcgcatgtggtacaataggttaagtgagtacttagtcaaagagggctataaaaatgaccccatcagtccatgtatcttcatcaagaagtttgctagcaaaggatttgtgataatagcagtatatgtggatgatttgaacatcctgggaacctctggggaaatcgcccaaacagtcgaatatctaaagaaagaattcgaaatgaaagacctaggcaagacaaagttctgtttgggattgcagcttgagtacgtagataaaggaatccttgtgcatcaaagggcatatacagaaacagtactcaagagatttaatatggacaaggcccacccattgaccagcccaatgcaggtgaggagcctaggattggatagtgatccattcggtccaaagaaggatgatgaagaaattctcggtcctgaagtgtcatatctcagtgccataggagcgttgatgtacctgtctagccacactagaccggacatatgttttgccgtgaacctcctctctagattcagttcttgtccgaccaagaggcactgggaaggaatcaagcatttgcttcgatacctacaagggacaattgattttggtttatattatactaaccataacaaagaaggtttagttggttttgctgatgcaggatatctttcagatccgcacaatggaaagtcacaaacgggttatgtgtttactcatggtggaaccgcaatatcctggagatcaatgaagcagaccatcgcggccacttcctctaaccaggcggagatattggcgatgcacgaggccagccgcgagtgtgtgtggttgaggtcaatgactcaacacatacgagccgattgtggaatggtcgaagccaaggagccgactatcatatacgaggacaacgcggcatgcattgctcagctcaaggaaggatacatcaagggagatcggacgaagcacattctgcccaagttcttctacacgcatgacctacagaaggatggtgaagttaaggtggtacaagtacgttcaagcgacaattcagccgatctattcaccaaggcattaccagcaacgacattgaggaagctcgcgcatcagattgggatgcggaggcttaaggacttacagggatgaccaattcagggggagtaatgcgtgctgtactctttttcctcactatggttttgtcccgaaagggttttcctagtaaggttttaatgaggcagcatccccctagcgcattactgagatctcgtaggcatctacacggttatgtcatccaagggggagtgttgtaaaccacttgttggatggactccataaccgtggcccatgtccttggaggataggtccgtcagcccattggtgtgacggcccatcgaccagtcggcccaccagtccaccggtccatcggcccgtcggtctgtcggcccggcccgtggaaagaagccacagttggtccggcccgtaggtccggcccatggaaactagacataggtcggtcatatacttaagtagttatgggcttttgtaacctagcccattagacatgtaacctcctcaagtatgtatatatatgtgatgtaacctcattatgaatcaataagaaacaagttagttcttcacatttctttttatttgatcaagtacataattgaaaaagaaaaaaaaagaagctaaaagacatctgtaataaaaattagaaagaaaaatttcgacataatttatacctatattatattgtctaaacacttcttaaaatatcgcatataatttacagtcaaaatattgctcattatctaaacagaaacattcgtaaaataatttcacctcccaaattttaaacaaaacaagcaaaaacaattgcgatgtctgaaaattcacctcgtcatagacgaagtagaaatcccaaagaagcgaccataaggtataattagattttgcggagatacttgtaacaatttttaccatttttcatgatattgaagagatcctatcaatacggccaagataaaaacaacttgattatgagatccacaatggaatctaaaatggacgatctatatatctgactagagagatctagtatagatttcaatatgtccaaatttattaacaaaaatatgagaaaaaaaaaacatgtggaggccgtacatctagcaataattggaaaaaagggtcagcagaattataaatgtgcaggtcttaatttctgacgaatgtacaagcagtggtcctaatttatatgacacttctactagggaatgaaatcatttcgacaacgaaatttcattgacacactcattggtaggacacatattcaattacttatgtccgttaaaaaaaagtaagtttagttaaaacaaagattatgtatataaacaaaaaaaacctcaccacaatactctgccaaaaaaaattgaaccaaaaaagagaagaaaaacaaagagcatacctaactatggaaatctaaaaaaacaaaaataaaagaaagaaaagagaaaaagaaaaattagaaacatagaaagaaggtatagaaagatttacaaagtgggttataagcatgcaaagagaagagggtcccctcctctcctttggggcagatgatcatcaattcccaccacaatcactctcactaaatttccttttcattcttttccccaatttgcattgcagctggagataagtcttaatttacatcacctcctttgaaacaaaaccatcaattttttttcgatcgctaccggcatttggcaagttatgttttcttgatagaaaaccttagcttttctctactgtctagtcaataagttttgattcagattttttttacttgctcgtcttgtttccaacacttgtgtatgtcttcagctattctctttgcatccattgatgctccactaatcccacgttttgtgaatccgaccgcgtatagcccacattcccctctccatccctcagggaactcttgtattggaaatccatctttcttactaaacattttattctcctgaaaaattatatgttttccaaaaacccatttagtacaaaattcataatggatgtatatttttggtcttaagaaaataagaataaagactttaataatttgttaaagaaggtggacaaaggtaaaataacaatattatcattattattgaatacctttagccaagagggtacgttgcttttgtagccagttgctaatataatggcgtcaaatctctctgtttttccgttatcgaactcaacttcatgtcgttttaaccttcttatccccgaacacacctttttaccattaacaaaatcaactatcacaatcagtaaactggtttttagtatgtattcatatcatatattctttgattagattatacactaccttaatgtctccggttttgattttggctagcgtgccaacgtcgagaaccggagttttaccggagatatttttgagctcgagtggacctaaccggggcctgttaagacctaaaagggtagtatccccgaggatgaaccgggaaacaaccaaaaggaaacggtcaacaagccggatgggcagccatttcagtaagaacatggacagcccaaaagttgaagtacccaacatctctcgtggtaggacgtgcaccttcacaagtaaaaagaaaacataattagcaatacagcagataaataatttggatgagaaaatcatattattatctattagtttatcatgaataataatattaagagactgtttttcttttcttttgtgagaatgtttgcgcgtgctcgtgacaatcccaataaagttgttgttctcttagtttttattctttgaaaatgttataaaaataatatttatgtattaaagaaattaggtaaacctctttattcatataaaaactatattaacaaattgttggaacttgaagtcacaagggcctaaaagacggaataaaatcttaaattaggataataccagcctttgtattttcccgtaaattttgaattttctaaacagattaaataataagaatatcaaactgaaaaagcaaaagaaattttgatacttttaaaagaattactgtaaaggcaaaaaattggaaaatatttgtgcagattatttctctgaaattatcagccaattaataaagaatggtaattaaacttccaaagaagatcaatattagtctagatatatttgtatataatttggtttccttaagaattttgtaacaatgaaatcttttttttttgtaacaatgaaatctaaaaatcactttttatcgataacagtaaaaaaaaaatctttaagctatgcatataattatattatatatattttcttcaaaaatatgagtgttcatttaatcaagtaatattttccataatattaaacatgaagtttttttcttctaaaactcttttaacgagaacatcttaaagcgctgtaaaaaaaagaacctcttaaaacatatttgtggaacagaatttagtacaagcttatactattaaatgaattatgaatctattatattgatcggataatacttagaatacacacataatcctgaaaattctaaaaatctagaaaacaaaaagcaaaagtttgtaaaaaagtaggtaatatctttgagttaagaatagaaaaacaatcagaagatcaacttgaatgaaaaagcttttcaagattttgttttttagcaatagaagccataaaacatgaaggagcaaaaatatcgaaaacgcatgagaaaaggataatataatctccacaatactttctattttaaaaaaatcaagaaaccgaaaaagcaaaaaaaaaaaaaaaaaaaagaaactcacagcgtctctgacaacgagagaaggctgagcaccgaagttgcagagatccaaacaaacctccataccggagtttccacatccgacgacaagaaccctttttccggcgaaatctccaccggttttataatgacacgtgtgcttaactaccccggcggctgcaaacttatccatcccctcaaacctaggtaccaccggctccgcattctcccccgtcgccgccactaaccaccgacaaacatactccgtcgtgccttcttctcccacgctagtcacgcgccacatcccaaggttttcatcaaacgcagccgactcaaccgtttggttaaactccggctttatgtcaaacctccgagcgtagtcctcaaggtactcgatgaactgttgcttcgtcgggtaggtagggaaatctccggggaagggtataatcggaagttcacagaattgtttaggaaggtgaagatgaagacggtcataagtcttgagctgccatagtgatgctatacagtttgatctctctagtagtacggacgtgatacctctctcttttaaacatgctgccgtggctagtcccgacggtccggcgcctacgatcaccggaccggtgacgacgcagatacgacgcggtgacgtcatgccgcggtggtcatgtgctagtttaccttccatctctctcttccaacagaaatccatcaagaaaataacttcttcttggttctctctcttggctgttatctatatatatatagagagaaagagacttttggtgtaataagtacgtattggttaagagaatacgagaagggtttgtagtatagaagtagtggtggtggtggtgacactaattaagaacaaaggacagaaagaacaatttgacattgatggcatatggagtaagtaaaaaaaaaaagagagatggtaaaaaaaaaagttttagttaagtaaaagtatttataatggattttttgaagagaaatattctctaaagatcggaatcaaagaggttagggtttggattgaatctgctgaaaaggagggagagaaagagagagatcttatccaaatgagaagaatgagtaaagagagtgagagagataagcgttgtgtttgtgttttgatgagagtgtaaaccggaggatgatcagagaactacgggtctcttaaatcgccattcaaacttataggaaagagagagagagattgttagttttgatgtgactatctctcatgtgtgattgattatgtgtatttatataattatgagtgtgtatatattatatatgtgtgaaaaatggttaagaaagtttatatatttaatggagttcccttttgaatttcccacctgtaagattttggtgttccactatacttttgactctttctttaccttatggaaatctcaaagattgatgtaagtaatatttttgttttcttatgatcaaccaatggctgcatactatgagtttatttttaattaatatgagtttagtaaatagagtagattaattgtatatttttctaggtatgtcagatgaatagctaaatagccgaatagcggaataactgaatagttattagctaaacgaattgaactagagaatagtttcgtaaaataattataaaacactaaaaatctagttttagtagaataatcacattttgttttctcaactaccattacaattacgtttggtcattaaatcattttgcatgtgaattacattagtataagtactcgatattctgcagattagaccagatttcagtttggaatctaacgattatattagattttttaaaataagatatttataaaatgcacttacaaataaaaagatatataaaccatccatacatcaaactaagcatcgaaaataacggtatataattataaaactctaaaactaattctattacataaattttatgaatattgtgaatagtaaataaaataatgacatttccaaaatgtgaacaagtggtataccattcaaaccatgttgtttatatttttttttgtaattcatttaacaatgtaaaatattcaagcatagtgcctatttagagaaatgggtgcaattagagtaagacatctataaattaatactcgataaataataatcattataaattagttattttttttggtttcgattaggcttgtgtaatttttacacaattcaataaaaaaataggataataattttcttttgaaatttttattaaatatatagttctgtcagtattgataaattatataaacttttaatacatatacacatatatataagtatatcttatatttcatatatatataattattctattaattatttgtgaaaatgactctaaatactgtttttttttttttctaaatttgcagtaatttttggtgagttcatttctattatttttactatatcggaaaggaaacaatttgtgttgtttttttagattttaataaaataagttcttatatgtaatttgattgtagaaggatattgattataacagaaaattgttttttacatatattgtttttaaagaattacaaaaaattagtcaaatctctttataaattaatagaatttcagggttccaataatattattaggttttattgtagtattagggtggacgcaagaaaagattggaaatcaaataaaggaaactgagaccttgtgttttggaaatcaatcaacttcaataaaaaatctgacaagttttttgaaaccatgagtactcgttccattgagtaatttatcatatattcatatatatagtgagtaaaagcgattatgccacaccaatgaccaaacataacatcgcccaacgagagaatgtgaagctcacattgtagcgtctagtttctctttaacacccttaaatgtctaacatatttctgtcatcatgaagttgtaagacccatcatgttttactagtgcactatacatcagcaaaccacgaaccataaaaaatgcatctgctcttaaacaaaggtatgaatatatatgctgatcctctctaaagtaggccgtgaataaaatttcacattccttaggtgcaatctcaaccttatgttgatgagagattcgttaccttcaaagagtcgtttactcgtttctcatgtctggcctttaaaatgaaacacaatctaaggaaagaccatcatcacttgattagttacgtagttttagatcctatgcaatttaagtgtttgtttaaatatctgaaataatcaaagaacgtattcttctttagccaatgcaaattattgttatggcggtttgtaaactgatcaaacatgaacttaatgcttatttaatttcttgaattcaaatgacgatttagagaatttatagattttttggggttttaatgttaatattttataccaactagaatttgttactagctaaagctagtctacccattacgataactaaaaagagacatgttcaaaaaaaaaaaaaaatcagtacaaccgaaatagaattactgcatgctgtatacttcattttacatttagacgagcgtatgccaatatttaatacttaaaataaaatgtaaatttctaaaataattcgactttacacgtaaatgataaaagcatataccatttgataaattagatattcatcatataaaacaaaaacatgttataaaaatttaacggtttctacaatgtttaaatcacataaataaaactgttgaaaatgtgcttgaacctattttactttactaggtcattttcttaattatcatctctaccaccatataatacaatttctcaaatatagatagtgatagctcattgtacttactcaaacgtagaggtaaacccatatgaagtgtcgtgtctcgccagccacatagatcgtacatttggcaactttgtacttcatttcatatgctttctttttccaaatggtaccattttatatacattctttttgcccctcctcaataatcaattttattgctaagcttttattgggtgtgtatggacattattctaacattttctttagatttatgtcaagggagtccttgctttatttttcaaaaagatgtcacaaaaataataataaatctaaggtggttgatgagtgattaatcatgagtaacagtattagaagtttttggctttaattagaaaatctagcacgacgtatgtgatttttctttatgttttttgcacaaacgatatatatatatgattaataataatataaatatcaaacttactgtaagtatttatatgaaaaattgttaagaactacacaatgtattagtgtgccaactacacaataatataaatatcaaacttaaaaaagagtaagttattatatataggataatattatgaatatctgtaccaatctaattgccgaattaaatcatcgcagattttagtgtatatttaggatagagagtagggaaaatatttaatctaatacatgcatgttgaaacaatagaggttattttgatcgagtaattgacttgaagtaagactaatgtagaaaataatataaattccatatatattggaattttatatccatgtatatatgatacaccaaatatatttaaaattggtatattatagtatatcaaaataaagccatacaaactttaggaaggtataccaaattcgttatattgcatgatgatcaattggtaaactaaaatagtttaaaaggataccaaattcgttatattgcatgtcgactaattggtaacgtaaacaatataaaaggataccaaattcgtacacaattttaaccttattggcatcctcttttgctatttaaatggttcttccatttggttaatatatatttacaaaattttcgtcatttcggatgtcatgtcgccatgagagatagagagacttcattggatgtggatatgagtggagtaaagatcccaagcaagacaaaaatataaatacctaatcctatttgtttaattgaccacttcgagtgttaacgtaattaatctaataacatcacccagttgaaaatctagcaacctacccaaccatgtaccttgtacatgtgtttatttacgtttatattttttcaaataaataaaacattgtttaaatagatataaacaattcatctatgtagcctaggcaccatgccgtgggctgtaaattcttacaaaatttgctgttttcttaaaatgttgatatatatcagtctatgacatataaggtctcatgaaatgtattttgatataattatataaagcagtgcaatataataacataagaatacaactatataatttaatcaaactgatatctgaaaaggctatgggaactgacttcaagatcaataaaaagtaaaaaggagacaacgttaataggctttgtaatccctataatgtatcataggctttgtagtgcctatgtagcctaggcgttaaaattgtctttacgcgtcggtttaaaccgtcttctttatagatttacttatgcaatcagagtatcacgaaactatatactaaagtgacgctatagtgcaactttaataaccctagagaacattataaaagaaataatattctaaagtgtctcgctccaattggtaatactttaaggatagtggaaatgtggaataaaacagaattagtatatatacgtagaacggacctccttccgtcaaatttaacagaataattacatgcagatgttttttttagtaggaagtttaaattatatattctcaatttttcctttttacctatcattataactagaagcataaagatgtgcatacatttgacgaaatacatgaaccattcagaaaattcaacaaaatcttgtgtagacgttttgaaaaacatttcaacttacacgagcattttcatttgtagcttttttcccacttttgtttcgattgtcagtctgcatgttcaacaaagaaaaaagaacaacatgattctcctctacattgcctatcagcctatagcttgatccggaatgagagaggttcactttagtagtgatcgaagttgtttaggagagtgtctatacaaaacccatgggtcatgggccatgactaccaataaaatgttttcaagacttcccaaaatacccaatgatctagcattttttgaaggatcatctacaacaagctccttaagagaagaaacactatatctaaatagtggaaagacgcaaaaaattggtgcacttgaacatcctctagcatgccaaatatccttcctctagactaaccttgattttagatgaccatgattctcgtctcggatactccgaagattataaatgaaactgacttgatccgcataagacactagaatgaactgatcaattttttcgaaaattctatgtgttgatatcgataacttctattcgttctcacgccttgttccatgagaggattgttacaatgagacttaaatatggcaatcttggtttctcatctctgatttgtttttgttcaacaaagttatagatttttgacacatatccttcatatggaagacatatggaagacatatgccatatatttccaaaaaaaaataaaaaatattcatactcaaaatctataactttggtcccatgcaccttcaaagtttgatgaatatgacatcaagattatgcctaaatagttgatttttcatacttttgccaattgtgatactatatgttatatatatatccgtcagacattggacccataactaatacatgattattaacttaatctaaaataaaactttaatgatcatatatgataagcttaccgattgtgccgtgagagagagggctgatatattttggcggtccatgttttagtaacgatcttcattatttttcctttgcatcattctattttatctaacttcaagctcctgcgatgaatattatatttgtcaactcatttaacctccttagtcataacatgtttaattttgaatttatatacaaatacaattaagatggtgtgtctacaatcctttgcccactaacctccactttaactaatagtatccctgttgtctttttttttttgttttgctctgctttttcgctcacgagacattcgtggggaagaatgacttctggttttaaatcaataattaaagggaatttcacactggccagttcgtttgctttacatagaaataagataaaaggaagaaaaaacaaagtgatgaataattagtcgtgcttagttttctaatagcaaatggggtagctaataattacccaatctgtctaatgattataagattaagtggggttgtgagaaagaagaaagcaaaggtaggaattctaacatgatgaaagaacttatacatgcttaattgaaactttattactttttagttttaattagcttatgcttatctttttttctcagacagtttatgcttgtctctttgatattcttttatctaatttatttgtcgaatattcttctatattatggaatttgatttgtaaaatacaccggagtgttttacataagttgcaatatactaggttaagaaaacaaaaatttgaaatatactaaaatttatagaaattcaaaatgagctatagaatgtaaaatatatcaaaatatcttcaagtaaactaaccattatctacttaattgaaatgatttaactattcatttttaaactaattaaaataatcaaacaattcctgttaatgcaaagtgtctccagaagtattcttccctcttcactcagagatgaaagctttaatttaggttatgaaaatatcatataaaaaaaaatcgattgttagacatttgaaaccgatatcatagaactagtcgcgatagtgcagtcttgggaagaatggtccattttctccaatcaactaatagtatctggattactccgtgttcaattgtttttttttatatgttatatttctcatttgtgtaatactagaatgaatagttttaaaaaaaaataaattatttaacatatggcaaaatctcaaatcaagacttttgacacatatcacgttttcgtgaattaataactctaaaaagtatactttatataataaaatgtaagtatgatgttttaatcaagtacacaaaactatacggctatactaaaatatatttttgggtattaaattctaattagatatataaataaagaaattttatttgattagattttattaaaaaaattatatcaaatccgtgtgagtcaatcctaagaaaattaaacaccatgcacatgactatctttgtcttttgcataacgaaaatgttcattggcctaatttatagtcattgatactgatggacgtacgttaattctctaatattaaacattggattataatttagttggagtcattagcatagatagtagaagatgatgtgtcaaaacaattaatccttcgtccgcatgtacggctacatatatccacgtaatagtcagcgccttgtcaaatggaaaataaaatataatgtagtgtgatgtcaatgggtatataattaatacattggaaacaaaaagaaataaaaatgaatggatgatggttacatttttggtctttctgcaatttacaaaatattcatatcgttgggtagttggaaggtgaggtttgggttttaagctccgaccaatctactcttgccaaattagagctaagagattatgtattgtgtctatcgtttttatttttgttttagtcgaccaattatgtattgttaagtgggtgactactagatcacacttatcctccatttggaaaccttttctaatatgttgaattcgaaaacgttggtaacaattagtcctcatttgaagaaattgcttgaacaaaaaggagaatacatgttaaatatataaagttcatgaattcaacacatcatcttctaaataagaaggttattgtataacccatatctaaccaaattccactatagaatcagtaacattactaaatcgggtttagaatcgtaaccatgtcaatattaataattttgcttatcaaaattgcttatcaaaatcagttaacaagtagtgcaatggctcatatatcttatgtgttagacatgcatctaaccatctatcacttgggcacacagaagttaatcaatattagttgggtattagtgtctcgtacaaaggtgaaagactaaagtaggcaaaaatataatgggctttaaataccaaaggcttatttagctggacaagcagatgaaaagttgaagtgtcgtcgttttacagtcacatctcattcggttaaaaaatcaaaaagaaaaacaaaaacaatgcggtgagcgtggatcgaacacgcgaccttcagatcttcagtctgacgctctcccaactgagctatccccgcttgttgatatttattactttgtatgttatatgtgccattataggtgcactaaacagcaaaagtgattttttgggggtacaatctattattgtaaaagtcaaatatatgcaatgcaagaaatcgtcttgttcacaatccaagaaggtgttgtgttgtttaaagaattaattgtaatactggttaagataatgcaacgcgtagtcgcatagacatagagtgcatcaagaagagtcgatgcctgtcttacgtgacgttaatgcgaaacttaattgggctggcctgggccttctgaaggccctatagattttatcgaccaaagtagaacaaaatagaaaggataaaaaagaaatatttgtggacagcaaacataaatttctccataaaaaatttgtcgtttattttccttatctcaatttctatggaccctatctcttgagaagtgtaaatacaggtggcgtttcttaatcttgaatctgtgaaattagtaattacatttcgttgcagaaaacatatacttttccgacaaaacatggaagatgttaatcaggagaagaagaaagtacctccaatgtctgaaccagaaagatccacaccgattaaggtaacaatatcaagaatctttatcttaaacttgaaccaactttttgaaacatcaacactacaccatgttcttgattttagtttattgaaatcttgataagtcgaatcttgtgtttaaaatgttttttttaagtaatttagagctatgtcccctcgagtccaccttctggtgagcacaaggctttgcttttttgttgcagactacaggaggacagtatcgtttctgcaagtcatgtgttgaaggaagtagttgcaggacagtgaggtcaagaaccaagcttatgaacgttttgatagaacgtggaagacctcacgaggctcaaactgttttcaaaacattggcagagacgggacatagaccgtctttgatcagttacacaactcttttagctgcaatgacggttcagaaacagtatggttccataagctctatagtctctgaggtggaacagagcggaaccaaacttgattctatattcttcaatgctgttattaacgctttctctgagtccggtaacatggaagatgcggtgcaagctctgttgaaaatgaaagaacttggtctaaatccgactacgagtacttacaacactttgattaaagggtatgggattgcaggtaagcctgagagatcatctgagttactggatcttatgttggaagagggcaacgtcgatgttggaccgaatataaggacgtttaatgtgttggtgcaagcctggtgcaagaagaagaaggtggaggaggcgtgggaagtggtgaagaagatggaggagtgtggagttaggccggatacggtgacttataacacgattgcaacttgttatgtgcagaaaggagagaccgtgagagctgagagtgaggtggttgagaagatggttatgaaggagaaggcgaaaccgaacggaagaacgtgtgggattgttgtgggagggtattgcagagaagggagagtgagagatggtttgaggtttgtgcggagaatgaaggaaatgagagtggaagcgaatcttgtggtcttcaattctttgatcaatggctttgttgaagtcatggaccgtgatggtatcgatgaggtaactttaacactcttgttaatgtcttttaatgaagaggttgaattggtaggtaatcaaaaaatgaaagtgcaggttcttaccttgatgaaggagtgtaacgtgaaggcagatgtaatcacgtacagtactgtgatgaacgcttggagctcagctggatacatggagaaagctgcacaagtgtttaaagaaatggttaaagcaggagtcaaaccagacgctcacgcgtacagcattttagctaaagggtacgttagagcaaaagagccaaagaaagcagaggagcttcttgagacattgatagttgaatccaggcctaacgttgtgatcttcaccactgtgattagcgggtggtgtagcaatggaagtatggatgatgcaatgagggttttcaacaagatgtgcaagttcggggtttcgccaaatataaagacgtttgagactctgatgtggggttacctagaggtgaagcaaccatggaaagcagaagaagttttgcagatgatgagaggatgtggtgtaaagcctgagaattctaccttcttgctgttagcagaagcttggcgtgtcgcgggactcactgatgagtcgaacaaagctatcaatgcattgaaatgtaaagacatagagatcgcaaagttagagaagctgtaccaaaaacagtcctctggtagtagttttaacctattgcagattccagtcgggaaacgggagcttccaaccgcaaaagcgatgaatctttctgcttgtaaactcggagctcgagtgccaatcatatgccagaagcagtcccaagcacagtttgggatcagtggacagtttgtacattcttgtacagtgttcttgagctgaaaggacaaaactgaagccagagatttggtttttctattcttctgttgaaatttgagagtcaatactttgagaactctcactatgtgtaaattacaacagaatagtcttgtatataagaaaaagtattgtacagttgctgttttcaataactgcagactcatagatttggagaaagaaataaaactcttaataagcagtaaacatacacaaaccagtgacacaattctgcttcgaaagaagtaatactcacagataggtttagagcctgtctttgcattcaattattgctctaagggaaatttgctgagaagccaaactaagagaacaccaagaagagcacccgagaactgcgcaacgggtctaacagtctgaataattgtcaggaattcattgccaccaaatataaatccacaaaatttagtttctaataatccagttgaagtctgaactgcttcagatacctatgagaatcaatgaactgaaacacatcaccacttgttacataattcccagtaagaaataagactataaccacaatgatgatgtgtgtaaatgttgagagactcttaccctcttcataacaaactgacccaatataagaacttcaagaaatttgctccaaccccgagacatctaacaaaacagttttaaaagaagtcctgatgatagatttacaagcacttgaaacaaggagagaagagaactagagtactaccttgacaaggacactgatcacaaataacccgaaaacagctcccgaggctccagaaaaaaatgaatttggcggtaaagtgaaccaagaaaccatgttagctccaacaccagtaaacaagtaagacaaccacaaaccaaagtttcctttctcttcttcaacaatctttcctgttaaccacagaaccattcccattgtcttattaactccgaatcgataaactagatagagtcaaaactatgagaaaatcttgaactctcaccaaagatgtacaagagaaaaagattgctggacagatggttcctagaatcatagatatatataagccagagaaaaacgttaacatcagccagagaaagaacttagcaaaaagtaagcagagagctctcaccagttagcatgacagaatgttgcagtcacaaactggtaccataccggaaaatcgctagacaaatacatcgatttgatcccgcgaacctatatcgaataaataacttttttctaaacgtatgataccaatgtgaaaaacacctaacaaaccaatgcttcacactaaaaaaagaaaaaaaatcctacaagtacctgatagaagtgttgagctataaatatggcaagattgataagtatgatcaagaatattccatttgcttggtttagtggtttctgtttgtcttgtgctttatccaattcaaattgtggtgtgacgtctggaaaattttcttggacttttacaagtgtaaaggaaacatgatggaaaaatcgaattcgaggttaaaaaatctcaccggattcgctggaacgagatctgacgaaggtgagaggacgaaagacggtggagttagttgagttgagatagaggggagagttggttggcgaagaagctacactgcggcgatgtaatgacggtaatctggaacgaagagaagaagaatgtgggagggagagatagtgacggtgaagctgaaggtgaaggtgaagctgagacatttgagaactcaaatctttgatcagacttggacttgcttcttcaaaaatatgcgttgactgaagttgttgtatgctttaagacaatgattttattaattaaaagtaagatctaacagattatagaaatcaaaaagtaagctcaacaactacatccacttacttctgcgtatgcttagtggcattggtaaaccaatgagagtaacatagacaaactagcgacagaattctatagcaaagactactcacaaaggctcggtttagagaccgttcttcagtttttttacaaggatattttgtcaatctatcaatcgtttcatctaccttgcattcactggacagctagtatgttccttacacgaaaagttttgtctcgtcatttttacgaggactttttaacgtcttgatccatagatgccgaaggaaatttgctgagaagccaaactaaaacaaccccaacaagagcaccagagagatgcgcaatgtgattaacagtttgtaaagagtatccaccatatatagttcctgataatccagccgacgcctgagctgcttccattacctattcagatcaattaactaaacagttatcgtccctgaattcgaagagcttctatattgcatacatcatcagacattttctctcatatattgtataaaaacctcattatactcataagaagatgggactgtaagccggaatacggttataacggtagtgatgctgtgagtaaattttgagaaaatcttaccctctcaataacgaactgacccaatataagaacttcaaggattttcctccaatcccaagacatctagacaatcaaaagaagttgaatattagcaagatattactgaggagtttgatttacaaggagagaagaaaactacagtaccttgacgaggacactgatagcaaataacccaaaaacagctcccgaggcaccaacagaaacagcatttctcggtaaaactaaccaagaaacaaggttagctccaacaccagtgaacaagtaggagagccacaaaccaaagtttccttcttcttcttcaacaagctttcctgattcccaaatgtgtccattagctctctgaatcgataaactagctagaaattcaaactatgagaaaatcttgaactctcaccaaatatgtacaagaaaaaaagattgctggagagatggttcctagaatcatacatgatacataaaaaaaaaaccaagaatcaggagaaacatcaacataagccacagagaaaaaaactatcataagtgttgttcgtttggtagtcacaggatgcctgcgactgcgactgaaagttgatcgtttgacagtcgcaagatcctgcaactaatcgcgcgatcaatcgctgcggcttgcgactgaattttttgatcgcatgaaaaaagagcgacgcggctttttaaatggcgattaatcgcagcgattggtaaacgaacaacatcctgcgattttaaaatcgcaatcgcaatcgcagccacagccacagccgctagcgattatgaaacgaacagtgccaaagtaaaaaagaaagaagagagctctctcaccagttagcatgacagaatgtagccgtcacaaactgataccatgccggaaaattgtgatacaaatacaaagatttgatcccacgaacctaaatcgaataaacaatataaaacgtatgataagataagcacgtcacaatccaaagagatgggattacacgaataacgttttacagtgtagatgattgatatctaaagacaagctt

SEQ ID NO: 1101 - DNA, 157000 bp, Arabidopsis thaliana
gaattcttggagcctgtccagctgatcatgctccttgcttgttttcagtactgaaccttcgcagagttgttaacaagcctttcaaattctattgccacattgtggatcatcctgactactcagctattgtggatcatgaatggtcggctggtacaatctctggctcttgccagtttaagcttcatcgtgctttaaagttgccgaaaccgtgcatgcgtagcttgaacagaactcatttcagtgggatcaccacaagagttaaagagaaagcagaggaagttgttgctctacaaagaagaattttatgttctccatctcctactcttgctcgtgaggagaatattgcctctgaggaatggaataagctgttggtcgcagaggagaaattttttatgcaaaagtctcgtgttaattagatgcaccttggagataggaactcttcttatttccacaagatggtcatacaaaggaattcgcagaatcacattcatttctttactgatgtggatggtactaaaatcacttcccctgtggaaatccatcgccatgctgttgagtatttcagatcagttcttgggactactgacctaccttcatctccggttactcttgagtacttgcaggatctcctgccgttcagatgctctccctctcaggctgaaggcttactgtgtgaggttaaggaagctaagattcgtgaaattctctttgccatgccttctaataaggctccggggccagatggctaccctgccgaattctacaaaactgcctggtccactgttggccatgacttagtccttgttattcaagagttttttcgcaatggtcgtcttctcaaagatttgaacactacgatcattgctctaattccaaagactcctgcagcttccgctctcgcagactttcggcctataagctgctgtaatctggcctacaagatcatttcgaatattctggccactcgcctcagacctttgctgctggaatgcatttctcctaacctaactgcctttctgagtgggagaagtcttggtgaaaatgtacttctggctttagaacttatacgcaggtatgacaaggtttcttgtcctcgaagctctctcctcaaagtggatattaggaagacatttgatacggtgtgctgggacttcgttctcaaacttctcgaagctcagaattttccgcctctgtttatctcttggatcaaagaatgcatttcttcgccgcgtttctctatcgccatcaatggtgagttagcgggtttctttgaaggtatgaaggggctaaggcagggagattgtatctctccatatctgtttattatggtcatggaggttttatctagaatgctggacaaagggacagagcagggcaagttttcggcgcacccactttgtttatctcctcgcttgactcatctagctttcgctgatgacctcctggttttctcggatggctcccacagttctcttcttggtatcagtgagattttgcgtctcttccattctttctcgggattggatatgaatcctgcaaagtctgagctttttctgggcgggtttgatgatgtggaagctataatggtctctgatctgcttgaggttaggttggattcattcccgacgcgttatctcggtcttccgttgaaccctacaaagctatctcttgctacccttcaaccttttttacagaagatcactggtcatcttcactcttggactaccaagtttttatcttacgctgggaaaattcgccttatagtctctgtcatctatggaaaggtgaatttttggagccaagtttttgtcttgtctaagggtttctacaagaaagttgatgctctctgctcagcttttctctgaaaaatgcctccaccattgcaagaggtggtgtcatagttgcttggaaggacatttgtaaaacaaaagaggagggtgggttgggtatccggtctcttgaagattttgctgtggttttcagactaaaacaagtgtggtatctgttttctaggcctgagactttgtgggttaagtggttggatcacaacatctttggtcgtcggaactattggctaatggaaccttctcctcgtctcttttggacgataaggaagatgcttgatttaaagtctctcttcaagagtatgatcatatgccaattacgtaatgggctgaaagcctccttctggtttgattcctggacccctctgggtcccttgattgatctctttggtaattcgggtcctagggagctgcgtattcaaagaaatgctactgtttgggaggccactagagatggtcaatggcactttcctaatgctcgttctccccatgcggagcagctgcaggtttgtttgtcatctgttgaccctccttctccctctagaggttctgattggtatcaatggaagcagccttctgatgctttctctgaaagattttcttctaagggaacttggacgcagattcgtctttcttctcctcatgtgccttggagtaaagtggtttggttcaaggaggctgttccaagattttccttcatccattggttagcagtgcaaggaaggctcaacactagagacaggttgcggcaatggggaatggacgtccctaactcctgtgttttttgttcttcaggtttggactctcatgatcacctgttttttgcatgcgatttctctagatctgtttgggtcagtctggctgaaaagtttgctgcgaaccccccttcctctttagctactgctgcaacgtgggttttgagtgttcaatctacaccatctcactttgcgagtaggattctaaagctccttttgcaaacctcgatctatatgatatggagagagcggaacagaaggattttcacgactgaagctaactccatcgcttctactaagattctgcttgaccgctctatgcgcaatcgactcatcttcttctcgccggaggataccgctaccagaatatctctcttgggtttctactttggttgtatctctagctcaccttaggtgtggctaagctcattagtatctatgtaacgtgttccattagtctctctttttaagagctcggtatgtttttgagttttcattgtacaatgtaaaaccttttttatttggtataaagtttaacattaaacccaaaaaaaaaaaactctattaaacaagttcacaaaaaaaaaaaatcagtatgatgaactattgagatagtaaatctctcaagtaatccaaaacacaacatggtcctgtctgcatctaaatcacacaaaaaaaactacagtcaaatgtaaaatatatgaaccttaactcaagaaacttttaccatttctggattttggatgttcaaattagaaagaaatcgttaattcaggaatataagaaatcaaacagatctagcaagagtatatagcaaagccatctctctagatacttcttcagaattcaagccgagaaaagcaaaaggaaagttcaataagattgtgtacaattattaatcattatctaatacttcctcttaggggtgtcaaaatgggtcaaaattcatgggtcaactcaactcaactcaacccatgaatcctaatgagttgaaaattttgactcaaatgagttaatgagtcaaatgagttgatgagtcaattggtttgatgagtaaaatgagttgggttgtaatggttaatggtttcaatggtttacccaattaacccatcaagttttgtaaaattcaattaaaccaactaaaatctctaaaccaatgtcaatttaagtttaaccaacacatctaaaccaatttaataaaattaatatttttccaaatttcttaaatatacaagcgatgaaattgagaaaaagtaaactcgtaatttttccaccaaaaaacataaacccgtgattttcccgccaaaaacgtaaacccgtgattttcccgccaaaaacgtaaacccgagattttcccgccaaaaacgtaaatccataaatttcccgccaaaaacttaaacccgtaattttcccgccaaaaatgtaaacccgtgattttcccgccaaaaacgtaaatccgtgatttttccgccaaaaacgtaaacccgagattttcccgccaaaaacgtcaacccgtagttttcccgccaaaaatgtaaacccgagattttcccgccaaaaacgtaaatccataattttcccgccaaaaacgtaaacccgtaattttcctgccaaaaatgtaaacccgtgattttcccgccaaaaacgtaaatccgtgattttcccgccaaaaacgtgaacccttgattttcccgccaaaaacgtaaatccgtaatttttgcgccaaaaacgtaagcctataattttccgctaaaaatgtaaacccgtgattttcccaccaaaaacgtaaacctataattttccgtcaaaaacgtaaacccgtgattttcccaccaaaaacgtaaacccgtaaaaaatgaaatccgtaaatatcctaagtttgatgataatgaattaataatgataattatttattattgttttataagaataattaattaaattattacttaaatgggttaacccatttaacaactcaacccatcaaattaaatgagttatgggttgacccaacccatttaacaaaatgggttgggtcaacccataactcatttaaccctaaactcatttgattatgagttgaattgagttgggttacccattttgacacccctacttcctctgtttctatataaatgtagtttaagggtttttattttttttcaatttaaatgttgttttcaactttctatgcaaataataaatgtatttaatattctttaacaaataatatttaatcatctatttttttattggttgaattggttataataaatgatgtttttatataaaagaggtaaattaaatgagatttttatgatttcttaatttctgtgtaaaaaccttaaactacaactaatatgaaacagagggagtaataaagaataaatatatatctacacgaacaaatactttttaattaaatattagagaatctaataagctttacaaaaaaatgtcgacgacaaagatcaacgagaatatttaaggcggtttcaccttatattcaagattcaagtcacaagcgaatccaaaatgctacacttccaaagactggttttctcgacaaaattttgagccctctaaacttactagactgaatgattcgaggtaatgtggcctcacgaaatagaacaactcctaaagtattgtaaagcaccagtgtgatcaatgtctaacatatcagaaaacaaaaacactagcaggggaaatatgactttaacgaaactaatccaacggtgtgaatctttaacgaaagcctgaaaccccaacgtgactttatttgcattactaccttgaacaaacaattggagatgttaattaatgtttcaaaataaacaagaaaacaaaaatagagatttatcttttatggtatctatagatctaggttattaaactaaagcaacaaaacaccacaccatagtattataaataccttcaagatagaaaagcgggatcttcaatacagttcctccatccacaaaaaacaactctgttttgagtgtcttcaacctctgttaaacattacaaaaccatataagctcaaatgtggaaaacacataagaaaccacctcggagagaaacaagacgagagaatcgatccgtaccgccaagaaacatatgtaaggaagccaaagccgggttgaacataagttcatcatcaccgaggttacactgtcaagcaccaacaaataaaaattcagagattactattcgttgaatccattatctaaaggattacatatttgcaactataaaacatcacgtaaccctaattaagcaaaaaatcgaaaatcaaacacttgaaacagattcttacaacccattaagccacgcgtagtcgctggaaatagaacgaaaagagtgtagaacgaataagtaacaaaggatcgtagaggtaaaccaaaaagcaagtgttaagaggagagattggctcacgaagcttgagcgtgggaacagaggggaaatgaagagaggtcatcattatcatcgacttcttcaagttgtaattcctcgaaattaagctcaccaatctgcttgatctaaagtctcacttgctcttgaatcttttcgtcgtccatttccctcgagtttcatttacccgccagtagagagagtctcctttagccacatccgcattttctcgggaactttatcgggccggtttatagatccaatacccagcccaactatcacatgttgttaatatatgattatattttaaataataatttcgttacccatttttattatctttttaacttgcaaatcatatgaaaacaacaaatgaattgtattttcacctactttctaataaaattcttcttcaaaatatatcatgaataatcacaaataaaatacactaacaacatataacttcaaaaaataatattataaaaaaaaatccgcggcttggcgcgggtttcgccctagtcttcttaacaatatcttcttgaatttcttcccatgaataaaatgtgaaatttgaaaagtttaagggttaacttcaatgtgttttttcttttgtcgaaagtgtcttagtttctttcagtgacttctctctttactatgtgagtataacgagactgatacataacacattctcagagatttggcttatttcaattatttttttggcatataacaaatatataacatatcattccaataagaaaaccgagcatcaagataaaatcattattctaagagcatccaacaactttaaaaaaaaaaatgtaaaaaagtcattgaatcagcaccatagtgatactgaactcaacttcactaattgttttgactcaaattaactatagcaaaaggcaaaagaaaaaagaaaaaaaacaggggtttcttgcaaaatggatctcaagtaccatccttattctcctcttatttgctcttgtaaacctgcacagaaacctcatcagcttcctcatttggtttaatattgactgcaatctcttattctctcatctcctgcccaatgagaaccttgagaagctcttgtatcacagctgctagatcaaggtccaagcaaacttcagaagcattctcatcttctttacctataattaagcaactaataagcaactttatgcgagaatctaaatagttctttccttgggtatgtcctctgatttggatggtgacgggataaagatttaaatcccgggagtttaacaagaggcacaactgtccacctccctttacgtcgaaatcttgatgtacttctaccatatcatacttgagtcatttcttaaaataaagtcgaaaatattccatgatggtgaccaatttgcataaagagcccaaatattgcccttttttttgggatatatgtgcactagtccttcctttgtcacctattgttcactcgactttatgtgagaatgagttgagagacccgtaattgctacgtttccgaattgagaagcatccactcgtctagtaatacccttatggaccagtgcataccactgtggcatttcgtattcatcataagcagtccaaacctggttttcaataaacaaagcttaagtccgatccgtgtcgaagtcgtaaaaatcagcatatggaacactcataaccacctcattatattcatcctcattaaccatataactagtgttcttgttttcataaatctttactctttttactgcattacatatctttaagttttgaattgtttttgttaagcagcagcaccaactttcttgtcttcacaagaggaactaggccttttaggattataatgggatcggagccttatcaaccgaagcacttccaagcatatttggcctaatctcaacttcgttgtccatctttttgttaaaatagtacacaagatccttgtatgtctttaattagttttgatcttgcagaaagaaaaagattgatcatcaaaaagtggaaagtgggaaaccttttgcacctataacagttttcatcactcaaatatatcctaatcttgaagccattaaaccaactttattctataaccgcaactaattagataaagaacaatttcacatctatgaaaacaaaattgctggaaagaaatatttgaatagttagttttggcgcctcattatatatcaaaatttagattttaagatccaaagatagtgttcccttagatattgaattcttagagaaggaatccatcaaacttgttaagagaaatcactactcttaaactaataagttatgaaaaattgcaaaataatatacggtttgcccacgattgtttgtttcaactttcaaagttaaagatccaaactgaattttgtgcacaaaattaagttctcgttgcatcataaattgagagtagagtttgtgtgtgaaaccagtggagaaacagatttggtttcaaaaaaccttttgctagattttaggatctaaaaaatggaatctaacaaacatctacacacaaatagttccaaacacaattgcgatctaaacacaaatttattatttatttagaaaaggctttagtatgatctcatttcctatcccccaaacatacgctagagaccaaacaaaaagttccctacaatctgatatatataagtgattaatggagaaattgaacatttttctgaaacgttgaagtaagaatttcaaaagttaaaatttatagaatgatgagtgcaagtagtaatgaggattagtacatacatgaaactttttgtggtaaatattacaatgaagtttatattcacaaattttatattctctgaagtttttccttcactcaaaatactgattgtctaatttcaaattattttcatatataacatggttagtttgtaaatatgaataagtttctactgacgtttttattaaaataagttttatcctattttaagcagtcaaagctgtcatctagtcgtcatttgaacccctagcgcctagttggagcctagacgagtgcctagaccgctttttagaacattacttctgggtttaaaatcagtaactatagtctttattggctagcttttaattttgtattacagttgaatgaattgtacgaattagttttgtgttagtaacttccctttactttttttttttcgttttctttaactaacttgggtgattcaagtatggtttgctcgataatgtttgttacatactaagcccaaaattttaagatcaaaagatattgttcttctaaagaatatatttccccttactctatttcaaacttagatgttcacatctaaaaagaaataactactacctaaacaaacaactcatgctaaatctaaataaaaacttgtaataacgaatagacagttttgcgcgtgaaagttgtgacaaatcaaatcagaatagagttttcactttaaagatacctgcataatataatcaatagaatttgcgaaccaaaatctgttgataagtaaaaaaaaaaatattttatgaaaacggatttgggttcaaaaaaaatttcgctagatctaagatctcatgacacctctaaaatggattctaacaaatattgcaaacacaaaggtgtcataacatagaaatgccaaaaaagggttaagagtccaaatctgaaaacttgtgaataagatccaaatgccaaattcagaaaactgtaataaatcatgatataattgaattgatggtttgttcatcaaagttcctcaaaaccgtgccgaaattcgttaaaaataaactcaaatagaccgtttctgccccaaattttgttagatatctaagcttgattcttaccaaaagcaaaaagactagaaaacttttataataaatttaggtttcaaaagaaagcttgttgttagatgtaatctaacaaatagctgcaaagacagagagtctaaacaagtaaaagtctagaaaaataattagttgttatatattcttgtctcttatcaaacatttgatttttttctagttttataaagaaccacaagaaattatgtttcaatgggtagtttgatgacattttatacgttattcatttggttttcgtatgcataaattaatctatagcaatattcttaaaccattagattcacttgaaagacaaaatataatattaacaacaacaacaacaacaataataatacataacattaacaacaacaacaaaccatttacaaaaaaataaaataactcaaaaagaacctcaaattttctcacaacaaaggtttgaaaatagggtaatattagtaactagccaaattagatacacaaattaggaaaatagccgtgcgtcataaaacattagtaaataaacttttttggagtgcgaaataaccaaaataacttggaaagataggcgggaactcgtgagttccgacactaggtggctatatgtagggaacataaacatgcgtaagtaatgagtacccgatttatttataaaacacacgccatttatagatgtctttgttcccttttttttttttgttctataagccacataacttatagatatcaattacagatgcatttgatatttaaaccctaacttataccactagataagtgtaatgatgaggacatcaaactatgtatacatatgtttgctttgtaggcgagttgttattcagtgaagactaacagataaaaaattcattgataattgtaaaatagaacgttatataagaacaactcatgtaatttctctatgtagacgaagtatgaaaacaatgggcttgagttggaaattgtgtattgggcttcatgttattaattcggttatagcctctgcaaagtatcaacttgtagagatcatacattacatggaatgtttggttatagcagtaatcattagtatacaacttgctacataatctggtcgacacattttatttgcgttttgacaatgtgaagagtctgtaaaaaaatattttatacgtatctattgcattaaatgcggcgaaagtgttatatacgagttccaatgttacattgggggaggggtgaaaaaaagtgtaaaaacaacatgttacttataagtataacagaggaggacaacatggtgcactccctagcgtgtcaccattaacttctccactgagaatagagacaacactggtctacagaaacaacaagtgaaacaacaatgttaagaaaatgatatattggaaaaggcatgtctccataatattagttttgcactctatagaaagtagttcacatctgcagacactacataatactacttaagaaaatatagcactactatataaaacatgcaacagatagaaaacacttaaatttgaaagaaaaacatgaatttaagaggaaacttgataggggttattgttaacttttttttgaaaaactttgtttttagagacaaactcagtgtgcttcgaaaaaaggcacatttgttgtttgaaaaataccatattgcccctgtctccttttcccttcttcttcttcatgggtctgttccatttttttctgtccaaatcaatttcttctttattttgcaaagaaacttaaaatcgttttcaattacataatactaaaccctaagatagtatatagggaacccaaacaaccaattttatagatttttttgagaaaaaatccagtttttaattttttatatatatgcatgtatatacatgtgtatttgtgttgttatatcactggatccgaaaatcaactcaaacacatctcgatccctttttaaaggtataaaagcatgaaatctaaaatgaaaacatagtatatagagaaatcaatgactcaaaataacaagcattattatataagaacaccttatagagtagacatagtatgttatctatataaaacacatgaaccagctataaataacatgcagaatatgaacaaacctccttttttttttttaaacccctaaacagacgaaaaagaatccacagagtttgagaaaattctcagatctcgccttatctaacttcatgtagagagattaaaaaaaattgagtgttagtagagaataaataaaaaagaaccaaaacttagatctggacacaatcggtaagaactctgtgcaggatacttatggaagtgtacatgggaagaaatagaagaagacatagatagataatcggaaacccagaactgattcattggcaaagactagattggagaggaggagaacgaattaaaacttctctcacaaacgacgatgagaaaaagaagattagcagctatataaaacacatacaaaaaactataaaacaaataaaataacagagtacttaatggcagaccaaaaggtataaaagcatggaatttaaaatgaaaacatagtatacagagaaaccaatgagacaatataacaagcatcattatacaaaaacaccttatagagtagacataacatgttatttatataaaaaacatgaaccagctataaataacatgcaaaatatgaacaaacctcttgtttcttttaaaaacactagacggacgaagcagaatccacagagtttgaggaaattcccagatctcgccttatctaacttcatgtagagagattatgaaaaaattgagggttagtagagaataaataaaaaaaaatcaaaacttagatctggacacaaacggtgagaaccctatgcaggatacttatgtaagtatacatgggaagacatagaagaagatagagatagaggggaaaaagaaccaaactttagatctggccacaatcgttaatttctatgcaattgaagtataaagaggaagaaatagaagaagatcggcaataaataaacgaaaatcaatggcttaccttaccagattcgtcggcaaggggaggatcagaaattaatacttggattgctaacggcgacaagaacgagaagaaggtttcaaggagacaatcaagttctgggcttgattgaagaagatgagagtaaccgacggtgaacgcaatcgccaacgacggcgctagattttgggaggatattttgcggtgtgaagaaaaaacaagatttttattttctcatatattacttttggtgcgagagaatgaatataatgttagcttctgaatatttcaaatttcaaaccgagaatcatcacgctcccaaatagtgtattgtcccctcaatgtctaaggttatacatgtaataatacatgtgtttccgacagaacattgtatctcatggctatttctttaaaaaaattagatccatgactatttactacatattcccttgaaaataccctaaaacgtattccacttattagtttccgtcgtcacctccttttttcccacgcgcttcttcctcctcaccagacaccgaggtccaagctccaggccatgcctgcatttgtggttgtggttggtggattccaagactacaacaaacaggagttccaattaccattcctggaggcagctctccatcgtcaataggtggcatggccacaggatcagcagcggcggcaacagactctctctttacctcaatgtcatcatcaagcaagaaatcaaagataacagtttgagccactgcggcatcgacattagatttctgtagcgtgactcgtttgctttcctgagcatggagccacgaacgcatcgtgagatccatgataaacatctcacatgctttcgagaggaggattggagcctcactagctatcatagtcacatccggatcatacttcataatcttcttgatacgagttataggaaggtcgtgatttttgaaatctaagttaccttccatctcttttgaccagaaactcttcagttgctcgttacctttcggtggcagctggttgttgccgttgttgttctccataagatttttttcttttttgaagtttctagtgttctaggcttgttatttttttatttgaagatttgcatatataaaggaaaagcttaagcatagattagatatggtgggatagtaagcaggtaaacttttacaacaatgaatcttaacgcatttagtatattgttaagaatatttaatgatattaacattatttgtttgactaacattatttggttattattataagaagaaaaaagaaagtgatttatttttacttaaagtgtatatattataccaattaatagtgttagaaaaaagaaataaagtaaatacaaaactatattttctctataaaattgcaagataattttttgctgtacaaaacttattttgaattatttagttaaaaaatatgttttcaaatgttaaatgtgaaagcataattcatatcattgctcgaacacaaaggagttacatgttgcatctgattggtttagctttctgttagacttcaaaaacatatgatcatcagttcatcacatagatctattacacatcaacaactttctaactagaaatcattacttaagcgttgtccgatcttttttaccggttatagcaaaatattttaccgcagcaattcacttaaaccgattcatttatatggatccaaaacaaaccgctactaaagtttcactgatttttaacattgagattataaacatcaaaaacctacaacagtataaactaaccaacacaagaaaccgcgttgttctttatgttttcagtcccatctaatgcggcaaccacgagcatgaagcgtctcgagcaattccgatgagagcaagaatctgagaggtgcgagaagtttaagcttcttgagcctattgcaacaggctcttagagcaaactcaaacccttctacagtcacacggctcagatgaactaagtcaacgtcttgaacccgactcagattgctcatcaacatgcatagagccgtatcagacaccgagcaattgcacaagtttatctgccaaacaaaacacacaacacaagaatcaaacatgtttccaatagatgcttccagatctccatctataaatgttattttttgtacctgtcgtaggtttttcgagaagtaagcgagcgcccaaaaacccgaatcatcaatattctcgcagagtttaacgtccaagtaacccaatttcttgcagccggacgcaatggctgctaaaccaacaccggttatattctttagccctcgaagttcgaggtgacttagaagttctagctgccggatttgttcaaccccggtgtcagttagttcacagcagtatgatagaatgagtcggttcaagctcttgcaacctcgagataaagctgctaaaccatcatctccaaaaccggcacagctgcactcaaaaaccagaaatcagtaagaaaacgaaacatgtcttgcacatttttcatcaagaatccaccaagaaagtgtaccggtatagatcaagttctagaagcttcgaacatttggaaccaatatggaaaatccctttgtctgagatatttgtgcagagtccaagtttcaatctttgaagattcgaacacttcgagatatattctagccctgcggtcccaacggaacaaaaaaccgtaagataccaaagatgacaatatctaaaacacaaacggaggtttgagttcacatatatctttctattacctctgtcatttacaccataacagtcagtaagatcaagttcttgaacaagcatggagtaacatccaagcgattgaagacctttctcagttatcaaatgacaagactctaactttaaagtccctagattccggcaagactgagctacagcagagatggctacatccgtcacgaatccgcaacacgccagatttaatgttttcaggtttaagcagttgcgtgcaagacttatcatcccaatatccgtcacatcaacacatctgctcagtccaatctccattaaagatctacagctagagcttaaacttacaagagaggaatcagaaacatgagctccatcaatccatatagtcttgagatgcttcaaacctttgatgtactttaagaagctaccagagacttcctgtgaatcacaaagattagcagagaacactatcgagtaactagactaattcaaggtctcaatcgcaaacttaccgatacacagtgactggctttaagaagttgaatatcaggatggcctctgactatagagatcaagccagacaaactcacacggtcacacctagtgacatcaacctcctgtttatagcacttaaacatttcaaaaatcgaatattgaatccataaaagcttagtgtgtgaagaaggcaaagtaagtacctgtaatgaaggagaaccattctctagaaactgtaacccaccatcatctatcaaaggacaacttaccatatctaaaacctcaagctttaccagcaacgctatagaccggatcgaatcatttgtgatctgaatcaaattcacaaacaaatctcacatcaatcactacaaaggtagaaactttgaatccaatctccataaagttttcaaatttatgacatttaccttaagataagagacatctagagatttcaatcctttgcaaatcttacaaagaagatcaataccaagatcagagatctccatacaccatttcaagctaatcttattcagattactacatccaacaacaatcctcgctaatccaacatcgcttaagctcaaacacttatccatcttcagctctctcagccccgtcgcagacgacaacgcagccgcttctctatcgccgaatccccagcaatgagacacgtcgacgcgctctaaagcgtgacacatacgcgccaacgtctcaagtcctctagctcgaactgcggtggaacggcttaagttcagtgacttaatgcctaacgttgaaatggcgccgtctaatgctaaacgtaaaacgacatcgtcgtcgagttttggacagacggagaggtcgagggaagagaggtttgggtatttgaagagaagcgtcgggagaaattcgacccggaggattcggatcgtggtacgagtcaatgagtcgactcggaggaagtctttgctgattaaacgccatgttttccgacacggtgggtctagacattcgtagactcggacaagaagatcttccgacaaaacggataaaattgatggtgacgtcgacatttttgcaacagaaccagaaataaacacacaacaacaacaaaaagaaactttttaaggagaaagaaatgtgttttctctaatggattcgaaatcggaaaaatttgaagctttttttttaagtcggaataaagagaaacacagctcggagatagagtagagagtggtgaaccggtttttctaagatccgaattgggttaacggtttgcagtttcgggttcatcacgccgattagtcggagactttccggtgggaaaaaacaaaaccgaacctctctctaaatttttattttttctgatatataaaggagaagaaaaaaatgaggaagacgaagaagaagaaagaagcgtgacaggaataacacgaaatgacgaaaacacccctaatcttactagtacggaaacaatgtgtttggtttttggagtttgagatctttacgcgtggttaattatccacgtggatatatattagtggttagttatggaggctttattgttaggagcagaggatttggagcaggtgattattacataactgtaccgaagttaggtctgcaccacttgcgggacccacgtaacgtgcatcgaccgtacctatctgtttgacccaaaactatatgataaaaatcgaaaatattagtttgtccaaaaaagcatatattaaaaaataaatatattgaagaaatcatattcgtttgtctgacgtggatagtacgcgacatcgtcgtggcagatcacaaattgctattttaaaaacgatgtcgtgtaaacagttatctaaaaaagttttgtgaaaaaaaaaacctcaaagacgtttatttttataattttatatatatatatgtacgtctaaaaagtacaaaataattttataatttaaaataatatataatataatctttttttattattattattataaaattttaataaataatatatcaaatcaaaattttcgagataaaaaatttagttatatttttaaaatttttaaaaataaatatatataatggtgaaaacgtatataaaattataaaaatgagttatatacttatattatattttatattggattttatataaagattttgtatttttcatatataaaaggtaaaattacgtaaacaataattaataaatattttaaatttaatctgaaaattttgttggaaagtttgcatttgcaacgtcacaagtaacagcatagaccatgctttcacgttgggatgtttcgttgaagtattaagataaggttagaaagttttatatttactatttattgcatgcacctattattgataagttctaacaaaagtaattaatacttttctcagttttaaaacttaaatatttacatactcaaatttatgtacttcgtgtacggatcggatcgtcagaagtttgacattttctttagacagacatgcatacgtaaccaaacttctatctggattgttgaaaatttaaaatgtagatatacttctttttcgtaatacgttagcataattattgaaaaaactcttaaatttgtctggcaatttttatttttcacctcaaaaaatataaaataatcttatgaagtttaaaataatacgtaatatacttttattttactattatcaaattttaaatttttgatagataatatatcaaattgaaccccttaagatgaagagttcaacaatatcttaaaaacaaatatatatgatcgtgaaaatggttacaatatatataaaattataaaaatatgatatattgcttattattttgaatttcataggattgatttacattttttaaactttaatagacgatttttaagtttcattttgcacaaaatctttacatatcagtataaatcgcttctcatttgttatttattactgataaaataaatttgtggactgatctttaagtttattcattagtcacatatgttgctaatgactactaagtttgtatttatcctaaaaaataaattcattatccttcaaattttattaagacgcctgtaactttatttgtattatatacatatatatctatgtggctgctagtctactattgaaaatcttatttaaattaatgtgtgcttcaacaggagatagaactaaatatgagtttatatattaattagagaaactaattaaaactcatatttgttccaccacctgtcaatacacacttaatctcaagaataagatagtccgtacgtttaatatatatctttaacttttatatagttgtcttatatttataatttttgtacaggtaatataggctggccatttatacgatgctcaatatatatcttggtttataatgtcactcatgaaaaggtgactggttgagactttttcaatatctagtttatcactaaaatatttaaataatgattgaacggatgatatctgggaaattaatatgcgattagttggcactttcctgtctcttattcgattttcagcctcaggtcaatattcgattttacgttcatgtaagttaatgtttcaaccactccaaccttaaaaggttgcgtttcaatcaactacactttaaatttcgttgatttgaatagcctttcatgttttaatatagtaacaaaaaaaaggagtatgaaaagttataaacaattgatatgttttattttcaccaaaaatcttgagagattccaaaaatacttctaatatatggttttattttcattgatacgttcaggttgctaaaaagactaaaaagatatgttaatgtatccttgaaaaaatatttgattatctcaagttcatgtatgtgttcaacaattaatgtatgtgcataaagaacgaaaaattgctttttttttcttagaaacgaatgacataaactttattttagaaaacatcttgaaatgttttgcgagttgagtctcttagggacagcataaaaagagccatatgtaacatatagactggtccgagggaatgcgtatttaagttttaaaaatcatatagtgtatccatagattagatgttaaaacatatatatatatagtttattgtatattattggttgtgatatacctgaccagaataagatctacccgaagtgagcctagaaaaaaagatgacgacaaaggtgaaagacgtaccttgatctacaagttgcgagattctcgcttctcacgttcttctacttcgttgacttcatttcattgaccttagacagtgaggcttgtagagaaccaatgggccaagattgtttatccgtctatcctctctttgttatttattataaaaaatcttaatttgcgatagatttttgaaaaaatatataaagaagattatgaaccgtggagatatacgagcgtggatatgatgatgtgtttcctttcgtatgatatataacattgattgttttggaacaaggtgaagagttgtggggattttatatagggaaacttatgatgatgatgatcacattttgttggtcttagagtacatcgaatatgtagattttgttcatatgatgacatcaaatgcaaatatgagttcattgtctttccaaacaaagaatatgaatctatgctaatgtgtcacctcaaatattatggtccatgtaaaattttcaaagtaattaattaccatacattatatatgtccacctatatgttgattttggtctactgctccaatttgcaatcgaatatagtacatatgttctctacttgccatttttttgtcaccatattatgtgtttaggttagagtcatcatctattgatttaggttcttgtcctcgcagcgccgattttgtaccgttggttgactgaattaaatagattaatcggattaaacccgctagttaaccatcacatttggcctttgccattgtagcctcacaacttaggcaattttaggatttgattggttaatagataggtgcaaatgcaagatcttttggtagcaatggttgctgttttaagagctataaaaatatttatttgattggtataagagttgaaaatatgtgtgtttgtgggatgttgttatattttgttatgggtgagtttaaaactaatataataaaatatgctatctaattatactaaatcgacagtcaatttttcaataactgatgtattctccttttgacatctggcataagtctcaatttttgatgttttactttcacacaatatgttaatatttgcattcctaaaaacttttatttttactcttccacgatctccatgactacaacagttgcaaactaattagcaaagaagaagaaactgtttccttcttgcaattgattgatcaccttatttatacggtttcatcttctttgcaattagtttactttcttggcgtaaagttggtcgctgaaatatactattctaccatttttcgcccacttttcttcatcaaatcaaaatttctcatcattgctgatcaagaagagaacgagaacagagttattctgaaacacgataacagaagcattctaaaacacaataacagagtgaattgcagccagcaatgatgaaacacgagaacgagagtgattctagcttttaaaatcaaattatgtcgctgcatatatttttaaggtatcaaatttgtatcattcaagatttgtatatctcttcgttctgcatttgttgttctgggtctcaattttagtatcatttagatataaattgtgaatatattgatgttgtagtatcaatggagacaagctagaagaaacaagaatgtttgggaaagagattgagaagactgaaaaaggtgaagaagacaaaagacctaattcagcttcagacacaactcaatacggtgtcgttgagtcagctctaccaaatcagatgaccaagcccaataacatggtctggaggcccaaagcagaaaagcagcccatttagcccatccaagagcaacggtcacctgcaaaacaagaagacaaaattaaggaagcttcaaggaaattgctaaaagatgaaagcaattccagctgtccaagtcaagacctaatcttgactaataggtttgaatgtctagagagtgaggacctagcttaacctaatctagagactatataagagagtctaatgtaatcacaacattaagagagaaataagatggaaaatatttcagtctccttcacatactatctctaaagcttactactttcatggtatcagagccatggattcatcaatccagctctattctcatccggttctacatatctcaaactgtgttacagtccaactaaatgaaagaaattaccttctttggaagacacagtttgaatcctttctctctggccaaagtctcctggggtttgtcaatggtgctattaaacctcctccagtcgacaacactctgactcacattgatggtctcaccacagaggttccgaatccagactatcaagcatggctgaggtcggatcaagtggtgcgagcttggcttctaggctctctgtctgaagatattctgcgagaggttgtccacaccaccacggctcaggatgtttggactactctagctctgcactttaacaaggtatcttcgtctcgtctctttgagctgcaaagaaaactgcaagttatagagaagttagataaatcgatggatgattatcttaaggagattaaaagaatctgtgaacaacttactgctattggtagtcctgttagtgagaaaatgaagatttttgctgcattacatggtcttggcagagactatgagccaataaaaacttcaatcgaagggtctatggatcttgaacctcagcctacctttgaatctattatccctcggttaactggttttgcggataggcttgctagctacaacacatgcatggaagtttcaccacatatggccttttatgcaaactattcaggcaaaggaagaggaagcttcaatgggaaacctggtggtaatcaaggcaaaggagggcaatactcaaccaaaggcagaggctttccacagcaaatcacttcaggctcaagttctccgggttccaacaacacagaaaacagaatcatgtgtcaaatttgtggaaaaccaggtcatccagctttgaagtgttggcatcgttttaataacagctatcagtatgaggaactccctgctaccttgactgcaatgagaattactgatgtgactgaccacaatggaaatgaatgggtaggagacagcggtgcaacagctcacattacaagctctcatcaaaacctgcaacagtcacaaccatatggaggatcagatgcagtcatggtgggaaatggagattttctgcctatcactcacactggatcaactaccctaccaggaagctcaggtatattacctcttaaagatgttttggtttgtcctaacattggaaaatctctattgtctgtttcgaaacttacaagggattatccatgctccattaattttgactgtgattatgtctgtgtgactgataaggcaacaaagaggcttctggctcagggaaacaacagtaatggcttgtatgttctgaaggattcaccagttcatgccttttattcctctcgtcaacaaactatgtctgaagatatctggcatatgagactaggacatccaaatcaagaagtccttcagtatttgcacaagaacaaagctgttaatatcaacaaaagctccaaaggcatctgtgaagcatgtcagtttggtaaaagctcaaggttacctttctcaagctcttgttctactacttcaaggcctctcagaagatacactgtgatctatggagacctgcaccagtgaagtcagtacaaggcttcagtttttatgttatctttgtagacaactactctagattctgttggttttaccctctaaagaataaatcagattttctaccaatattccataagtttcaagctttagtagaaaatcagtttcacagcaaaattggaagttttcaatgtgatggaggtggagagttcactagcctcaactttgtgaatcatttgcatcaacatggaatccaacagttaatctcctgtccttatacaccacaacagaatggtttggcagaaagaaagcataggcaccttattgaattgggattggcaatgatgtgtcacagccgcatgccaatgagatactgggttgaaggattcttcacagcaaacttcctcattaatctcctgccttcttcagttctgtcagacaacaaaagtccctatgaggtattatttggtcagaaaccagattatacttctctcagagtctttggatgtagctgttatcctacattaagagattatgcaaagaacaaatttgatccaaggtctctgaagtgtgtgtttcttggatataatgaaaagtataagggatacagatgcttactgatttcaacaggtcgagtttacatcagtcgtcatgtgctattcgatgaggaggacttcccattccataaggtatcggcttccccacagttcatcactactccacttcgcatggcttggcaaaagagttttcaacctcagacatcagaaacaacagttagttcagaccagaatcagaaagtatatgctcagatcgacatagaagcttcagcaatacctattcctgctacttttccaactagtggtgatactgggagttctgggtgtacggcaggcattgatcctgttcctataggcaacagctctttagtatcatcacctagcttggcaaatgtagtgacatctgcaacaacagaaacagctacaacaagtcagtcatcagcaacaacaacagaaacaactacagaaaatagaggattatcagtacctactgtatcatctgttagacagtctcaaagacatcacatggttacaagatctcaggtgggaattagaaaactaaatcccaagtatgctcttcttacttcgagagtcaaatatcctgaaccaaaaacagtaacttctgccttaaaagatgaaggatggaataaagcgatgcatgaagagtatggaaactgtcaagaagcaggaacatggtctcttgtaccttattctccagatatgcacgtgttgggcagtaaatgggtcttcagaaccaagctcaatgcagatggatctctggataaattaaaggccaggttagttgctaaaggatttgatcaagaagaaggaattgattaccttgaaacttacagccctgtagtaagaactgctactgtaaggactattcttcatgtggcaacaatcatgggttgggaaatcaagcaaatggatgtgaaaaacgccttcctccatggtgatctcacagaaaccgtctatatgacacaacctgctgggtttattgatcctgcaaaaagagatcatgtctgtcacttatacaaatcactctatggattaaaacagtcaccaagagcatggtttgacaagttcagcacttatcttttggagtttggcttcatctgcagtatgtctgacccttctctcttcatctacataaaaggaaaagatataatcatgcttcttctttatgttgatgatatggcaatcacgggaaatagctcagataccttagctactctccttgtggaactcagtaaacgcttcagaatgaaagacatgggtcagctacactattttcttggtatacaggcgcaattccattcagggggactgtttctctcgcaacagaagtacgcagaggacctccttgctgtagctggtatgcttgactgtgctcccatgccaacacccctggctctacaattaaacaaggtatctcatcaagaccaacaatttgaaaacccaacatatttcagaagtttggcaggaaagcttcagtatcttaccttgactagacctgatatacaattcgctgtgaattatgtgtgccaaaagatgcacatgcctaccgttgcagacttcaatctcctgaaacgaatcatcgggtacataaaaggaactgtaaccatgggaatttcttttaacaaggagacagactgtaccttgagagcttatagcgacagtgactatggaggttgtgaaacaacaagcagatcgactggtgggttctgtaccttccttggaaacaacattatctcctggcagtcacagaaacaaccaactgttgctaaaagttctacagaagcagaatatagagctctatcagaagcagcttcggaaattacctggctatgcaagattctgaaagaactcggtattcctcttcatcaaacaccagaactatacggggataatctctcctctgtttacctcactgcgaatccgactttccacaagaagagtaagcactttgccaatcattaccactacgttcgggaacaggttgctctgggaactcttcgggtcactcacatctcgaaccagtttcagatcgcagacatcttcaccaaatctctgcctcacggtcctttctcttctcttcgattcaaacttggcgtagatgttccacccactccaaatttgagggggactatcaatggagacaagctagaagaaacaagaatgtttgggaaagagatcgagaagactgaaaaaggtgaagaagacaaaagacctaattcagcttcagacacaactcaatacggtgtcgttgagtcagctctaccaaatcagatgaccaagcccaataacatggtctggaggcccaaagcagaaaagcagcccatttagcccatccaagagcaacggtcacctgcaaaacaagaagacaaaattaaggaagcttcaaggaaattgctaaaagatgaaagcaattccagctgtccaagtcaagacctaatcttgactaataggtttgaatgtctagagagtgaggacctagcttaacctaatctagagactatattggagagtctaatgtaatcacaacattaagagagaaataagatggaaaatatttcagtctccttcacatactatctctaaagctgactactttcatgtagaagttgggcacatcgaatacatgggattcaatgtcctggctttatgggaaagaagaacgggaaacgaacaattctgcggagcaaattgtgaatgctaaattgttagatcgtgaggtaactgtcatttattttgtttggttttcactaatcgttgatcacatatttgattacgcgtttgagttagtgacagcacaatagaaaagaagccatacaagcaccacatcttttgccatgaatacacccatcaatccacatccatactatggtatgctacgatcaaatcttactcctaaactactagaatgtatgtagattcatgatcagctgtttctgttttgttttgtttttttttaaaacaggcccagcctcgattgattcagcactttctaaagatactttatcaggtaactctctcgctcaaggcatttattcaatttacaatgcttctccggtttcttttccttaaagctaaagaccagtacctgacattttcttggttcaagtaaagtttttttttgttcactttgaaatgtccagttctttctattttcttgcaaaatttgcagacgttacagtagctaattctgcagaatctttcttccgttccaactctaattgttgttaagtgggtgagttcatggagacttgcagcgtttgtaattgtttgtatccttatacatgtggtatgtatattaaccagtgacttgataataacttaaactatctacaaagtttatttatttctaagggtggaataagattatttgcatgatttaggtttgagaatcattatggaaaatggcaacgggttcactatgtgtcacaaaagcaatgcaacatgaactggatcagaattagtgtggtgagatgaaatttctcatagatacctgttatatttgattataaagtaaaaagtgatgtgattctgattctatgcaataatattctgagttggtgttttttgggcagcaacaaggtagataaaaagctcttggagaaagttataggtgaaaagagtatgcactttggctccatcgttaaggtttctcaaacatatttatcaggccatttaatccgtttataagggtgaaatctctagaccaaccaccatgtttcctatcacaaagacacaatcggcgatgataaactaacaattgaagagaagagataagactgagattgttttacatctgtatttattcttataccaattagttgtcgttttttttctttttcatttaaatgttcttcgaaaaattcagtagttaatataattttcaattagtaaaacaaagtaccacgtccgtgcttagcacgggcataatgctagtttaaatatatattcaaatatgtttaattaatattgtgttatttttttaaacttgagtgttgtttcattttgcaaactctaacaacaaactttggttaagattaaagtaaatgcatttgttacagtctttcataatttttcaactaaagtgattagtgatgctgttgtttcatttccaaactctaatcacctaagctatggtcaaagctttaaagtgagtgtatctgttacagtgtttggataaatttccaactatatggatattgttgattcacaacttacttttttgagggttattataaatttaggcatattttgggccaaaaattataaaaaatgcatatttcaattgggcttacaatcctaggcatttttggcctattaaaagtctttttgccctgaagttcactcttcatcgtttccttctcttcctcttcatcccttccttttcttcttcatatttccagaaaattttaattttgttcttgagaaaattcttttttgattacaaacactaaaccctaaggaatgatactaaaactcaaacaaaataattaaatgaaccgtttgagatataaaaaacggatgaaccaattacgaaataaaaatttgagatcttatcattgtcttcttcgagctcgtttatcatgatacgtgagtcatgaccatcacttctcaccgccgcccaacattgctgttgccgaagcttatatattgtcgtcgttccgttgttgtaagcggagatcttgtccgatgtcttccattacgttaaaaaattgaattaatcgattcaatcaaagaaacaatctcagattaataatttaaaaaaaaaaaaatcaaagaaacaatctcatcaattggaggaacctcaaaattgattgcggaaagaaattctagacccaaatttaatttttaattaatttgaaaagggcaaaatcgtcaataaaaggtaatagaagtacacattcgcgtaagacatgtgtaaaatgtttaatcatacaatacccttcattttattgtgctattttcataattgatcatacttttctgaccattttgtgtttgtgtgtcaactacactcttacttcattacttttttttttcttttttttttctttctattatctgccttgtattaaaattagatacccacaaatttgggattgggctttggtttacaatgaaaaacaaagataaaggcaaatcagaaaaaaattatcggaaaagaggatcttgccctggtgacactgtggcgcagagagtccgaccattggcaccggcggatgcaagaaccacagctttgcagcggatcgaagtatctagtaaacagagatgaagcatccgactcccgattctgttccttttcccttgatcaactgttcccaccacagatctcttggtatggtcaaccctccgacatcacgacacgccgttgtcagctcccgaacctagcaagtcgacaatctcaagcataacccctccttttcaatccggcgaatctttgatttacctaacaaaaaaccttcaattcggccaggaggaagcagatcacggtggtgttagaggttgatggctcaatcggaaacccaaacacattgaatccgctataggcaacaagatccaggaggatccatcattaaccatcatggcgattcggcaccacccaccttctccacatcgacttccgccgtagttgcagagaccgatacgacggctgaaccacgagaagaatccgttacaccagccgacgtccacaaccaaaagaaacagtaatgaatctctacttccaacatgttggatccgcaaacacatcgaaagggacaaaatcacaccactaccgacggagaagggatcttgttcacccctgaaatttcattgatgttacccattttgtatgtaacattgtttcttctttgatgttgacaactttatagttgtaaaatacaatagccactaacaatagccactaacaagtgtgaagatatatatcttaaacactaaactaccaaaagaaaattgtgaagatagatatttggacaattccactcacgattactattgcttttgatgtcgaacaaaaacgttacttgctggtttagaaaatataggatcaaaataatgcatctacatgactacatcaatggaaacgaaaccaaattgggccaagcccattaattaaaaaggagacacccaacattagatatctacttttgtccatcaaactttgttttatgatttttatcttgtggtatattattatacacttcggaatcggttgttccgttccttttcctggtatcaacttatgtgaacaatgagacattgagacgataaatcaactcatgatggcttcgaccaaaaaaacgcatttcggatttcaaaaggaatgttacaaatgtaacatcatcgctgatctatttacaacacaaagttttactttaaaatcgtcatggcatgatgatgttgtgatagagatgacgatgaagaagaatggaggaagaggcagacgactgacatatcatccatggagtatcctcgtctctttttcttccaagcccgaaccgcttgctctactaatcgcttagccgccttaggccgctcagccgttgaggagacaatctctatagcctcttggttagagatcacatcccatatcttttacattcaaaccaaagagaaataaaaagattaattactaaagatgccgataaataatttaattaagactgtacaaccaagataaaccaagtcgattcaaatcgaaccaaaatgtatacaaacaccaaaatttatatacatttgaactttaaaaatctatctacctaaacatcaaagccgaaccaaaaccactcaagtcgattcataatagatttatataccaatgagtaattttcattaaaccaaaaaactcaaaccaaggaaaacctaaattcggattaaaaattcctaaatcaaataaacaatattccaatttgcttttcttttggtattaccaagtctcttattcaaatgtggttatttcttttctttttcaaattgactttttataactttttgaacgttttaagagtgtggatgagtatattttgtttgtgtaaaggtttataagtatttaccccatcactggccaagattatgaagtggtctttagtagagatgtgtctttgagtgacttcagggactgagaccaatccatactctttaatacagtagtctccgaatgctcttgacattgcgagccccggtgtttctgcgtctggctgccacacacgatggactcccggctcatcatctagacagaaaacccgccctttgcagccaattatccgctccttctcctctgttttgtttttcaaagcaacccaaattcaagattaagagtcaagaattcactagaatatacatataagatttgtattttgtttgcttctttgatttctaagaggacggaagttaaaacttccgagatctagtaaggtaaaaatgcttatggaatttaagagggattaagaaaactaacgtggtagattcggtttgaaatcgagggtgagctgaaccgcaaccaagcttccctcatccgactccatggctagtaccgctcttgaatcgcctacatttgctacataaataacttcaccctacatacgccaataaaccattaatcagtgaacagaaaaattctcaaaaaacgtttactaacaataggaagaaactaatattcattttaagttttacctgtctcacaatggttagagctgttgtgccgctatagtaagaatcgatcttgcggtgatgttcaagctcttgatcaaccgttgcacacgtttttagataggattgcttccatatgtcgaatcttgagatttttttattagagccttcgaggtcgagctcgggttctagagtggcctgagcaagaatcttttgccagttgcaaagaagcgacaaaggcattgagtttcttacttgtttggctacatagtgaccccatggaccgtgtccatcgaatatcccgcagaagatcatgtcttcttggcacccaaatccctgtttaccaaagataaatgagactttttacaagcataagtactttttcataagagtcttgtgaaaatatttaatttaagacgcaacgagaagctataaacatactcataaagcggtaaataacataaaggactatataaatcaagatgatgttattgtacctcccaaacgagtgcacaatcctgattaacgcctttttcgccgcgtttggagaaaagagaggctaaattattagatccttgtacattaacataaccagaggatttcagaatcaattcttttttcttagcctcgcttgccatctcatcagcagcttcctttgcgtcgcagtttccattgttgttcttcactttctttatagaaaatgatcgagctaatccattgaacatcgatgagaaatgtcccatcttttaaataccccaaaagattaatatatcaagcaacaacgagaaactttctccttaagcttcagatgatccttaaaaaacaagaaaccaaaacttctttagaaactttgatagtgctacaaggagatcataaaacagaggttaaatcttaaaagtaagaagatgagtcatagtgttgagaatctagacactttgaaaaacaacaacaaaaattgaacttcaagtggaatattcataagtctgacatggaattccattgaaacaagcttctaagatttatctttgatgtacatgattttgacttgaagggaaagagagtttctgtttaaagaaaacacatctagagatatttcttaataaggaaatgtaaaacaagttgcaagattccaagattcttctcttttgctttttcagggaaaactaacaagaaacaaaaaaaatgagaactttctcagcatgttgttgcttaatactatatattaatatgaacacctaaaaggctaaaagaagcaaacactcttaatctccatagatttgcttcaaaaataagtttgataagataaaaatttctaaatttgagacaaaggagcaaaaatcttcatatcacccgaagtgaaaaagtgacgaccaattttacacaattttttttttactttttatatcaagaactaaaaaccttggtttacttggattcagaagtagaaaggaaaaaagacagaacccaagaaaggtttctcttcagctttcatttagatcttgtcacagaccaatcatattcttcttacatgtataaagagagagaaagatttagacctttgaaatggcacgtaaggataaacgctcgagaaaagctggctaaagtatccaccggagaagtagctaatggagcgacgagagaaaaatatcagaatccatttaatggaacaattaaggattggagttgaaactatttttaagaatagttaaacttttttttctggtacgttgtttgtctctgttcattttttatcttgtggcaggagaaaggacaaagaagtagcacgacatcgtctttgttgggtttggtcttttgtggttgatataaaatcattaaatttcaattattacatttctccacgatattttgttgattttatgtatgtttttaaaatgtaggttctttgaataaattattgaaaaataaaattgtttgatttagaacaatattgtttgggattatactaaagaacgacagctacatgatatatttgatataattagacaaatatatcttctcgattgaccataacaatttaaagaacttaaatagttttaaatgatgttaagatttgatcataaacgatagattattgtcagaaaaaaatatttaataaaattgggtacatgatgaaatgggttatgagatggctgactatgtcccaatcgttacatcaagggtcaaatgaaacagatccaaaacattcagtaaatattacaattcttcgagaatactaatcaaatttgtttaattcttcacttatatatttctgatattttttcgcaaatcagaagtcaaagttaactaatttcgcaaatcagaagacaaaattttcttgtggttaactattaacataaatcataataattggtacaaaattaggtaaccgagagttgttaaaagatattaaaattaggcaagcaagtaaagaaaatcatattccatagttggggaatccaatcatacatatatgatgttatcattgattatttatttaacattgttatgaaatatattaatacttttaaatggaattgcgtcatatgattatcgtgataactatattcccgcatgtcaacgaaaccaatttagagtaaaatattcaagtattgttatgaaagtgaatatttaaatacgtacgtgaacgtgaacatagttgatgtattacatacgtatatgattaaaatattatcaactatctttctaactgaacaaaaattaggtcaatatcaacactttaaaattaggtaaatttaaaatttataactttcactttatttatgcatatgtcagtttgagtaaagttaattttgtaagttaccatttgtttactattacttttagacttagagagctttctctcaccaattagagttcttggctttgtcttaaaaggtttgccattagtaggttatcaatcacaaaaataaaaacaaagtaatgaaactagttataatatattaatatcaccaagaaaatagcattacaaaaaatgtatgaaagtatcacaaagagtaacaagcgttatcgtttattgcttttgcttgactatatgttaaatgaagttttacataacagattttgtatcaagtatcggatacaatgaatttatattaggataaaaacatataagagattttaatcaaacagattattttggctacgcattttgtttaccgaccaaataagatgggtagaaaaagcatgaaatcgatagaaatgacttgacaataatgctctcttaacttttagtaaagtctagtagaaggcactgcactaattaataattttcaaaactcagacaataaagaaagaaaaattgctagaagttacaagcaaaggggtacctgtaaactacaaaagattgtttcattcaaaaaaaaaaaaactacaaaaacatgcttcgcttgttagcagcaataaattatatgctaatgtttacatttccctatgttataagaataaaacgaactagattttaatccgcggtataccgcgggacgatttattttttgaaagtaatatatattaaaatttgcaaattttatttttataaaatatttatattttacagtttataattgttattaagtaacgttataccacgaatccatgagacaattgttaaaaaactgaagttttaacccctgttaaaacagcatattaataatattttaaaattttataaatattgattcaaatacatccaccatataacccaattacaaaataaaacccgttctgtaatttctttacccgtcccgtgatttgttttttaatgtagtaattttttaaattaagaattattttttatatataaaagttttgcaaattgtatcattctctaatacatttatattttatagtttaattttatatacagtaacattatacataccacataacatttttggttttatataatcttttctaaattaggatgatttgatatgtttaatattaatggtcttaaaaataataaattaaagctttaacccgtattaaaacggtgaattaattatattttactttttttattaatgttgattcaaaaacccgtccctccaaatccgtcttgccaaaaagtcatttattttattaatattaattttgttaatgatatgactctgaattttaatctaaacattttagctaataacataagagtgcaccatatttatttaataggggaatgtaccatatgacccgaatgcacttttatacaaatccaccaaaaaagtcttgcaaaaatactatagagataagaaacgatagtcggttttgataggtataagattagcaaatatattagttagcttaaattagttaaagaatacaaattgaaaagctatattacactttattcgaatatagtattaaaacttatataacatagagatttgataaatttttaattgttgaatactttttttgtgctaatttttatgtgattaagatttaattgatttcgtatataaaatattaaattgacttatttgtttattatttggtaacagatagatatttgaatattcagtatattttgcttcagtttaggaaatctttgatgatccttctttagatccaataagccctataatctagatattaacctgcagtataccgcaggtaggcttatattttagttaaactaaatttttttattgtaaagatgatttaaaaatatatgatattatttgatttgattttaaatgtatagtaaattgtgagttgtatatgttttgttgatattatctatattgtttagtgtttaaaattatacacttgtagtttgattgttaatttaagagtttcacctgtagtataccatcttgtattaatatcgatctaaacccgtcaattctaggattttccagcttgtattaaaaattgaatcacatctaatatgttattaattattgtagtatataagattataaattttcaatataatatgtatgaaattgaatataaatatttcaaattatgacccgttacttagtagaaagttttcttaaatctatttttcacccgttataatattttttcatgtattgaacagtttatattcgtttttaaaaattcaaattatggcatatacgaaaaaactctaatttgttttttataatgatgatattatttttccgcaaaaatagatcatataaagatgagaagtgaactataataattaataaaaaattaatatgataatttagatatcaaatataatttgttgattttaataggttacttttttggaaattaataatgtatttcatttttctaattaaattaaattaattaaaatttagatatcaaatcttatatgttgattttgattggttattatttttggaaattaataatgtatttcgttttttaattaaatttaattaattaaattagtatttgactttttaatccttaaagagataaattaatttactctttaaatttttatttctaatggcatacctatgtaattacttacaaaaattaaggttacatttaaaatgtacttcccaaataatatagtaggataataacttaatatataagggatatgtctttgatattgtagaatttcatatgcgtagaacattcgaaaaaatcatctttagaaaaccagaaggtgtaggatgatccaattaatataaatttatatttctctaagttaatatcatgttgtttagggctgtttactataaaaacattgttcttgcatgatcaaacgagttatgctgaattagatatgcttataacccttgccaaacaaaataattatattgattgatctatatatgtgataaatattaaaagaaaaacatttatttcaaataagataatagtaatacatacaagcaagtaagaaattaaaatcccttaattaagaatatataaaacttaacttattagaggatgagcaattcgaaaatagaattaaaataagtgatcatctttgacatgttcaaacaaataccaaaacgtgtctttttcacaaaattatattagttctttttcaatatgagtatttataaaggttcgaaaatcattgaaggagataattcaacaagacgagtcgttccacctaaatatgaaattaatatatataagaaactgtataaagtattagaaaaagctaaatagatatataacttatttgtgtataagaaatgtatcaaataatatacaaaataaataaacattaatcctgaaaaagaaaatatttactttaacccttttcagcttattgtactggtaaagatggaaaatatatgcataaatgataaatgttgtatgcttggatcactattgaaggcttttgctgatctttcgacctttggtattttgttcttttggtttggttcttcacgaggtttggttcttttggtgcagttaaggttcgtgggggttctcttgtttggtttagtttactttatacgaactttattcttcctttgcaatagccaatatgaataaaaaaaatgataaaaatccaatggtgagcatgcaaaattcgtataatacacgtaggtcgtatttatacacgtttaacataaagggttgtaaagtatagataaacagtttgatatatattgtatacaaaaaacaagcatatactattgtacatgtgaaatgggccatgttatgtacctatcattgaaactataaaggtacatactgacatacataatccaataaagattaaacatcgattgagtgtactatttcaaaaaagtgaattaaataatcatcaatcacacacaaatatctcaaagagtattggttgttcgaatgttattgtaaacgagttattttatgcaatagacagctcataaaaaaagggttgattggtctagtttgacttcgttattacaccatgattatggctttgaatagtgatccaaccgcacattatggtatattttaaataataacaaaaattttctatatatatatttagagaattttgttattatttaaactgcaccgcactttattcgcaattgaatcgtaaatctatattccggtttgatcaaaagatattttttttgaaaccgatcgattggcaattatctagacactgaggcgatgaagcttcggctttcacattactcgaggagggactagtcagtgagacagttatggggactgtgtatgaccgcttgtgacggtagtcttagagtgggaccaaaaagacacgcataagaaaacaacaaacactgaatttttgtattcgttggatgaataaatccccaatatgtcggcaacaatcatgcaacaccaaatctttttctctgttttcaattattttcttgacgtgatataaaaacaaagtattgatagtagtaaataaagaaatggtttttgacaggttggatatttgaattttcaaaaccatttttctgatttttttcataaaacaaatcgtctagtgtgtataagaaaacagtaacatactaaaaatagactaaaagatctccgtatctttctttctaatcatgtggaactaaaaaatacgtgttccaggccattagatctgaacctacgtggtaatgagtcatatggacctatgcatgaaaacgtgacgaaggaaacaattaaacaaaggatcactactagaccacaaccaagagactcgatgatcacttcccaattttataggggaagttccaattcggcgaccgaacctaaggtcgaagaaccacatgatgagttcggttctcgcggggcccataagtgagcccaaccataagaacttttggataaaaaagttccattctgtggtcgacacgtagctagtgagtagtgaccaacaatcacatgtgtgacggtgcagcaccggataagtcattcctttccataacctttttattttcaaacggaacatcatcacgtttaagttttcctaatccttttctgataagagaatgaaacgtatttactctaatttagtaagaaaatattactaattataatcaacgttacaaattaaaagtaggtataaagtagcgtggcagtattttctatgaatatacttctttatcattaaaaaaaatatatatggatatacttttgtgtattggttcacggaaaatcaactgttgtctgagtatttatgttattttaacaactgctgattgattttacttttgaaaaaaaaaaaatagaactattgagtaaattttcattggctgatttctagagtttaaaaaaaaaacagtggaaaaaagtaaaactccaatgttgtatgatattggtgtgaaaaaacccataaaattagcataaaggcccataattattcatgaaattgttcagaaccggtagatttccttaggttaaagtttactccatacacagaccaaaacatcaaaacaaactttgcagatagattaaaaaacaaacttcaaggaaagatgaagaagcaaaagatcttctgaattaggtaaaaagagcaaatacaattagagaaaaaaaaatgaaaatgaaacatgccacctgattgttgttggagccgataaataaaaatttggtaaattaccttggtcaaggggcaagaacaacaatgagtcaaaatttggtcggtttgttttaagcgtgttcattgttcaggcttaaaattcaacacacaaagacatcatcatagaaattatacaaaatcaaaatccaaattcaacaataaatagatccatgaagatacccttagtgtcaatctggtcatagaactatacctaaattattagtatttcttttaacggtaaaacaaactatgtatcggcaagtgcttgatcctctaggcaatacaagaagatccatgaagatacacttgtgacttgtcacttccattttagcttgaactccactgattttgctttttatctctacaaactcgagtgatgagaccaatcaccgagggccttagatgaagaaaataagcaccaacttccatttcatacaacttgactcaaaatcacacaacaaaagctgatggagtcttaagtacgcaaatgtctaacatatataaagacttaggggaatcacctttaaaacacctacgcttaatttacatgacatttagcaacaagatgcttaagtttacgcttaaccatatatatcaggcaaccgaaatcaaatttaagactcacacaaaaatagaagaagccaagactgtttttagaaacttgagaaattactagcattcatacttagggaaaatatacaattcaaataatttcttaccgtcaatctttccaaacccttcacgatctcatcttactgtatccaaatctttatcatcatgtaaacaaactcaaagttgcaggcttttatacgttttttcttccgttgatatagaaaaatcaaagcgttatggatattttactgttaaagtattactagagaagagaaaaaggttttctcctttaagaattacaagtctctttatactgctcgattttaatttagtgataaattcattagtagactgatgatggtaaatcctctcacacacttgacagagaggtaaacaatttcaactctcacgtacggacgcatcactaacatcattacttcaacaaataaataaaggagcatgcaagaattacaataaagccatatgagttggctcctattccacctacacaaccatacacgagccctaataccatggtgtccaaatgttttggtgagaaatcttctaacggacaagaaagttacatgaacaaaagtaccgatagtatataaacatccaaccaattgtcaccatcattgctatgtccagttgtccacgccttcgaaagtatatgaaatgcaaaaaatacatatcatcatgaccaaggaagatgcgaagccgcgccccctctggtcctaatcgacatgtttggactggaaggactttgtacatgcatcttctacaccaaggacacaatacaacaagcacaccatatggtttaactaaccctgatgaacatattacaatcattaattatctaatattatatatgtattgtaaataacaacgattttcttacaatgttccatatccacgtacatatacatgactgcataaattgaaggcactgagtgacaattgtaaggccgcccaataacatctttcacgataggaatgactagtcgctccttggttgctatattctcatcaccactaattctgttatgaacttgattcgatgaatgcacataagagtaccgactatacataaaaggtgacaaaatctgtcatatccaatcaaaattttgaattttcttaagcaatttgacatatcttatttaatttctaatttaaactataattcataaaaatttagctagtaatttaaatcaatactagattgatatcccgcgctgtcgcccgaaggcaaaatttatcatttgagcttctcttgtaagtatttgtattgggttgtattgttatgcttttgtatctgtgtttcatcatgggttggaaactgttatcaataagatgacaacaaaaaaaaaaaacaatatatacatgtagtcattctaacgacttgtttgcaatttgtgttttaatagtcttaaggttgcaaattttctaattccatgcagaatattcatgattcttttttttttttaatatcaatttgagaatccatatctccaagactatgaagaatgttagaatgatattacactataaggatgtagtactattatggacggtaaagatgagtcacactgaaaatgaaagaagtgggactgagaaagaaaccaggctgcatgcagttggatcgagatgaatgaaaaagtgtatcatttctttgctgaagacagatctcatccatgagctgagaaagtttatcagtgccttgctcttttgagtggtcacatggacgctggtcaatgattcttatgttgttgcatctgtcccaattagaagacaacatatcaggctaatgtccaattaacacatggtggatgctttcacagccgtttcatgcttttacaaaaaaaattggtggttctaatgcaacactggatcaaaagaactatcaagaaagcatgttccacatttaagggtttgaatggtgatggtagtcgggatggacaaatccgtcagcggtttagtccgttctatttttaggatagacaacaaaccgctgcagaccaactctatttctatgtaaaagagcggtcggtaattagtctccatcagttttttttttgaatccgcactactacagacacaatttatgattggtaaataaaaagcggtctaatccgaaaacggatttgtccgccttaaccgctgcaaccattcaaactctaagccttttaaagctcaacctaaactcaaaggctaataggctatcaacattcgtgctgcttctcgcggttaaggactccaagaacatgactatctccaatgttaaaatctgactaaagaaagagttagttacatgccaagatcaatggaacgagcaatgacgttttggccttcccttccatgtaaactatgcatcgaagatcccaccataacacttgttcgggaatactctataagcatagaggacagagagccacttaattaacatcactacaaaaaaaaaaaaaaagactcatttgcattacataatttgtgtcaaaaaactaaatgatactaatttgaatcacttatttacaatcgatacaaaaatattatttaacatcagttacaataattgatgctattattgatatatatgacattatttcattaaaactgatacaaatctagaacgtttgcatcactataacaaaaattgatacaactctaagaatatacattatttataaaataatacaaaatttgcatcaataacaaatgatgttaattaaaaattaagcatcagttgtaaaaaacgatttaattaattacttaatttgtcaaagtcccacatcgctcccatgaaaaagagacttcatagttttcttatatatagtgactctaagaatttacatcatttataaaatgatacaaaatttgcatcaataaaaaatgatgttaattaaaaagtaagcatcaattgtaaaaaaacgatttaattgattacttaatttgtcaaaatcccacatcgctcccatggaaaaggaggcttcatagttttcttatataaagcgatcttggtttttatattgtcaacaaagtgttaagcttaataagcaactatttatactaaacatatataatcgtttgcttctatattaattaataaaattaaataaatttgattactaaaattgatatttaatataattttaaattttttaacattagttatttataattgatataaacacctaacatcacttcttattatcgtaacaattattaacgtcattttgataaattgatgcaaagactaatatcatttatagtaattgaagtaaaattaacatcattttttgcaactgatgaatactaacatcgatcattataatcgatgcaaataattatttggaacgatgcacataatttgcatcaccaattccagagtcacttatagaagtgatgtaaaactcatttgcatcaattataactgatgtaaatatacaaaataagtgattcaaaacaccactttttattgtagtgcactttagactatgtatgtacaaaaaattagtttagtatatagaggataatccaaacaaaactaattttgaaccaatataaaatgaacttgtagataatacaaaatcctagataaaagaccattttaaatcccacaagagacctacatataattcgtcaccaacgctataatataggaaacacacaaggataaaagaaagaaagattataaaaatggcctctctaaacatattgcgacttgttcattgggatcaagtaaaaaggaatttggaaattgacatacaacattccatcattaatattgcacttcttgtgcatacgaagaatggatcaaatcctcccgcagacatcgtaagaaaatggtcgaagcttatgagagtctttacgttttgaaagcgcggcggaatttttatctcaattgaatttatgaagcatatttctgttttttttctccctaaaaaggtggtgaataataatatttagagatattatatgaaatgtttaaaaaaaagaaacgaaacaaaaagagatattagatggaataatagagcgagattattagatagcaattaaacaaataccacattgtatgtttagtttctcaatataactaccgaatctaacattagaaaaagtattatgatattacgtttagaaaggattactcattctaagaatcaaattttggaactcaccagaaaaaaaaatcaaattttggtcctaccaagctataaaaaatttgattgttattttcaaagtggtattccttattaaattgaaatttatttatgataaacgagcatattgtttctgatatcaaactggtgaagggatttagcataactctatgcatattgtttccgaaatgataaacgagcatattttttcatccaccgtaccagtaactctatgcagcttaccactatattatgtagcgttttgaaattgagtttgtaaattatgttgattttcaatgcttgtggtgagtttggtttatgcagcttactttggcttataggattacaagttaccagtataactaggctgcaattttgttgattttccagtggtgacatgatcttattggattataatcacgcatcaaatcctgatggagtcttaagtacactagtgtctaacatatataaagacttagtggaatcacctttaaacactaacgcttcacatgatacttagcatcaagatgcttaagttaacgctttaccacaaaatctagggtaaaataatcttaacaatacacaaatgtggtagaaaaacataaagagaaagtggtataaactaaaagaatataaggaattgtggtacaaattttaattttttcaatggaaaaaaatctcaaacaaaatcttaactatttaaaatttaccagaaaaacccaaattaatttattggtacaaattaaacccaaactagaaaatattggcagattcataacacgatttcaaaaacaaaatccaattttactctaagaaaaaacttaattctatttgtttgaaactagttgtcgattttttttgtttaaaagtacatatttataatataaaagtagttatataaaataaaatttcatttgtattcatgaaataaatagataatcatcttatatatttaactgcttatctaacatcgacctattttcatttgttcttgaaatatagacagttttgctcgatctagaaaacttaacactctttatgcatcatttttggtacatgcataccgccattattgtagtgctaaaataaattggataagagatgttaacacaaaactaactatataattatgatgaaaaaactaaaatatgaaaataactcgaataacattcaatcatctcgatattgagaaaacaaaaattagagagaaataagcaacgaaaataataatagagaagcgatttggtttttaaaatttgaaaagctaaaagtaaaaatatatgaatagatgattaaaagcgaaacgtcatatcatttttccgtgataatatctaaaaagttaatgagaatatatcaagtaaaaatatataaagtaaatgagaatttttttaagtttcaaacaaatagaattaagttttgtctttaaaagtaaaactggaattatttgtttgtttgagattgtgtgtatgaatctatcaatattttataattcaagttttattttgtcactaataaattagtttagttttttgaaggcgaattttaaattagtttgggaattttccagatttatattttcacaatataattaaattatattgatggattgttttatatatataactatagcactaaacaactttcaataattcttccgacgcaaaagactctcttgagaaaccctaatttcaactgaaaaaatggcagaaaccgccgatacaatcaacaccaccgtctcaacgccgcagccacaattagaaagcagatcagacgagacaagttgcctccaaaaacacagatctgacgcaacatcagaggtgacgaaagaagagaaatctggaggaatcttgttcagcgtttggccaccgtgtcagaaaagtcgcgactacgtggtgaatagtatgatcaagaccttatccacagactcgatcctctcctacaaatacggaacgattaaacctgaggaagcctccgccgtcgcgaaatctatagaggaaaaggcttacgacatcgcatcaaggttcgtgtcgagtgatgggattaagaatcttgaggtctatggcatagagactagcgagcgtatgattgaatctgcggaggttcgattcaaagccaatggaagtatggaactactactaaatcaaacaataaagatgatgcagttgctgatttagaggagaagcttgagcgttaagtttccttatctcttttatgatctatctctagggtttgcttttgctagatttgagattctcaaaccagatttgtttccttcttcttaatatgagtcgttgattgcttttgcattatgtggtttagtatcacacttattattcctatataatgttcaatttctttcgtccaccaccagtaactctatgcaacttccctcattaggttatgaataatccttgtaaacttaaaattatgattaaggctaggaggcacgttgatagctcaaacggattcgttgaggctcgtgaataagcaaagagaagcagagaaacagagtgaaaacagagcaaggagaaacagattgtttaaccactagcttgagagtctagtgagttgtatataaatagatagaagagtattgcacaagttatgtattgatgtgtgtgtaacaaacgtatggtttgttagaggagagttaggagatctcttgaacaaatcttcattgttagggcttggaagaattttaatctgaaactcacaaggcattgtaatctggaaattcaccattggcatctaaatccaacagagccagagtgtttccacctattggacacagcactacttttaacaacatcttttgacggaagctgccactagagcatctgacacataaaactgtgtcctcttgtcttgcactacaggttttgagttaatcgcttctctttcaaaacaactttgctccactgaattccattcacagaattgaaccgaaaactacagtttttgagttcatcgcatcgatcgattactcaattagttgcttatttgcgtcaattatggacatctaacattcagcgtttattgtatactgtattaaagctcttaatatagactcagacaaaaatagaattgagaattgcattcataatacttaggaaaaccataccaatcagacaattaaaactcataatctaaactagaaacagatcgagtcagggacttgatagaagcttccgttgtcatggttataaagaaagacagaatatttgctctgatgttgactcaatgatgaagtcgatagctcttgctctgtgtttgacacaccattctccaatggttctgtccattgttgattatggtgattctcaggagaagacaatagattcgttgtggaagaaaccgcacggctctgacctaacttggtctggtttttctcgggttggagtaacagaagcttattttgcagtacccgtagaccactttctaacgaatcctccatctctaagactttctcagacaatttattgtcgtcgaggatcttcttacgtagaaacagagaaaggtttgtccttttcttgcatcgctctctctcgtgtaatctgctaaacctctcagccatgtctcgaacttttgattgatcttccggccatgtcttgatgagttctccgtcacgaccataaagtatgacacagacttcgatgtcgcagagagtcgaaagctccaaggctttcttaaacatggtctgttctctcatagacaaattcgtggtcttttttgcagtggaagaagaagacagagacgatttcttgaagcaagtttggtttctcacagacaatttggttttcttcttcgtcgacattgaagaatacattgtgatgttttgtttacacacagaacaaaaagacgcttttatttgttatcaaagaagagaaaataaactctgatcgagagaattgggatacctaagtgaacagttgggagacactgtttacttgtgggatgcgtctagttgttatacatctaagcttgtgaccattgatgatgagaatggacctgtcacaagtattaactggacgcaagatggtcttgatctggcagttggtcttgacaacagtgaagtccaggtttgggattgtgtttccaatcgtcatgtgagaacattgagaggtggtcacgagtcaagagtaggatcattggcatggaacaatcacattctaacaactggaggaatggatggaaagatcgtcaacaatgatgtgaggatcagatcatccattattggaacttacgtgggtcacactgaagaggtttgtggtcttaagtggtcagaatctggaaaaaaactagcaagtggtggtaacgacaatgtagtacacatatgggatcgttctctcgcttcctcaaacccaactaggcaatggctgcataggtttgaggaacatactgctgcagtgagagctcttgcgtggtgccctttccaagcaagtttgcttgcaactggtggtggtgttggagatgggaagattaacttctggaatacacacactggggcttgcttgaattcagtagaaactggctctcaagtatgttcattgttatggagcaaaagtgaaagagagttgcttagcgcacatgggtttacgcagaaccagcttacactttggaagtacccatctatggtgaaaatggctgaactcaatggtcatacatcaagagttctttttatggcacagagtccggatggttgtaccgtggcttcagcagcaggtgacgagactctcaggctttggaatgtttttggagaaccacctaagaccaccaagaaagctgcttcaaaaaaatatacggagccatttgctcatgtgaatcatattaggtgaatctactgtgaagactaacaaggagaaaaccattgataggtaaataatgtatagagaagcaatgtattcatcttttttcctgattcattattcatgaattttatatagttaatacaaaaccaattatatatgtaaactgttgagtcaaacacaactaatatagtatatatatttctttatgagatttttatgtaaaactctgtgatgttgatgcttattgaagcttaatttgttgttgaaagaacaactctttccgattcaaagattgaattttccccatcaaaggctctgttttggatttcattgcagaaccaaagtccttttttttaacacatacgtgttaaggtttaggatctcttaacctcactttacaatctcagaacgataaaacagagattaacattgatctctcttcaagcacatcgcttggctcaagcacatcgctcgactatcacattcaacataaagcataaaccagaaatgagtgagtaatgactaatttatactcgattcccttcaatagcaaagcctctgtttccacccaagtctttctcttcttctttgcctttgtccatgtcatcattcaagtcaacattcttcttctgacgtggcatcatccttacatggatcgtatcaatacgcttgaggttgtgtgttggtggtgtttctggatttgtgtgttgctttttatggtaggtcttggaataaagacacttgctttttgttcagttcgagttttgcgttttctagaatccaaaacaatattagttcatagcttgatgaaataatctaggctccatttgtcatctctcttataattggcaaaccaatgatttatgaaaccgcaaagtcgggttatctagaatcggtttccataagctatgtttaatattctggttttgttgaataaaaccggttatgacaaaaccggtgaagcaactaagagcacgtacatagagtatcattagtaaatttttaatattaattagattataacccgcggtacaccgtagagacaattaatttttttaaattagtatatataaaagtctgcaaattatatttatctataaaaataaatattttttatagtttacaattgttattaagtaacatcttttcaaactcgttccgtcaaacccgtcccgttaaaaaaatccacggtacaccgctaatttaaataaatattttacaggattgcaattatattttagtttgtcaaacaaatttttgttttaaatagttgtcgaaatctagttcaaatattggagaaataagatttaatgaactgataagaaatgtatttaggtgagttttgctcattttaagggattgcaattgtattttggtttgtcaaatattttttgttttaaatagtttccaaaatctagttcaaattttggagaaatctgcgtgatatatgggattgaaatatgtttggaatattttttgtttgttaatcaattcattgccaaaagaaaaccaataattaaaagcagtgacagccattgtaaataagttccaactccaagatttatttcacaaaatggctgcaaaaatgtatatgtagattttaatgtttatttattgtttaaaattttgtatgatacttatatggtttttggtgatattgttaccagtataataaaaaatctcaaacaataaatagacattaaaattaatactaaaaaattgttaataatactcattgaatatcaactatgtgcatgctctaagaccatgtttatatgaacaacacagctcaaaacgacagatctttgagaagattgacaatccatgtgatttctgaaactgtttctgacatggctctatattctacttcagtggaactcttggctactgtaggttgttttcttgatgaccaagagatgaggttgttgcctagaaaagtgcagaaacctccagtggatctccttgtagagtgacaaccagcatgatcgctatcactgtaagccctcaatttacaatctgtatccttgttgaaggagattcccattgtagtggtacccttgacatatctcaggatccgtttgagcaagtgaaaatctgataaagtaggagcatgcatcttctgacaaacatagttaacagagaattgaatatctcgtcttgtgagtgtcagatactataatctccctgccaagctacaaaaataagttggattttcgaagagctcagattgatgaggagcattatctagctgaattggtagtggtgtagctactggtgagcagtctttcatggctgtaatgattagtagatcttaagcatacttttgttgggatagaaagagacctttttgatgaaattgagcctgaattcccaaaaaatagtttagtttgcctagatctttcatcttaaactgcttgttgagttcattgaggagattggatagtagttttgagctgttcctagtgatcaccatatcatcgacgtagagtagaagcatgatgacatctgatttctttacgcagacaaaaagtgagggatctgagaaactgcacataaaaccaaaagagattaagaagttactgaatttatcaaaccaagctcgtggagactgttttaatccgtagagagacttgtgtagcagacacacatgatttggtaaggccttgttgataaaatcagctggttgtttcatatacacagtttcagtaagatctccatgaagaaaggcgttctttacatccatttgcttcagttcccaattcatgatggttgcaaggtgcaggactgctctaacggtagctgatctaaccacagggctgtaagtctcaaggtaatcaattccctcttcttggttgaagccctgagctactagtcttgacttatacttgtctagagatccatctgctaggagtttgattctgaaaacccacttggaacctagaacgttcatgtgtgtttaaaaggtactatagaccaagtatttgtttcagaacaattttccatttcttcaaccgttgcagcagtccacttttcatcttttaaagcttcagtgactgtttttggtgttggatgagaaattttatgtgtaagcagtgcataccttttatttggtttgctaatgcctgtctttgatcttgtaaccataggatgagttgactctgtagttttgatgacgtctgatgttgattgctcttggtcagaagatgacgaagcaacgctgttgcctataggatcaagatctaagcttgtcgtacactcaggacgttgctcatcacttctagacaatcgctgttgaggaagaatcatttggagaggtgtaacacttattggatcaacaaccataagctgcaaattttcagtagtcttcccttgtacatttgaatcaataggatgacttactggtattaattatggctgttgttgattttctgttgttgcaggtgcttaactgaactaatcatcagcttctggaggtaaaaaggtagagagtccttttaaccaagctgcaaacaaaggagttgaagatgcattctgttgatctgtgtaagtgtctgcaaacggaaagaactcttctgcaaacaagacatgccgacttatataaactcggcctgttggtggatagaagcagcgataccctttgtatttttcattatacatgagaaaaatgtattttagagatcgtggatcaaactttgtgcgagcataatctctgagagttgggaagcaagcacatccaaagattcttagagcagaatagtttggagttttaccgaagagagcttcatgaggactgacattagttgcaagagctgttgttggtaagagattgcagagaaaatttgctgtgaagaaagcttcaacccaaaaattttgtggagttttgctttgaaacattagagtaagccccatttatgttagctatctatgtttcctttctgccataccattttgtagaggtgtgtgaggacatgatatgaaatgttgtatccctgaatcttgtaaatgcttgagaaatctttgactaatgaattcttctcctccatcactctgaaaagttccaatttttgtttgcaaaaggttttcaacaagattctgaaacttgatgaatattgagcaaaaatctgatttcctctttaatggatagaaccaacagaatcttgatagattatcgatgaagattacatagtactgaaaaccttgaacagaagaaacaggagctggaccccaaagatcacagtgaactctctctaggggtcttgaagcattaaagccaactgaccattattggtgatgtgagctgttgctgcagagtcaggaacccaagcaccatcatcagtaaaatcagtaatgtgcaaagcagagaacgtagcagcagcagcttcagaatgctgatagctttcatcgaagcgataccaacattgaagagcaggatgtcctcttttgccacagatctgacaagttggtctttcactaggagaggaagactgagaacctgaagagggaaactgttgctgaaaacctcgacctctggttgagtagtttctgcgtcctcttccttttgatcctttgcctcgaccttgattgttgaatgtaccaaaagcaagatgcggagaaacgtccgttgtgttgtagctttgcatcctatcatcaaagcctttgagacgatgcatgatttcagcgtaggttgggccaggaaaggtatctaaggtattctcaagcgaagtgatgagaggttcatattcacgggttaaaccatgaaccattgcaaaaattttcatcttctctgtaacaagactcccaactgaagcaagctggtcacaaatagtcttgagacaacgcaaatattcatccatggtttttccttcttttgacaaaccatggagacggcgctgaagctcaaagacacgagatgcagagattcgattgaaatgaccaacaagatttagccatacctcttgagatgttttagatccaacaaccacactgagaatgtcttcagaaagcgaacccagaagccacgccttgacaacttgatctgaacggtgccaagcttcgtagtctggatttgcaactgtatttgtgtgaccttcaatgtgaggaaccggaatggtgcttgctagaacagagatgctaccggtgacaaaaccaaaaagaccttgaccagagagaaacgattcaaactgtgatttccacagtaagtagttgcgatctataagagttacagtaacgcaatttgagatgtttagtggaggacatgagtaaacttccatggatttgtccatggctatgataccatgaagatatgaagcttagatggaaaaatctttcttttgattttatttcattcagcctattttgtgattacaacgatacattggttttatagtttctatttcttaacctaatgtatccttgatttgcttagctgtctattgataatcacgtggcatagctatcatcacacaatctgagagcgtcgtaacggttccttgtcgtcacttccgtatctgatgatacagattgctctgctgatcttctgtatttgtcgcttgttgcaggtagccgttgtatggagatgagctttggtgaagaccgaatcgcattgggcttctgtatcttttggcccatttgcaaagatctatcgttttgagctgtgattttatttgagtatcataaacccaaaaatcatacaagtataatacaaaatctccaacaataaacaagtttgaatattaatttttaatattcgggatccgtttatttttgggaacaaattcaatttcctatttcaccaaccagattgaattcaccaccaaaagagatcgacgtgtgcccgacatcagactttgcaaggcacataccaccaagatctcatctttaacggtgtccaatctgctcctcctcattcatctccgccgtcgacactttgaatcccatgtatcatcattcccgtaagtaaacttccgtccataaatttacgacggtggaaccgagatgaatatggtggggagacggtgatggagattagatggagatgagatggagatagtgaaggaaatggtgatggagaaaacattcacggcggcagaaaaaatatgttatgaaaccctaatagttaagtcccaaacaaactcaaattccatcattttgtcgtagtgggctaatattggactattgggcttaacattgataatgtgtatttgattaagcccaggatacaaatataatttaagcccataatacaaatatgtagacatattgaacggatgcggatattcggctctgatttttttcataatccggatccgtatccggatccgccggattcgtaaatgctttatccgtatccggatccgtcgcacccggttattcggttttccggatcagatcacggatccggatttgaatacccgcggataacggattttagtcccaggcctaatatacatgctctaatgaagaaaaataaaaggaacaaactttttctatgcctttgaatggacctaccatgaacctgattctctcttcaatcatttttttttctttcttttagattgtttttgatcctgaaatgctcaaaaagtcgtcgtactaatccactatcgtgttggaagatgaaacagagtgaaagagacagaagaaacaagaaccatttgtgaaatcaagaaccatcattattccatcaccagacacagaattgttcaatcatttgacaaaaaccttctaatccatacccttttgtcaaaatcaacacttgggttttcaatagtttatagctttaaacccataagaacgaatctggttctgtttctctggttaatgattgagattcttcaaagttttgattttttttgtagattgcttcatcttcaattttcacttttcatttgtattaaacattttcttgttccgaggggttttcttgtttctgacaaataaaaaaaaactttccttttctctctctgttttgaatttacattaatcaattatctgtctcctgaggttttatgacaactcaagttgtcttcttgttcaaagttctgcaataaattataataattgataagtttagagttctttttcctttgttcctaactaccattctttacattggatacgttgagtttgttgtctttgtctccattccactcccacttccacttttttttttgtcagatattggatctcgttcaggtcaaatgttgatttcagctgaaaaaggagagatcttgatccctcaatctccacttagctctgaatctgttgttcctttggtctatactgatgtcaatgttgttcctgaacatgaaagtaatcagcttgagaagtcaatatcaaaccttgaaggtatctctttattttgcttcttctcagttatttgatcaataggttttaaaaaatgaatttttgggttggtattgttacagaagaagtttttgaattgaagttgaagcttaagtctttggatgaaaagagaaagcaagttctgaataagattatagacactaaaggtttgttatcacttatcacattttgaaacttcttttgtgggtttagttttgattgtgttaagattaaggatttggcttaaattgcaggaagtatacgtgtgttttgtagagttagaccatttctattaacggaaaggagaccgattagggaacctgtttcgtttggaccagataatgttgttataagatctgctggaagtagtaaagaatttgagtttgataaagtttttcatcaatcagcaactcaaggttagtctactgttaggctttagtgatatcacttcttttggtttcttagctttctgtttccttccagttgtgagtaaatgaggccttcttctcctggttgaaaaaaaaaactctgtagaagaagttttcggagaagtgaaaccgattcttagatctgctcttgatggtcacaatgtatgtgtcttggcgtatggtcaaacgggaactggcaagacttttaccatggttagtccttcttgatattcagagagttggtattgtttctaagataaggaagagttttactttatgccttgtttaggatggcacaagtgagcaaccaggtcttgctcctagagctattaaagagcttttcaatgaagcttcaatggaccaaacacattccgtgacatttaggatgagtatgttggaaatctacatgggtaacttgaaagatttgttgtctgcaagacagtctttgaagtcatatgaagcctcagctaaatggttagtaaccaaagttttatctctaaaagaattaaaaaatttctaagtactgccttaactttactgcagtaaccttaatattcaagtagactcaaagggttcggttgaaattgagggtttgactgaagtggaagtaatggattttacaaaggctagatggtggtataacaaagggagacgagtgagatcaacttcttggacaaatgtaaacgaaacttcgagcagatctcattggtaagttcttgatggttccaactgttcatttgttatttctcagtttggtagttagccttattcaattagtttatctctagtttaacaaggatcacgatctttcgtcgtggagatgcggtggggtcaaaaactgaagttagcaagctttggatgatagatcttggaggaagtgagaggctcttgaaaacaggagctatagggcaaactatggatgaaggtagagccataaacctctcactttccgctcttggagacgtgattgcagcgttaaggagaaagaagggacatgtgccttacaggcaagatctcagctttttaattccttttcacacacatatgccattgaagcagcagagacatctatctggcagaaatgaaatagatcttgctttggtcatactactgagttagctttttcttttttgttgcttgcagaaacagcaagctaactcaaattcttaaagattctctaggtaaaggcatatggttgcttagaatattatcttaaaagtcttttgagattaccaacataagttatctaagtttgattgttttcatgagtttaatggatttgtgatttaactttatttaggtactagatcaaaagttctgatgcttgtgcacataagtccacgtgatgaagatgttggtgaaacaatctgctctctcagctttactaaacgtgcgagagctgtagagtctaacagaggattaacagcagtaagcacttgtactgcagtatttgcaattatatattcatttcactgattacttaatgttacatcatcattgtttaggaactacaaaagctaagagaaaagaaaatatcggaacttgaagaggaaatggaagaaactcaagaaggttgcaagaagatcaaagcgcggttacaggaagtagagtgtctggttaatgaacacaagaaactcttttggatcaccaatgataagtatctagaagacattgaaaagaaagctatttcgcctttagatcatctgaaagacaccgatgcaactccaatatcatctgataaactagtcaaaataaggaagagttctggttttgtcccacgtttcatgacttcaactgttgctagtcgccaaaggcaaacaatgtcagagaaggaaatcaatgcaaaggctcagagcatacgatcagtggctaaaaatcttactcagttctccacttctcagtcgcttagtctctctgactcacgaagcaaagctctcctaagaagatcatacacaaaaccgcttcaagctgcagctaacagtggaacaccaccagaaacgcctaaaagacatatcaaagataattctttacagagaaagaatatgaatgatacttcttcaccaaggagcaagatggttacttcatcggatccaaatgtgagagctaaactgtgtcaccacaaacgaagaatgtcaagcttgacatgatctaacagttatctttcttttccatctgttgtgaaagtgctgagttgtttttagacttgtggtttgagcctgagtaggatgaggcggtgtcctccatagaaaccacttggctaatggtcccattttaagaccattggaactcgtggagtttgcggttctggttttaaaaggatatgttttgtttgtgattgtttcacagaatttttctttgggttggtgatagtttggtgttggatgtttgtatggggttcacagaaactggatcataattaatattccagattctttcttctttggagggttcagagagtgtttgtggatttgacttcattgtgaattttctctgggttggtgatagtgtgaaagggttttattttgtcatcttttgaagttcttgatggcacaatagtgttgtggatacttcattgtatcttacgtttttgtttgtttgtaacaagttgttactaacaactctttctttattctattgatacatgaataatgtgtactctccctctctctctcttcttcttcttctctctctctactgtatatagcttggtcttaaagaaacgaagatagtagctcattctaaaaaaattcatattgggtttattaggtcaatccgatcggttttagtgtggacttctcctcgaaggaccaccacactgtctgtcccgagtttggaatgctttccgactaataccaggagtagtcagaccgcctgcatttctgactacaggtaaaccaattgggccaagctgcaaaactgtaatggcaaattaggtgggactaaatggaagtttgatggcaacacaattaagttgtgtatatggattctagaagatgccgagaaacatgaatggtcgaaacatgtctacactttaggggatttggctgtgtttaatcccaagaatcatttaatccttggagtgattgctaccggtgaaattgttttctcaatgagatatacatccaaacctttttatgttttatacttcaatcccaaaagaaacactctccaaagcgttgaaatccaaggtttggagaatcatcttagagtttacgccttggtggaccttgtagaggatctttatgttaatgatgtgatgcaactcatctcaagccatgcaacccaaggccaacatatcattacgcaaaggccaaacccataacaactacgtcaaacatctcaggacctctgtaactcttctccccctgagatgaacaaccatccgacaaagatccgagtcgttcctgcgaaacgagtacgatttattagttagttaatctggagtgaggattggttctgatgaatctataactattttggataagtgtgtaacttctctcattttacaggctttgtgtgagttttatcgctatgttggcctagcattttgttctttcttgttatcatatcctaattgtagtgtactttggagtttttagcaaactaatgttttatcctacattgcgtttttttgggatcttctgtcaatatttattttctattggtttcttgaatgattgctgaaaagactgtcaatattaaaagtgttagggatgaagtagctcagggggagaaagtttcaggtttcaaatcagttttatgagtcatggttgatccttccttctcctgtttgtttggctactgacctcggattttgcttctaaaagatgttctggaaactcgaaagcgagatttctctaacgaaataaagatcattttctggttccttgtggtgtgataggaatttgtcctcaaagttggctgctcgcagattatatcatttcggatctgtcatgggaaattagccataagtttcaaaccataaacccaaatcccgcaaataataagaccaatcgaaaagtcggtgcttataattcatacaattaatggagacaaagaataatacttttggaggaagacttacataagtttagcccatagaattgttacaaaactcgttgtaaatatttgaccacgagtagttaattactttaatggttttcatgaattaatatttgaaaggtgaaataacttttttaccacatgttatgttatttaaggtttttgttgctataacggttttaccatgtataatttgttatctttttttacttcttttgctcaattagattccctttcgaaatccagaaaaaaaaatttccttttggatcgatgcaagaaagtagaaaagattctctttgctcatttggttaaggtcagggtcataccttaattaaacattttgtaattgacacttaaaatggaatatcttttcaaaaccaaatacaagtaaactaataatttttatccgtaaaaaataattaaaaaaaagattaagatgttgtaaaatataataagtgaactctacacaagattaatgcatatttaagaaaaaacaagcaatactaaaatcatattatacaattattaatgtatgatactaatgagatcatataattacatagaagtttttaaacaaaatattattttatcgaattatgttaaacattatattagtctgactcgagattgaaaaaaatattaatttataatgattattaatttatcaagtattaatttatagagaattttttgtataaactattcaaagttaaacttcaatttacaattgtgctcacttgatatattttttgttctttaagttaaacccagaaagcaaaaaaaaaaaagtcgctttgattaataaatcaacagattacagtctaaacttaaggtaatgcttttttgctgagatagaaacaaagtaaacctaaaaacaaatatgaaagaatcaatcaacaaagaggaggaaaaaaaaaagaatcattcatggtagatttgatgaagaagcgattgctttatatatacagttttattacaaaatacaaacaaaattttatcaaattatcaccctcgatttttcaacataatttaaaataacaccagatgattaatatttgcacaagccaacaaatatgtaatgaaaacccttaaaactaaatcttcacaatatgcaggagcagactatataaaagactaatgataattttgttttgacattaaaaaaacagttagattttatgctgaatattatcacatacacatatatactgtaatcaatgttgtgatggtgtgtagatgtattttttgcaagtttttttcttatcaaaagttttatttttcctaaaacagtatttaggtgatttacacagatctctaatattatctatatagttatacatttttattataattgaaagactaaaaactacccacactttttttcttttaaaaatgacttagggtctaactggtgcaaaatttggaagaaaaaattttctacctcatttttttgagcccaaaagaatgggaacaatgttaaaaaaaaatcgacctaggcactgatcgttataggctcaaggcttctatcaaaatcctaactagcgcctaacaatttttttaacattgaataagagtagttcttttttattttattttgttatcaaattatttttttccaaaagaaaaaaagattattgttgattttgccattttttcatagaaatcttttgaaattgtcatttttactaaaatcttatggatatgccattttctaacattaaaaaaagtatgtatttccgatttttttggtaaaaatacgtagtttatataaaatattaaatcctaagaacaagcacaaccgactaaacccaaacataacgaataaaacacatgttaaatcatattttcgtagtgtgaaaaaggcaaaatctacaaactattcagaaaagggcaaaatccacagataccatcccaaaaaatggtaaatccataattgattcaaagaataatatttcttacttcaaattgctggggaaaacaattattctctacgtatgggtcctaaaagaattcaaatgaaaactttcgtctaaatattgtaccaatcacacattaaattttcgaaataaattccacagttaaagtttcccacaataatcttttttttttgggcaaaacattacttaataatcaaaatacataattaagttaaaaagagaccctttaaccattacaaccattattaataaacaacattagtttttgtctttcgaaatgaagaaaacacaaattcaaacaactgaacacttagactagaaaatctccgtcttttgtgattagagattgttgttgatgtaaggatcataaacatcggtggttgaaggcatgtaactggtggaagcaagatcaacggctggtagttgattgtagttgtagtagtttctgtccacgaaaggaatgctttcacgccctccaacatgattcatatgttgttccaccatcggattcatgaatgattgttgttgattcagatactgatttgaattcagattcaaattcagattcaaatttatgttgtagaattctcgttgaatctgattaaacagattattaggagcctggtattgaacctgattcatattctgattttgataaaaatcacaaacgttagtaggaacaaggtgttgaaacggttcatgcagattttgactcatattcatattttcatattgaatatgatcagaaaatcgactgggagcagttaccgcatttgcgtccgcatcaagaaaaggagtcatatcgcccgcaagaacatgaggattggtagcattaggagtatctacaaccctagttgtagaatgaataggagagtcggaaaacgactcatcaccaatttcgtcaacaccaattctagtaggaaaaggagagacggaagacaacaacgactcaccgttttctttaatggactcgatccttccgttaagctgatcgagatatagattcatacaagatagcaaatcttgaaggtcttttgcatcataacgatactgggacattttgccttcaacacaatcaaacataaatcgtctaacctgtaattctcggttctcagcagccaaattctttagttgctcttttgctttggtaatcctctccataagatgggtttcttgatccatcatcttcctggttcgggctgtccgcggcatctccagaaactttgaagctacctttttagcaccttcccttgacggccatgactctggaaccggtatgaatggactatagatgagagcacaagcttggacaccacatagagttgacaactcgtggagtttcttgaatatcccgtttttcctcttcatgaaggatgttttccttgatctttcattagctatcaaagatagctttaccttcttcatccccatcaatatgtttttttgttttgttttgtgtggtttgtttaatttgtttactcaaagaatgtttatatagcaaagaaagatgattttatagtcactaggattcttatcactttggtggactcattaattctaaataacatccaggaaatctcttatcaattaattgaccaggtaattcattattatctatataaaaatattttttcttatctaaagtttggctcgtctgatcctaaataatatctgatgacaaaaaaaagaaaaaaatctatccatgtaatatgagggggcatgtaatataatatttttatttctaagttttgtttatactaagaattaatttctcttactctcattgtttttttttactaagaataatttctagcttactttgttcttagaatgtgaagttttgtaatagttttaagtgattgtacttttaaaatacagtaatatattgtcaatgtatatagaattgtggtaagctagaaattactctaaagtttgttatctaaagtaaatttcagaaagtttgttatctacagtaatttaaagatgtactttgaatcatacaaataaatttttagaatgggcaaacaatttgaaaatatgcaaagaacatctcacataaacgccaaaaactttgaataattgttatgaatgccctttcaacactatccttttcaataatgcattttcttatttgttattttcatttatactttctcttaatttttaatgaccattttacccctatttagaaaatgttttaagtaaaaaatgaaatattaattttttcccgccaaaaatattctgaaaataaattttccgccaaaagtttccggccaaaaaattttaaaaaaaacttttctgccaaaaaggtttcttaaaaacattttttccgcaaaaaaaaattataaaggattttaagagatttttgaaatgagattttaaagggttttaaaagatttacaagggattttaaaagatttttaaaaaaggtgtaaaagagttttaaaagattagggattttaagagatttttataaagtgtaaaaggtttttaaaagatttacaaaagattttaaaatatttttaaagggttttaaaagatttacaagtgattttaaaacattttaaaaaggttttaaaagatttacaagggtttttaaaagattaaaaaagatttttaaaagaattttaaaatatttttaaagaattttaaaatggtttaaaaattattaaagggtttacaagaaattgaaaagatttttaatggtttacaagggttttaaaggacttacaagggtttttaaaatattttgtaagaggttcataagagttttaaaatggttcaaaatttattaaggggttttaaaagatttttaaattgtttacaagggttttaaaggatttacaagggtttttaaaagatttacaaatgtttttaaaatccttttaaatcctttaaaaattcttgtaaatcttttaaaatcattgtaaaaggttttaaaatgtaaaacaaaggttttaaaatgggtttttaagtatttacatatatatttaaaaactttataaagattttaataggttttaaaatgattcacaagggtttttaacaaatttacaaagcttttaaaacactttataaggatttttaaatgcatgtttttagctggaaaaaaatttgttacagagaaaaaactttggcgggaaaaaaaacttttagcgggaaaatttcagtttataaattacttgttctcattagatgagagtaatttggtatttttgctcaagagaatgagtatttttaaaaatggactacatataaggataaaatcaagagtttaatacattaatatgactacatgtatttatttatttatttattaataatgacatataaaaaaattatttatgaaaattatttacatttagaaaatatatgcataatttgggtaaaatcaagagtttaatacagtaatatgatttttgctttttttattattttttacattcaaatggatattaatgcaggtacacatgtataaacatgattggatataaaattataatttataaaatcatgtggatattataccttttggggcattgaccagatattatatattttttattgcacttttagaaataaattttaccagctaataatgaagagtaatttagctggcattaccatatttttttatcttatttatatccctaaaataaatagctttatgtagacatgagagaattggtaagaaaatatgatccaattatagctttggaacccacatttaagaattttagactgcttttattagttatcaagataaaaacatacaatttcaataatataatatcttagcttgtagaaaagttttggtagaggtttgttatctgcttcaaaagagatttatgtaaatgtcaaattgaaaactatttgaaagaacgaattttgttttttaagcgttgcgatttttgcgaaaccaattttagatgtattaaataaataatttagaagtacatatatgaatttttggtgttttcttaacttattaacaaacaattatttgttctaaaataattaagattgtgaatagtgacccagaaaactattataagaaatataattaaattctttactttaatatgatgattattaggctattatgactttataagtaacgttatagagttgataaaatgataatgaagacaatatttttgactttgagcgttatgatgtttgtattttgagttattatagatatactatacaatgtactattatgtgtttgattttgttgttaaaacaatatttttaatatatggtttaaagtatggtgttttatattttgatctttccaacaaatatacactttccaacaacttcacgatctcgttttcatatttcttagccaacaccgccgctccatcgatttttctgatggccagaaaatgtgttgatttagtcagacggtccacgatcacccaaatagtatctttggtccgcgatacaggtaacccaaccacgaaatccatcgtgataaaatcctacttccactcaggaatgggtaaactctgcaacatgccacccgacacctggcaaacatcacactctgcgacctagttagctacatccctcttcatcctaacctactgatagtaccgcttgaggtctcggtacatcttagtcgctcctagatgaatggaaaacatgctcgcatgagcctcactcaagatctcctaccgcaactcctcatcattaggcacacaaactcgccaatgcacaaggatagtcccattagctgcgaactgatactaagaaccctctaccttagaagccgcaatcaacccctcatccttttcctgagccaatcgaactctactaagaagatctgctcgatccacagccttcaatcccaatggctcccttgcagcagcacacaaccgcaaaacaccaatctcactcaccatggcttcaacactctaccctggagccacacccacgcgcttacggctcaacgcgtctacaaccacattagctttaccaagttggtggggtatctccagatcataatcagccaccagcttcatccaccgcctccgcctcaggttcagctctggctgagtgaagatatacttcagactctaatgatccgtgaacacctgcactttcccgccataaagataagacctccaaatcttcaaggcaaagatcaccgcatccatctccaaatcatgagtaggataattaccctcatgtttcctcaactgccgcgatgcataggcaataaccttcccacgctgcatcaagacacagcccaacccaactctcgaggcatcagtatacaccacgtaaggctccccatgatctggcaatgctaacactggtgtactcgtcaacatctccttcaggttcacgaaagcctcctcccactccggtgaccacacaaaagaaacatccttccttgtcaacttagtcatcgactgtgccatactcgcaaatcccttcacgaacctcttgtaataccatgccaacccaagaaaactcctgatctcaatagcattcttcggtgtaggccagtctctgatagcctcaattttctccggatccactgaaactccctctacataaacaatgtgacccagaaaacccatctctctttgccagaaactgcacttgctcaacttagcgaacagcttctgctcccgtagcttctccatcactcttctcagatgtacctcatgctcctcatgactcttagaatacaccaagatgttatcaataaagatgatcacaaactcatccagaaactcctagaacacgttgttcatcaacctcatgaacgttgctggtgcattagtcaaaccgaaaggcatcaccacaaactcaaaatgtctatatctagtcctgaaaacagtcttgcgaacatctgcctccgctatcgggatttggtgataacccgacgtcaaatagcacccctcaactgatccaccaacaactcatcgatccttggaaaatggtacttgttcttcatagtgacccggttcaaccctcggtagtcagtacataagctgaaactctcatccttcttcttcacaaataacacaggcgctccccaaggtgaatccccaatgtcccacatttcctaaaaaaattgggcaatagttcagagtcatactataaaaagactaaaatgattccgaatacaaatgaaccagaaacttgagttcttagacgtccaaaattaaagtgttcggtttaccccagttctataaaaagactaaaaggaaaattattaaaaggaccattaaagaattgaataaaaatgtttaagcatatgccaacaaatgaaaactccaataaagaaaaagaataaattcctaaaagaaatcttcgcttaaaacgattaaactgtccactccaacgtgaacttctacgaccttggaatttgaatttcaaactttatcttgctcaacatcaagccccttttcttctacggcgtacacacgaggtcctatggcttgcctcttaggaagtgtttggttcccgtcatttatgttccgttgattcccttcaccagacacgtagtgcactcccgtgcataatggcccggctgcccacacttcctacaattattattaccttccggacaattctcccttatatgatccacttcaccacactgaaaacatttgtctgaatccatccaacaaacccctccatgctgcctattacacctagtacccttggggaaacggttctgaactggtcctgcttcacggttatcccatgtacgcttttgagatccaactacctgagttgtccgagcttgagtacttttcaggtgcttagcttctagaacaagtccactctctatccttgcaaccttctcaaccaagtctatcatgctaaaacattctcgagaagcacatcaggtcagaatgttcggcctcaatcctctcatgaatctacgaatcattgactgctctcctcttcctgctctaactgaaaacctgctaagacgactaaattcccgctcatactctctgactgtctttgtgtcctgacgaagctcctcgaagtcatcctccaaactatcccttggttcttgaggaaaaaactttctgttgaactcttccctaaaatcttcccaggaaatcacatgttgcactagtgtgttcctcactacaccatcccaccaatgacgtgcctcctctctcagaaaatgaacagcaatgtccttttggaactccattgggcacctagcattctcaaaattattctccaacaacttcctccaatcatctgctttgacgagatcaatacctccagtaaagtactttgtgcacatggttctcatgaccttcattatctcgtaataggaaggctctgccatctgagctggtggtggtggcggtggaggtggtggcggtggaggtggtggctgttgttgctgaggtagaacattttcttgtggttgctgagctgctgcagctgctgctggtgctgcctaaggaattcagttcattaactcttcaaacattcttctgataccctgaatctgtcctaacagtgatgtattgatggcaacctgatcttcgactggaacatcacctactggtggttgagcttgtcaatcagcggatgcatcttcaacacggttaactctttggttcgcaaaacgtcctcttttccttaagggtgccattctgacaaaccgaacatcaatatcagaacaatcacaacaattctaattaacaaaactaaagctctagtcttacttcttatggtgttttattatcttttagaaaaacccccttcccgtttatcaaatactaaaacctttttatttttaaaacacttcgttaaaatctatcttttaagaaaactcttcgacttagccttccgggtcagcaccggcttgactttacctggctctgataccatttgtcacacccgtctccctcaacattgagacgacgtgcttttaccttacttatattttcctctattccactttcttaattcaaatataaacttttcttaaaaagaatcttaaatcattgaaaactctgtaataagtcgtaaaataaaatagcaaataaagaaaataaaccgagattcccaaaatacaccataagcgagacggacttgagcgactacacacgattctcatcatgacctgagaaaaaaggggtgagtaatgaattactcagtgagaggatcttttccgtccacttgaaatacgatacacgattgtactttcaaaccatactcaacaatcacatagaaaatgggttggtcaaatttttcaccctctactatttacaatctcaatattcccccctgaacttttggctccttgaaatatcaccatcaactaatatattctcaaaataactaaatgtacttttggattcatgtgaaatactacgcctccaattgaactagtgattaaaccgggattaaccataaacccgcgttcgttgtaccgcgattgcgattaatccaagtaatcacccatgacccgattgagaaacgacatcgttttctcattttttcaactcttcgaaacataaggaaaacgacgtcgcttcatccacccatttgaacaagtgcgactcattttccctctaacataacataatttccaatcaacattaactcgtttaatcaacaattttaaccaatcaaaatgcatacttgtaatgcaatagcgcatttgtaaaatctacggtatggattatcctttgtctttgatgtaaatgtgattatctcttccccacaccagcatttcgagggcacaccaatgagacaaagacgacgcccagagctggaagcacttgagtagctcgtggtgctcatttttttagatttggtaactgaagaactctaaacccccaaaattcgattttccccttcctctctcaagaaccctaattttggtctgcaacaatgactttatcgattcgaatcgatttgtttagaaaataagagagaaaacaacgtcgtttctcagtcgagtcatggatgattattcggattactcgcaatcacggtacagtaaaggcggatttatggttaatcccggtttaatcactggttcaattggaggcatagtatttcacatgaatccaaaagtacatgtaggtattttgagaatatattagttgatggtgatatttcaaggagccaaatgttcaggggagaatgttgagattgtaaatagtagagggtggaaaattcggccaacccatagaaaatagacaccacactcatatagtttgcatcactatataaaactataacacacaactcattcttgcttaagcaagatctccacatcatttccaggttcgatcatttccctcacctttgaacctatctagttccactggactcgttagtcttttattgagctacaaagaacccgtcaattcaatgtagaccattttccactgttccacttttcatcatctcaaaagatgttgattccacgttctcatataacacatataattaactgttatcacaagtacaataattcaatcatcctatatttctagaacaatcatcttatcatcaatcctaattaacaattcattattactaagcaaacagatctattcctatgcaatgaatcatgaagcataaacatagaaacttgtaatcgaatctccgcagatcacaccctcaccttagcaactcggaatgggacacaaactgggagaaaaaagttgaagatgcctagacaatatctgaaacttgcagcagaagaaaacagcacaaagacaagttagggtttctgtagttttgacaaaacaactgattctgctcaacaagcaatcaacatggcaggtagggtatacctttcctagtgacgacgaagggttccgtgtcttacctaacacttcctctatcggtatccactgtcgtcttgtccttagctgatcagatatgaccggaatctgttctccaaaatggcaagttgaatctgaaatctgatacttagttatttatgggttcagaaaccgtgacttttgtccaactttaaactcgaattgtggatagagtttacctcgtaacagagatccgtttgttgctgtgtgttcctcactgtgagatctatccaacaacaccaatagcgtgatctggttccttcagatctgacgggaaaccgctcactaataactctacttggactgatatctttcttcctgttctttactaaatattcaaatagattgaatgataaaccataaatcctcaaggaactacacataatatcatgagaagagatcaacatgaggttaggatccttacccaacaagccggtgacaaccggtgatgactacgactcacgttacgcggcgatctacttgacgttgccacctctacacaatagaaactgcatccacgaaccaaaccgacgactccgatctaaatgttagtgtcttgaagttgtaactctccttagtttctcaatgttatgatcgataatggtgatgaagcaaggttgcagggacgaagacgacgttatatacacatgtatatacacacttcatgattaggttttgttgttaggtttttgttgggcctataatgggcttagtgagaaattgagtctcacattgaaaccttatattacagataaaatcttagaattaatggatttgggtagataataatatggggcgctatactataggtaaaatcatataattaacaatcaaaatataaatatacaatcttaaacactaaatagaattatttttttaaagaaacacatctcaattcttttataagaagtttatacattataaacgtaaaatggtctctattttcccacgagaacgatcgtatctagccagataaagcccgatctttgacctttgtctgtatacacatgaaacggaagttaaatgcttatttccccaccaattgaaagttcgagagcttaatgtccatgaatcctggtttcgtcggtttagtgcgtaaacccgagacgaaacaatgtttcggtcgtaacttaaccaaaaaaaaaaaacagattacaacctattgtcgttgtcttcataaaaatcaaaatcccaaaacccccaaattcaaattaagaaccctaaaaagctgaattcttaattttgtaattgaaaaccggatttccagtttaggatgagcaacctttcatcgagttcgacgggatcaacgggaccacgtggaagaggaagagtggtcgaagtgccatcaagatgatggtgcgaggaactaaattggtagtcaacataaaattgaggatttaaatcaccaagtacatagttcatgctttaaaccaacgaaaatggtaaactaatgatttaaatgacatttttcccaatgtatatatataataactacccaacactatgaatcatgatagttccttttttctttgataatattaaggacatcaaggcactaacaaacatggcaaccttatgaaagtataaaacaatttacataacaaaaaggttaagaccaattagtttaactaaaaatgaatgttatcgaatttacaaaattatacgtgatttgaagtattccattatatacattttttttgggacaaattccattacatacatgtttttttttgggacaaattccattacatacatgttttttggggacaaattccataaacaaaaaatacttcactttttttctctctctcgggcaactttctaaatctagtttttttttcttctttttttttatttctttttaatcttcacttgaggtttacgacttcaacggtgaatcaagggggagcaagcttccttctccaacaacggtgatgtgtgttattcgtcatgtgacgcatctatggctctttcatggcggtttgagaagctatgatatcgttcgctctgattcgaggacggaggtttcatagacgagtgtctcacggctcatccgccctattggccgctgcgactagcggtggaagttatccgacgacttttttcgtgctatgtttgtcaatctcccaaaatatttctgtatctagattattcttttttggttcattataaataaatatatttaattttaaacgttcatagtgtattttaaatttggaaccaataaaatgggagagaaataacacatgtcaaataaagagatgacatatgtcacaactttagaacatatgttttgtgaaaaacttattttattatataagatatgttggttgtaacaaaaaataaaataaaaaattctacttcacgggttctctcctagtttctttaatgagttatccgaaccaaataaaaacttgattcgaatccggattttattcaatcgaactgaactaatcaaaatttcatcaaaaagtaataaatcttcttaatatatttatatcattgaaacatattaaaagtctataaaataattaggtttttaataaagaaatccagccccaatccaaaagaaaagaccaactaattcctcgccttttgcaatttcgtataattatttcccaatttttgtgtttgttaattaaatctctaaatgttcgctgacttcataaatttggattacgtaaaaaacgactttcattagtaaaaagctgaagaagagtggtgaacatattgtaccacgacccctcttgttctacacatctatcgaaaagcttagagactaacaatattttatgtaagaaagttgtttttttttattctagactttcacatgataacaaaaaatataacatatatctagctagatatttacataatgattccatagtagaatcatatttttgtttgtgtgaaatgattgtaatgttttcctcatcttgaagattcaaatcctttttttcagaagttgtacaaaccacaaccaaatatctttatcttccacctcaaccattgtttaaagaattagctacaaacatttacggttatcttccacctcaaccattgttaacagttagacttttatgaagtcaacaaattcttaaagacaattggcaaacgcaaaatttagtcattttatccaaaattctaaactgaaacggagccaaaataaaattcagttttatttggtgcctaatttataaaatccaataatacgtaacccacaaatctcgaaccaaactataccaaagaatacccaaaattaatatcagatttgaggcacgtgagatacgcctgctaagatacacacagctcgaaatctgagtccttctcttctttttcgccatcggaaagttcttaccttcgatttcaatttcttgctttcttctcagttcgtcacgatcggagctttttgtccgatctcaaatgcccaaactcctccatttagttatcttcccggtagcatctaagtagcttgaaatccctaatatcggagttgctctctcccagaaaatctcgagaggttcaagtaacgaaaatggctttggtggcggctttagaggcggatcttcgcgctctctccgccgaagcgcggcggaggtatcccgccgtgaaagacggagccgagcacgcaatcctaaaggttaggatttctccacagtaatgtacaagtgtgttgttcgagcttgaattcactgtaatcattgagattcaaattggtgtttgttttagttaattcgcattataattttccactttagactctaaaattgaattgttgaactcagtgagcttggagaatggatagcatttacattgttggaatctttgttggaatgtttctggtgaattgaattgttaaatgtggagtcattcttgctttttcagcttcggtcgtcatcgagtgccagtgatctttcaagcaatgaagacattcttcggatatttctgatggcgtgtggagtcaggaatacaaagcttagtgttataggactttcctgcttgcagaagcttatatctcatgatgcagttgaaccatcatctctaaaggagatactttatacattgaaagatgtaagttggggtttctgtacctctctgcattatattagatagtaatataaagctatccttcgtcttcttcttttttatttgagttaaggcaaaacagctatctgacgccgtgtttccttacttgcagcattcagaaatggcagaagaaaatattcaactaaagactctacaaactattctaataatatttcagtctcgactacatccagaaacagaggtgaatacaccaagcttgatctagtaagaatggaagtctaacacaaaactgctggtagtcgaagttggaaatttaacaaaacatcaatcctgatcctggtctttaacgtaaacaaaacttaaaatagttttatgcatataacaatagaatgcagatgtcaggaatttttttttttttttggagtgacccatcaaataagaccactaaaccaaactgtcctgtactaatgtaaaatcattagttctccattgatctgcttgcttgttgctttgataactttagcttctttcttaattccaggataatatggtcctaggactaagcatctgtctcacgcttcttgataataaccgtcctcctagtgtttacaagtacgttgcttttataaaaaccttacctcatttctcctatattattattttcttttacttttttgttttactttgtcaaaaataaaatttatggttttgttttttttggtctcctagtactgctgcagctaccttcaggcaagcagttgcattgatttttgatcaagtggtttcggctgagtcccttcctatgcctaaatttggttcgagcagtcaaacagcaaggactggatcagttactggagatttgagtcagaatatcaataattcagggtacgtcagtcctgatcaattctgtctgttgtactcttttatcttaaactttgtactgtctttactgggtaaatatagtattagagctttgtggaattatggttatttttatacacactgggggatgaaatgattacatgccggttgatttgagcttttcctgatgaagtgaaagacataggctctcctttttgaacttacgctttagtcaattggaaccttggcatttggtattatttatttgatagactaatagaattatgaaagcaggcccttggagaaggatgttatcggtggtcgattgacaataagagacaccctgagtgaaaccggtaaacttggtctgcggttgcttgaggacctgacagcctcagctgcaggtggatctgtatgtgttacactatattgattttggtgctgtatcttttctccagctaagtatcgttaaagggatatcaccgaattaattgttatattcatgctttacaggcagcttggttgcatgttacttctcttccaaggacgttttccctcgaactaattgagtgagttggcaaggctttttaaactctagttgcatatgttgaagtgaaagttgaaaaatcatgtttaaaatgcacgagttctcaatttacttggcaggtttgttttgtcgaactatatatcagtttttaagatactacttccctacgaacaggtaatgctaggatatttcctggtgggcacttgtttttcatccttccattagcgtgatgacctaactgtaaaagtttgcctatttattcatcaggttttgcgtcaccaaatctgttcccttctgatgacatcgcttcggaccagttcagaggtaaaatcatgcctcattaccttttgtattgtatgcgtccatgtgatctaaaatataatttggattagcattaaagtatatcgaatgcgcttacttataagattttgttactgctcagctcgagggagaaatggttgaaccttattttcgccggttagtgctgcggtcggttgcgcatattataagactgtatagttcgtctctcatcacagaatgcgaggtacagtatgcaaaactttacttgttcattttaaactttgtgctattgaccacaaaggaacaagcacatgaaatgtgttctgcggatgactatgatctctgcaagttctctttactgatgtgcgtccatcccatttctgtctgtgcacaggtgttcctaagtatgctcgtgaaagctacatttttagatttgccattgtggcatcgcattcttgttcttgagattttgcgggtaatcgttacattccattattactatttgcacatgtatgtatcacagaataggaatttgtgctcaattcttttcagttcacatttctaaggtatcttgtgtgtctgtgcattaataggggttctgtgttgaggcaagaacattacggattcttttccagaactttgatatgtaaggctaaatacttctctttgtccttgtgatgtactcaatgttgcatgtttaggaaactcccgtctcgttctttcttcacactgcagttgaaaaagtttctaaatcttattggtttttcttgtgattctactaacttttactatggacttttggtaaagattgtaatgttatgtctggtgttatagaattctctgttcgtcctttttttctttccctaattatgtctctcgtgtgatctaatattaactttgtctttcaaggcaccccaaaaacacgaatgttgtggagagcatggtcaaagcacttgctcgagttgtttctagcatacaggtgggtgtgtagggcaggacgcccgttatgtttcctgtagtctcaatttgcattagttctagtagtcgctaattttgatttgtttattagttggttttagatgtgcatttagttttacttattatgtgtacctgaaaagattctatggaagaatttcaggaactgtatagtggcttgtttattatagctcaagaattgaaatcgcataataggagtaaaacttggaacatagcttaattctagagttggtttccttggaagtagtttcaggagacgagtgaggaaagtctagcagctgttgctgggatgtttagtagcaaagctaaaggtaaccaattatttgatgctatgatgattattcattacctctaaggacctcagaattcgattaatgttacttcattctaagaaagatgtcattaaatatattccctattgctgtaggaattgagtggattcttgataatgatgcatccagtgctgctgttctcgttgcgagtgaagctcatgcaataacgttggcaattgaaggcttacttggagttgtttttacagttgccacattaacagatgaagcagtagatgttggggaggtaattgatgcagggttctcctctgctattacatattctttctactctttacctgattgtctcttgtgtttcatacttacatttcttcaaaccatcagcttgaatctcccagatacgagcatcttccttcatcagattatactgggaaaacctcacttctctgtatctcaatggtagattcattgtggttgactatacttgacgcattttcccttatattatcaaggtataacaacccttttgtcagactatacattgattgtgaagaggcaaacactgaggactttgtttaaaataattgttcttgaaggtcacaaggagaggcaatcgtattagagatactgaaaggatatcaagcatttactcaggtaaatgcaaaccagattcgaagtgtccatatgttatgtggctgctaattgtcgatgtgtggaacaaatgtgtccctgctatacagtttttacattgccacttaagcgtatgttgtctacctatccagaagaattgacgggtatccttcaaataattttttcaggcatgtggcgttctccatgctgtagaacccttgaactcttttcttgcatcgctttgtaaatttactatcgttttgccaactgatgtggaaaggaaaaggtaccttgaatattttgctatatatcatatgaaagttacttaatcaatgcaagccagataactttttgttattaaatttgtaatttcagcagcgtcgtacagtcgcctgtgtccaaacgttctgaagtacaggttgatctgaaagatgtcattgtcctgacacccaagaatgttcaggtatttaatttgatattctttatttagggtttcattctttcgtacatgcacatcttgaaacaaaaaaagtattcttacccatttataattatttggttaaacgtacttggctgacctaagaccgtctgatctttgttcaggcattgagaacactcttcaacatcgctcacaggttgcataacgtgttgggcccatcatgggtgttggtgagtgttttgcttcaactatgttcaagtaatctatctcttgataacgaaaatcctaaatgaatacaggttcttgaaactctggcagccctagatcgagctattcattctcctcatgcaactacccaggtaaatttggcaaaaccccatgcaggattctgtctttttacttgtataatacaacttgatatttattatagttaggttatcactttatctttttctctgatatctgaatgctcttacaaagcttatagggcaatataatattatcttttataggaggttgcaactgcagtcccaaagcttaccagagagccttctaggcagtacgctgattttagcattctatcctccttaaattctcaggtaagccatatcaattttcttctatagtctatgcccttggattgctcttgttaaatcacttcttgcaaactggatcctgaacatctgattcttgactcattgctttcatcttgccagctgtttgagagctcagcgctgatgcaagtgtcttctgttaaatcacttctttctgcactccatatgttgtcccatcaatccatgacagaaacttcaggcagtgtttcatcagcttcaagtaaacaaattgggagcatcagtttttcggtggacagaatgatatctatactcgtaaataatcttcacagtatgttctctattgattaatgaagtacatcttcagattgtagtctttcttttctgtgctatcgccttgtatattggtctagtctctggattattttgtatactggtcattctgattaatctttgtatgccaggggtggaaccactatgggaccaagtggttggccactttcttgaggtgacacggcgttcataattctgtttatttgtaggatatcctgacattgttgtgggctttactgacacttcaactgcatattgcagctcgctgaacattcaaatcagaacttgagaaatatggcgcttgatgccctggatcaatccatatgtgctgtcttaggttcagagcagtttggagaagatccagccagatcaagagatgcaactttggatgtgagatctctcttcgctgtccttgcttaaattcgagagttttccatctcatgcagaagggaccttactttgattattcttctcttctattttttgttattcttcctaggtagactcaaagtcaactgaggtgaagtcagttgagtgtgctgtactatcttctctcagggttctttacttttctgctcaaaaggctgatgttcgagttgggtcattaaaaattcttcttcacgtactggaggtatgtataatacaatatgaacattcaaaatctttgtttacctttaatatctgacattttgcttctgcataaatcttatatcatcagagatgtggagaaaagttatactatagctggtcgagcattcttgaaatgttgaggtatgtttcctgcttactttccattttttcccacatatgtataattgaattttccattctatttgctgatcctattcctcacatattctctttaggtctgttgcagacgcatcagagaaggatgtggcgacccttgggttccaggttagtgaaggatgacttcctgtagattcgataaattagcagtagtgtacagccttagtccatctcttactttataccttgtcactgataccttgtttgttcttcccagagtctccgggttattatgagtgatggacttcctacactcccggaagactgtcttcatgtgtatgttcctatctctgtttaaattactatgttttcttattttacatgctgatacttagctgccagagatgtcaacacaattccttgtcttatatgggatggtagttaatgatattaatatctcaggtgcatagacgttactggagcttatagtgcacaaaagactgatttgaatataagtttgactgccattggcctgttgtggactttgactgatttcgtagcaaaaggactccaccatgggtctctagtggagaaaggatcgggtaaataactgtcaaatcctagtctgcactcctcacctcaagagaagctctatttttaaaaaatagtaagctgagctgttcctgcaggattcaataatgcagattccactccacagcaaacaaatggcgaggacggggaaaagcatatgggtagcaattcgggcaagtcagattatgaagctccaatacaagtggtcaatcatgagaaattactgttcttagtcttttcgttaattcagaaacttgttgatgacgaacgaccagaggtatttttcatagaccaccattttttttgtaatgtgaatttttttatttcctttgaaagttggtgaccccatcacttatattttttaatcgctattaaatttccaggtcaggaattcagctgtcaggacattttttcagattttgggaagtcatggaaacaaactttcaaaaagcatgtgggaggattgtctatggaactatatcttcccaatgttggatggcgcctctcacaaggtgaggaaataggttcaatagattcatcttagaagacccttgtgacaagtgaatcttttttgtaggctgcaacatcatcgaaggacgaatggcaagggaaagaaatcggtactcgaggagggaaagctgtgcacatgcttatacatcataggtgacaaaaaaaatttcgtcgtgtggatatcttctgcattgtcaatctctttgtgatagtctttgatgcctgaataactcgtttacatcaaaagatttttactaattttcctaccattgaacttgccatccattttctgatatgcagtcgcaattcagcccagaagcagtgggatgaaacatttgtacttgtccttggaggaatagcccgcctcttccggtcctactttcctcttcttgaaagcttacctaacttctggtcaggtgagtgaattgtaataatccttgactgccctgcagtgcttattgtttaggagaaactgaaatatcgtgaaactttctgcttctgtaggatgggagtctttgcttgcttttgttaagaaaagcattttcaatgggagtaaagaggtatcacttgcagcgataaattgtctgcagacagctgttgtgtcccactgtgtcaaggtaacaacgcagctatttgaacaatctatgagctacaatgtacactgtcatatccatatttcactctcttaactttttttttttttatgaactagggaaacttgcaacttcgatatcttaattcggtactggacgtgtatgagcttgttttccagaagtcatcgagttacacaggtgacacagcagccaaggtgaaacaagagattctgcatggtttaggtatttcaattttcagtaaagtctctacattttcgtagtcttttttgctgactcagataaaaaaattcagtgaatagaaaaggcttttaaagtgttctctttagcgtgacataatttttgcaacatttggttcttactctttcctttttttttctcgtttaatgtttttacaggtgaattatatgtgcaatcatcgaagatgtttgatgataaaatgtacatgcaattgttgggaattgttgatttggctataaaacaggccatcataaatagcgaaaatttcgaaactgaatatgtaagtttgttctctaatcatttactttcttcttgctctcaagcactcattttaagcttattccatttattatttcaagggacatgtaccccctgtactacgtcatgttttggaaatcttgccctctttggggcctcctgaacacctttcgtcaatgtggctaatcttgcttagagagttcttgcattatcttccacgggttgattctgttctgccaaatgacgaaggtgagattcagcagaacaacacaggtcactgtgcaagtaagtactttatgttaatctactctcaacaagtctgaatctaatattcttttatcaccccaggcagtgaagtattggaacagaaagctgatgcttcgtctgaaacaattccaaccacaagaattacgactaatatgtttgcagaaaagctgatccctgccttgatagagcttctccttcaggctcctgcagttgaaaagtatatcctgtttccggaagtcatccagaacctgagaaggtaaaacaactctcgtattatgtcgaacatcgattccaataggcgcattgtgcagatgtgttggctcttctcaacatgagtttagaaagggaatcatgggttatttgatttatctagttaacccaaaccccctttccctctctcaagttccacgtccttgcctagaattgcagaaagaaaaaagttcttgattttctgtatagtggttgagttaccatgtctatttaccttctgttgtgtctgggagaagtgtgtacacaaaacttataggatcattttttttttcaggtgcatgatgacaagacgagacaatccagatggttcactctggaaggtagcagctgagggcttcaaccgtttacttgttgaagatgtgaagttatgttctgtgggtggtgaaacagaactgaaaattagcaaaacagctcgaatacgcatttggaaagaaattggagatgtttacgatatattccttgttggttattgtggacgtgcactttcttcaaattctctccctgctgcaacacttaaggccaatgagacccttgagattgccttattaaacggtcttggcgatattattcttaagtcgaccgtggatgcaccccgagaagtgagtagcttggatttcgtataacatgtttgctgttatcctaatgtctgagattttaatatgatgtgtcgatttcttgaataaacaggtcctggagcgtcttgtttcaactctagatcgatgtgcatcacgtacatgctcattgcctgttgaaactgtagagctgatgcctgcccattgtagcagattttccttgacatgcttacaaaaattgttttccttgagcaggtaataacacgttgagcatgtcatgtccatgattatagcatagtcctttactctcttgactgcttcatctgcaaaggcactagcattttatacttgataatgtactagctcttgctcctcatatgagtccctaatcaactctagttgtgtattttgcatcaagcacacatagcaatatgcatatatatcatagagagagtccgcaggcacattgccatttctgctgcagaagattaggaatgtccatggatttggtacccattcctgctccctgtttaacatactgatatcaattaattttttagtttcagctctgaaaccgagaactggcactccacaagagcagaagtgagcaagatctctatcaccacactaatggccagatgtgaattcattttgagtagatttttaatcgacgaaaataatctaggtaaggctctccattttcttataaactccaacatctttttcgcttgccattccttaatcagtggttatcttttggcaggcaaccgtccaatcccaacagctagacttgaagagattatctttaccctccaagaactttaccgcctcagcattcatcctgaggttgcatctgttcttccgttgcaaccctacctgaaaaacgttctacgcgaagataaccgtgacacccgtgcacacctacttgtcctttttccctctctgtgcgagattgtgttatcaaggtaatataacttctacaattattgttttgtgttcgaagcacaaaagggtgacagcaaattctctgtatggaccctatcaagttaagattttgagagtttttttttcaccagggaaatgcgggtgagagagctggtgcaaattttactacgagcagttgctacggaactaggcctagaaaaggttagtctatccagttgatggcaatagatgggaatgtttctcagcagatttgagttcttacattagattcttgagaaattttggttttataccatataggttgtattctttgttttagcgtgttctgaattactctgtgtgctgtattctacaatacgccattctccgagattttatgttggtttggttcaacaaagtactctgttaactgattctgagaaccacggttcgatcatcaatacagtctagaccatcctaacctgccttcgtgtacttggtccattgacgatgtttggttaacttgtgctatttcattctgatcttgttgaaaataaatttgtgtttcaactcgtatatgcctattttaattaggtaaaattaaaaacttgagaatcttatatagatcaacatatatacatttgtttaagtttatataaacttgcttctcaataacaagaaagaagaattgcatcatttggactgattgatccgagcggcggcagcgacagaggcagccacaccggttgggtatgtagtgagatgaggatcgttcctcatctcggcgccagtcactccctctgcgtcctttctcgttgctgctttatccgatggtaatttgctactcgctccctttcataatcattgtttcccaaaatcgaaaaaaaacattagaacccgaaaatgaaagaaataaaactagatattggattcaagcattttatgtatcacgtcttatgtgctattacttacagtgagaacgtcggctagcgtagtcttggtatcgtcagagccgatacgagcattaagagtggcggctgattgagctgaagccgcaacaccgccgggcatgatattggtccgccccgtagctctaacctcggccgcttgaatggcggctgcgtcactccactccaccggcttattccctgccgtgagaaccgctgcctctagagcctctccaattgttatggttccttccgatttcagaggattagctaccacctttttctggttaacttctccctccgcctacaaatttaacgttctaattatacaaattatgatattaacacaacagcgatgatactagcacaaaccactagattatatagtcacaaatcaacctgttcaccggaggcctcggctacaacacctttctctttgtcctccgccgccttaatgcctccctccgttgtcgaaatcttctctgcctctccttttacatcagcacaatctataggtttctgcagctgttcttcgctcattttttggggtaactctttctctcttttcctttttttctctaggcaacaatatttataaatgtaatggtcagaatttatataagttttgcattagccattcaattctgtgactatcttacataaacaacaacaacggctctcctcaactttctctgattttccctcttaatttagccaataacaatcaaacatatgaatgattcggttcggttttcactgaaccgaagaaatccaatcgatttcgctttggttagaacaatcaaaccgataattgaaccagttaaatactatccggtttagctaactcaatcaatcggttagggtcttttaattagggttttaaagtttcagtctctctcacttcttctttcactcacataacaaaaaaaaaaacttcgttcacttgccgcaaagtcgccggaaccaacttacttagctcaccgtctcgccggagtttcgacaatcaaaggtttctcttctctccctgtttcacatctcacgacggatcaaattagggttttcaattgaatcagaatcagtgctggctctgtttgaatctattgttccgaatttgtgatttaatcttctaattagctttgttgtatccattttggagcaatcattcaatttcataatatctcaaataccttgattgatcaatagcgagaagaagcacgaagaatgaatcaaaacgccacgttgacggtggaggctagggatatactgaaagaaggaatcggtttgatactttggcggtggactgctatgcgagccgccgtcgaaaacggttggggcggccgagactctcaagccaaagccaacgaaaccgttgccactgttttcgactttttcatccaatcaaaaggttaaaaactctaattatgcatacacatgacatctagtcatattttaatctatcaatagttgattagtttagtgacacaattagagatgttggctttctgattacgtgtagatccagtgaaggacattgagaaattaggtgaccttctagataaaggtcttgatgagcttaatactacagctgaagatggaagtgtcgatgaggtatttcggaatcttacgctaatttcgtgattctttctttaatggggactgataagttttggtttgtgatgctactaaaggtggcgaacttactagtagatttgtacgaagattgctgtaacggtaactatgaaatgcttgaggaactaagggcaacttattctcagacgagtgcaagtgttgtcaaggttaggttctttctactacttccgatactgtcttgtccctttcactgagtttgagctcatgtcaagtctactttggtttggtttttaacaatctagttaagatagtttccgagagttagaattgaggctgtttagtttcttataccaattatggtgtttcaggtttcaaacggtgatgacgaggaaagtgatgatgaagatgatgatcaaaccactgacatgatggtggatgcgtctaaccagaaacaagaagccatgcctgttgatgaaccagtagccgatgatggttggacggttgtttcgtctagaaaaaacaagggaaagaggaattaacccggttttgatccccaaggtgttgtgtaatttgaacagttttgtttgggttgctttgtttatttattttgataatattatgatagtatgacttgtgtaccgtcactttataaactaaaatcataagattgagttttcacatattaatctactctcacataataatcttatgatcccatctttgacgcctaaaaaaagactcttaccagttatcatctcctccgcttcaagataaatgtttttttttctttttaatagaatgtaaatattcatttcagtggaaagtttgagttacacaattaagcatagccatagtcaaatatggtcacacaaatatggtcacatgccaaaaaaaaaaacagaaagataaacagcatggaagcgtaccaccttcttacaccaaatgatcaagttggcttgtgggtcgtgggttcgtgtgctcttggggctcgccgagtaattttggaccgtggattggcttttgagagttgaatcttatggaaatattctattttggcaacaacttgggaatcactacaagtaacttggggaatattctaagaatattctctcgaaacctacctcctctactatataaagaggcattcgtctctcattatttctcaagctgtcaaacagaaaatactcttagttctaaattctcgcatctattatgtttcttaaaagtaagttcttagtttagtagttttttagaatatatcgtagattaagtttgtttgagcctattattgtgtgctcgggtataagtttgtaatcggttgtatctaggaattcataaaccgtgattgtccgaaagcacttatggtcgacgatttattgaattaagaaaaaagatataatatcttgtttatgtgatttactttttgtctttaaatacagttgttgtaattcgttgttcataccgttattttaataaaattggcatcttttctcaatttggttttgcattcttacaattttattatggccgattaaatgaattaagattgtagaagcgcaaaaacaaagttgagaagaaaatacaaattttattaagataacgataacatgaatgaattacaacgactgtatctaaagacataaaataaatcacggaggcaggatctgctatctttttctttaatttattaaatcggctgtaactactttcagacaatcatgatttatgaatcccaagatacaaccgacaaactaatacccgagcacatgagtaatagactcacaatgactggatctaaagacataaaataaatcacggaggtaagatctgatatatttttctttaatttattaaatcggctgtaaatactttgagacaatcatgatttatgaatcccaagatacaaccgacaaattaatatccaagcacatgagtaatagactcaagcaaacttgatctacgatataatctcgaaactattaaactaagaacttatttttaagaagaaagagagaggcgagattttagaactgatagcgttttttatttgagagcttgagaaataatgagagtcaagtgcttctttatatagtagaaggaggtaggtctcgagagaatattctccgagtactccccaaattacttggagtgaactccaagttcttgccaaaacatagaatatttttgtaggatttaactctcaaaattgggcctatccacgatccaaaaattactcggcaaggcccaagagcccacaagcctatgtggcccaaaagtcgacgatctgatgaccatccctcgtgcctagcttggttcgatttagcccaagttactcactttacaccctttttctcatataagtcaactccgtttttgatgtatgagtataacatcttgcagtactcattaccatatttccattgcacaattgatctgacaatttcgtttggcaggaattggcaggaaagccgccggaaagtcactttttcaaaaacagttccaacaaaaccatatagacaaaatcttagtcaaccaaaaagattaataaaattatacaagaaagagatataagcacaatctacatatactaattattgtacatcaaactggattaggcttattgtagcgttacacgcaatatactattttttcatgttttggtattttattagattttagtaaaatatctatatttatagtaaaataaataaatagtaaagtatactatatattaatacatatttatagtaaattaattttatatatagtaaaacatataaaaattaaatgaaaaatgtaaaaaatggaggttccttttcttgagattgaaatgcaattaataaataatagtcaacaatattcactatttcctctatataagaaggccactagctctaaccagattcaagttaatcaaaatgcttgtgtggaaaccacactagtgaaagagatatggcagagactacaaaggagatgccaaaatcttctctatggggagaggttgaggtagaagttgacatcaaatctcctgctgaaaaattctaccaagtgtatgtaggaagaccagaccatgtcgctaaagccacttctagcaaagtgcaagcatgtgatctgcttgaaggggaatggggcaccataagcagtattgtcaactggaactacgtttatggtaacaaattatgaatttataattctttaaaatatcgtaaatatttggtgattttatttgtgaatgttttgagtgtagcgggcaaggcaaaggtggcaaaagagagaatcgaattagtagaaccggagaagaaactaataaagtttagggtcatagaaggagatgttttggctgtgtacaagaacttctttatcacgatttcagtgaccccgaaggaaggaggggttggaagtgtggcgaaatggcaccttgagtacgagaagaatgatgtgaatgtgcctgaccccgagaattttctccctttcttagctgagatgactaaagagatcgatgaacacctcttatccgaggaatagacatactctaagtcttgttgatatctatttctcttgctctggctagattaaagatgaaataaagtttgtgttgattggttaatgatatgtcatggtgtttggatatttgatgttaagtttttttttgtaagttgcaatttgtaacttttgaataaatgttttgaataataataatgaaaggaaataattggaaatttcataaaacttgttttagtgctattcttgggaatttttcttgtttttttggtactgctaaaacattttaactacgaagttaacgcattatagaaaactagttttttataatcagttattacattaaagaaagtttgcaaaattgtaaataatgtttcgcaattttggctcatttgaaccttaaataatatctgacgacaaaacaaaaacagaaattttgcaaaatgttgttgattaagcaagtggagtaattgagttatccattgatctgattttgattttaggttaaactctattagcaatagtaattattaaatcttataattaggaagtgtttttttttttagtgacctttagaatcgcaaataaaaaaaataccaaacaaaaagagtttgaaagaatctaacagatttaagaaagtttggaaaactcaattcagcggttacgattcttttgctctatcagcggttacgaagaccatttttctttcagacgattataggacatgtgtgaggataaatacatcttgtgaatagtccttcttttatttgggagtagtacttatcaagtcttataaatagggagcgttacttatgtgatttatgacctttaatcttaaataaaaacaagtttaggaaaatcttgatttttaagaatttaatggatttaagaagatttggtaaacatgcattcggtcacttcagtataatcctcgtacgagttgtagattggtctgactatcagcggttacgaaactattttccttttcgacgactatatgacacgtcttgtgaattaagatatgatgaacatattgtaaaccgttcatatattataaaaccagaaaatttagaagaaaaaaagagagactcatgcatgttattaaaagggtttagatcagtacgatgttcaaaatttctttaattagtagctaagcttttgcaaaagacctaagaaatttacatggttttttttttcttttcagtctaaagaataaaggatatataaagattaagaagacatcagaaactttacaacatcattgacaatcaaagaaaagatttcaaaaactaaaccgatggatgataagatattttcggaccgtaaacccaaaagaccgatatgaatataatacataaccaataacaaaaagagataaagccgaaacaaacaagagaaatgaaactatagaaccataatctagcacaaaacaacatgcgtactaccaaaccaaatgaaggataagcttgtcaaagtagcgtacggaaagggaagaaaaaccacgagaacggagagcaactcttctactaacaaatgaatcctacctctctaagaaagaacgaggtattagtaccaacaagaaaaaatctagggcggaataactagaaccaatcacaatttctaaaaccggcgaaaatgaagaatacgaaaaaacaacgatcttttaactcttaataagaaataaatgataacttgaaatcttgatcaagaaaacgtcacaatttccaacaacggtgttagtcggaaatggcatatccgacaaagttctgacaaagtcaaatttgtcggaattttttggtctaaagatcggagcaatcggtaaggaaaactacgtttgaaatatcacttccaatcatacacttcatcaggtgcgcatagcgtagatcaggttgtattaacaaatttatttgaaagtgttgagattgatattttatgggtatatgtgacatttaagattttttgtaagagggggattaagcaacctccggttaacccagcttaaaccaaaaatggatcgaaaaaccagtaaactcagcccaaagatgtaagtctgatcagatcgacaccaacctacaagataaaggaaaagatagaggcaatctaggaagctaagttataatacaaaaagaaagaaaaagatagattttcgatagagaaataaggaaatcaaacatgtatatgttaaactaactatcactttcttataaatagagaagcacccctttgaaagggaaatatgtggactcatacacaagatcaaccaaaacacctagaaaaaacccttataacataaattatgaatgacttgatcccttatgatggatatataaacaacctacataaggtgcaactattatatatataaaatctcaatttgtcatcctacttttgttgttaaacttgaaccttgttgaaatcctccttaaaaccgacttgatttatcaccttgtttaccacaggtgatatctcaaatctacagatatcaacacggtttgtcaatatcgtataagtgatgactaccacatttgattaactccggagaaatagcttttttgtgctcgagtgtcaagtacatgtacctacaagagaccaaccatgtaggatcatagattacttcaaaataaagcgttgaatacataattttaatatagttgaaaatgtagtaagtctaaaatatttttttggtgggcaacatctaaattatttgttttaaagttttttcaacattatatatatatatatatatatatatatatatatattagaatggataaaaatatagattccattcattctcttgccaaaacagttgtagcagcagaatttcttttaagtttattcacatttttataatgactgaaaatttagaaaattactttggtcaatcaaatttattttattataaccactgacacttcacacaatggacagaaaaatatcaattttgttttgacgttttcatctgtaccattcgagcaaagaatgattctttgcgtgacaacttcgacaagtttatagaaagtactaaaatccattgcaaaagcaaaaagtttatttttctttgctcttctctttggacgttttcgccatattcgttgttattattctagcaaagactgattctcttgcgatacaacctgtgaaacctttcttaaatattataaaggttttaaaatactttaaaaccatgattgttataaacaacatgtcacatatggatgaacagtccgctggagatattaataaattgtatctatggatcttctttgattagttctcgaaattagctggactatgaaactaaaatctatccatcaaaatatatataccacataattactttaattcaggggataaataagtaatcataagaaaatcaaattcaagcacatatttttgttgaagagttaaccctctcaaagttgttaaataggtaaaatttagaattttctctattataacagatgatggtattaattcatgtattcttttaaccactcaaaactccaaagagattcaagttttatccaaaaatatttgtggagcctatattgctaaaaaggttagaacaatcggtgaataaatatggcagagaaggtggaggtgaccacgatgcccaagtcttctcttttaggaaagcttgaggtagaagttgagatcaaagctcccgcggcgatattctaccacatctatgctggaagaccacaccatgttgctaaagccactcctcgcaacgtgcaatcatgtgatctccatgatggggaatggggcaccgtaggcagcatcgtctattggaactacgttcatggtaatttatatgacttcgaaaatattttttgaatatagaagatttgattggtgaatgttttggttgtagagggacaagcaaaggttgcaaaagagaggattgaattagtagagccagagaagaaactgatcaagtttagggtcattgaaggagatgttatggctgagtacaagagtttcttgatcacgattcaggtgaccccgaaggaaggagggactggaagtgttgtgaaatggcacattgagtatgagaagattgatgagaacgtgcctcaccctgagaatcttctccctttcttcgccgagatgaccaaagagattgacgaacacctcttatccgaggaatgaaaacatactcttggtaatagttatatcttgtgttgtcgctatatataatttattgcatgataatcatatgtatggggtttcatagttgatgtgaatacttttcaaagtatggtgtgattattaataattaataaggaaactatataatatatatttatttttgttaaatgttataactctcttactatgaactatggaggttttttcgtaaatgatacaaataaacaaaaaaagatttgaagacatagaggagaattgtggaagtccgcttggcccaatgattgactaaaggttcattaatgcttctacatcaagaggtttggggttcgagtcccacctactacgatttattagcatatttgtagattaatggagacaagtgtgctaatggagacaagtgtgcaggaaatctccaacgatatacaattatagccgttcctcaggattctacgcagtgaagatattgaaggtgtccatcaagagtatggagaaagagaaggaggtgtcgtctgtcgtggatataataagatcagaaggaattgttcgtggtagaatcgtctatatcacagtttcatgatttgcgattaataataaatctagacagcaaaaataaaagacatagaggagaatgcatttggttgagtaattgttggcgttggctgtaagtggctgaaacaaagtagagagagttctactttgatttggttttggtaaatccaataatatgaggtcaaaatagtagacgaaaacaaattattataactgaaatgcatgaacacagatcaaaccaaaaggcaaaagagtcaatgaaacgttcatgtagattattctgttttattaaaattcatgttttcgaccaagaattgcaatggaagtagtcaactaaaattattcataatcgaatatgcaactttttatacatttcacattgaccagtaataagcaaattgaaatcttggactcttggaacgaacgtctcttattacacacgaaaccggcacacgtccaacattcattcaataggcaaattctctgcttcatatctaatcgaatcgaacagtttagtcgataaataacgttctcctccactaggaaaaaccacctgaaaaccggacattaaccgagatattcaacaaacttggtatgttttcagtgaacacaaagcttataggtaagcagttagtgaaaaagcttaccacaatgagtttccccgcgttttctggccgctttgcaacctttaacgcagccgctgctgcggctccagaggatattcccacctgccaaatgaattatctcatttatcagaaacttctcctttttttctgccaaaattttgggtttataccgacaaaaagaagttaacctattgtaccagtaatccttctttgagggcaagaagcttggctgtttcaatagcctcttcacctgccacctaaatcaaaagattccagatcttagattatttgttcaagatcaagaagtagatcatatcaggctacttacttgaataatttcatcaacaatggttaagtccaaattgaatgggacgataccagagccaattccctgaatcaaatgtggacctacaaatatgaagtcccataaaccgatattataattagaaatgcaagaactcggacaaaagaacgatgatcttatagataacttggcgcgtatgttaatgttgtcactatatatatgtacattaaatctcatacaaaacaacaaatcaatactatatgttgcataagatctatcaaatgttcattttctgacctggttgacctccgctaagtaccggactttctactggttccaccacacaaacctataagatcaagattgtaaccgagttattaaaaaccgagtttttggttgtttttaagcgttagtgaaagtttttgtaccttgatgtctttgttctgctccttgaggaacttccctactccagtagcagttccaccagtccctacgccagcgaccaatatatctactttcccggctgaatctctccatatttccggtcccgtggttcggtaatgaatctgcaagatacaaacttgtgttcaatgaagacatagagagactaaaagcatatacataattgtgttggatgcatgatattattttatcaacctcggggtttgcaggattttcaaattgttgtggaatgtaaccaccaggagttttgcttaaaatcgcttcagttttctccaacattcctttaaggcctatgcgctggtccgagagatgaagctctgcacctagtgccctcagaatgattcttctctctaagctcatagttgaaggcatcacaaggatcactttatagcctcttgcagctcccatgcaagctaaaccaatcccggtgttaccagcagttggctctatcaatgtactctataatcaaaaacaattaaattccatctatgtattctttataaattatggagaaacttttatgataactttaaatgttcatattaacctttccgggagtaatcaatcctttgtcttctgcatctttgatcatactatacgcgattctgtctttgacgctagaacaaggctccatcatctcaagcttcgcagcgatacgagccacgcaaccatcaacaacattgttcagatacaccattggtgtgttaccaatcaactgcacaaacatagaaaaagattttagacatgttctttgtatcataaaaaagcaaagtgatacatatataagaaattagagattattacttcagtgatatcgttcttgatcaagcaccgatcttccatgttggtctgttttctgaaactattgaaaaatcaatatttgggtaccaactactaaagaacaaaatggatttatgaagtccaataaccatagaataagattcaagaatctagacacaaagcacaaaatactcaatggtcaaagtttgctaacagactctatttacaatgcacaagtaagattcaagaacaatcttggcaattttttggttatattgtttcataactaaaatttttaatatggaacttctaaactctaaagtagataagagacaaaataaaaatttagtaaagaacagtgaaaactagataaatttgataccaaaatcaagaaatgatagtaagactaaatcagaacgaacaagaacaaaaaaaaaaaagtcgtacctttgcgtttaaacgaattattagtgaagaagacaaggctgtattctagattaggatatatagagactaccctactttgcatgtggtgcacactgaacgatgttgaagtatgaagacgagtttatgtcatcattcttgtataataatgttaaaaatttgacatctaaagagtttttgtcatattgcgtaatgagagcatccaatagttgtattttgttattaaaacaaaatctgcagataaacatttaacactattattaaaatgtttaagagcattatattgtccttttctctagtactaatcatgtgttacttatccgaacgatcgaataatattacacctaagtggtcacagatcaattttttaaccacatgattttcttaacacaaatcaaattttcataaccacatgctttttcattttatagaatacaatgtgtcgttatagtaagttagtgacacaatttgcttgcattggttgcccaaattacttgaaattgcagaaaagtttttttttttgtatgaatgtaaaattatattcaacaaaaaactgttttacaaaagatgtaacattaagaataaaaagaatgaaaaaaacagaactacttagacagtcttgggaatacagttttgattggccgccttcaagcttggcaatgcccaattggtgaatggtgctgaacattttgatcaatgatttttggagatttttgcttcttttttctttggacaactgtttaaattttcttttttgtagaaacacacttaaacatgttcttgaccaagtgtagttagctcaattgataattatcctaggtgaaatttagaggtcgccggttcgagtgacacttgggacgaaactaatattacatgttgtggtttcgggcctggaaagattatgaagttcggtacaaaaccttctggtattcaaaaaaaaaaacaacatgtttttgaaatgttaggtccgaagaaaacaaataatcaaaaactataaacatagaagagtctctcgtttgtgcggagggttgtggtatgtgtttattgaagaagactcggtacacatgaattagggattaaaccggattcggttccggatttattgaagaccgttagtgagttaacagagttagctaaaagctctgtatcaaaacaagctctagttaatgtgtttgtatctaattttcaattcaattacaaacaagagtcatgagtgttgatgtagggatcacacaagtacgatgtttctctaggaagagttaaagaatccgtctcggttaacaggccgatgactagacgagaatttcttgactaagggacgtggtattgtgacggaatgatcgaaacaggatgagatcggcgatgtgtagacaaggcgaggtcttggagacgaggtgaggtcttgaagatgaggcgaagtcttgaagacgaggtgaggtcttgaagacgaggcgaggtcttgaagacgaggtgaggtcttgaagacgaggcgaggtcaatggttgtactgctgtcctttctctgtgtcagcgggaattgcgcatttcctttcattcctttccattcttgtacttataggacctgtccttttagggtttcctttttatgcttgtaagtctttaccactttttccactctgcacagtacatctgtcctctttgccctcttcctttggtcgatggaacactccagatcttttctatcacttactgggcttggtttgggcttattatgttcatgggccaaaaccgaccattaacaatgagtaagatttaacgtttgattgtgacggtctagcgatcggattatatcaaaattagttaatgaacaacttataattgatcatcaaggaatatgtaactcttattgattttacaatgacctacaataatcaaaatgtaaccttggtaccaacatctcttattgaatcctacgttactactactcattcaactggcaaattctcagcttcatatctgactgactcgaacaattcagtcgataaataacgttctcctccactaggaaaaataacctacaaaccatacaatgatcgcgatatttaataaaccaggtttgatttcggttacttcaaagcttatggtcactcttaagtcaaagactaagcttaccacaatgagtttccctacgttttcaggccgctttgcaacctttaacgcagccgcagctgaggctccagaggatattccaacctgccagatgaatgatcgcgtttatcaaaaactccgattttttagttacttatttgtaacgaaaaaagaacgttaaaaccaatggtaccaataatccttctttgatagcaagaagcttggttgtttcaatagcttcctcaccagtcacctagattaaaagattgcatatctcaaaatattgtttcgcgattgagaagtcgacaatctaagctacttacttgaatgatttcatcaacaatgcttaagtccaaattggctggaatttcaccagagcctattccttggatcaaatgtggacctgttgatcaagaatcatcaatgatggatagagataatcaagtattccaagaaaataatgatgtttattcctcacctggttttcctccgctgagtaccgcactttcggaaggttccaccacacaaacctattatcaagattgtaagaaaattatgttaaaaataagatcctatttcctatggttgttttcaagaattattgaagttttgaaccttaatatctttgttcttttctttaagaaacttccctgttccagtaaccgttccaccagttccaacaccggcgactaagatatctactttccctgctgaatctctccaaatctccggacccgtggttctataatgaatctgcaagaaacaagtttaaactcaatcataagagaataagaatgataactatttcaaaaatatagttggatacataatattgtataacctctggattttcaggattaataaactggtgtggtatgtaaccaccgggagttttgcttaatatctctttagctttctccaactgtcctttaatgcctatgctaatgtcagtgagatgaacctctgcacctaatgctcttagaatgattctcctttctaaactcattgttgaaggcatcaaaaggatcactttataacctcttgaagccccgatgctggctaaaccaatcccggtgttaccacccgttgcctcaatcaatgtactctaaaaacaaaacaagaaaaaagttattccatatatgaattctaatggactatatatggagagattatatagtggtttgtacatgtgttgtcaccgtgtcataattcagagtgcgtgtgtaagttgtaaacgataaaagaaaaaaaaaaaaaaaacaagtctacaagccccggttagtgatttttgaaagtgttgtctatttaacctttcccggagtaatcaatcctttgtcttcagcatctttgatcatactatatgcgattctatctttgatgctagagcaaggctccatcatctcaagcttggcagcaatacgagccacacaaccatccacaattttatttagatacaccattggtgtgttacctatcaactgcgtaaaatgcacaactatatttaagtaacaacacaagcaaatgattttaaacatgtttcttgttccaagaaagcagattgatatagaagagattagatagagagttttacttcagtgacatcgttcttgatcaagacgcggtcttccatgttggtttgtctttggaaaactccttcagatttactatacacaaatacaaaaactgataccaaaatcagaaaatggacgaacaagcagaactacattatcttttcttatggatgaatggagaaacaagaaagaaccaaaaaaaacgtcgtaccgatagagtttaatcaatgaagaagagacaaaagaccgctaaatctaaaacaacaccaggccatatatatatagacgcagacatatagatattgtatatagattcgtattgagtggttgtataattgaatcgtattatctaaattagtaaattgttatatttttgggatgaaaaaaaaaacaaaacactctcaaacaaaccaaatcttgttgtaagatattcattaaaaagactcttgacctcacaaacaaaggcgacaacaatgtatattgtggttaaaatttttctagtaatagtacaaacaaatgtgatgtatatctaaaagttacaaaaatcaacgaggctatgaagtttaacacaaaccactaaacaacaagtcctggtcggtagtgaatagtttagcatttaggatttaagggttacgatctattgttgtttgtcatgtaaataaaggttatgtgttctatgttagtggtggcgtttgtaatggcaatagcgacggtggtggggaaaaaaaggtgatggttgctaccacagtggatgtatagttctgtcgatgattgttattttatcgtaaactttaaatgtgtatatatatatatatatatatgtaattgtgtttgtttgtttagcacttttttgataaagtaaaatgtattattacttggtaaggtttgtttacttcgtttagtttcaaaagacagtaaccctaaaatacagttcaatttttttccaaatatcatttctagtgtaatttattttcacttataattacattttaatcattctttttctttctcaaatttagaaattatacatagttgcaaatttagctaattgaacattttatataataagttagatgatattacgaacgtagaaaaataaaaaataagtatttagtagagtttcgtttaagctttcaccattagtgtattttccccataaatgattagttaacatccttcaagtacaaataaacatctctattattgagttgtcaatttaccgaagaagaattattaatttattatatatatttttattgatagcactaaatgtttttaataaaataatactatataaaatttgaaaagtcatatgtaaaataaaataaaatttctaaaatgttttgagtactactattcatatttcataacattaactccaattatttggtattatataatcaaacgatcttatatcaatgtccagactaattttcataaactttataaaaaaaaagaagagggtagtccacattggaaaaaataatactccctctttcaactctgatgaaccaatcaaactggagttactggaccaccatgaagtagttgatctagactctagagtgttgaaaaatgatatttctgcaaagtggagtgtgaaagagaaaatgaaggtcggtggaagatcgattgacatgtggtggacacacacacgatgtatataattgtgtgtagtatgaagaaagttttgtgccattgctttgatatgaaaataacatctaaggctaggctgctatggaattgtgaagtattaaagacaagtttgtgccctttctagtttgtgaaaataacatccacggataggcttgtatagaaacaaaatctaaaaggcgatgcttaaaagtagagcttaaattctaaggctatgcttgaatggagacaaattcacaaaggtgttagccggattttaacaatctttcatccaaccgcctttatgttccgatccatgctttttattttggggttttaagaagtaagtaaagacaagaaaaatatccaaaggcgttttcaaacattttgaagataacattaaacactatcctttgaaaagcttaacactagatgcgcgtacccattctcatgctttaggttatgctgctaaacgcaaacgtaatcgttgttctagttgcccaaatcgtatcattattgcacaaacatatacggtcatttaaagtacatagccatatttatgcatgttgagtacatatttatgtatgtgcaaggtgcaaatggtttcatgaccaaatatctttaatcttctacttaatcactagataccgcgggttgattatttacgttataaattatattatttttttaattctatatcatctatatttaaataatcatattatattttgaatttatcattttactttttatatctatttatttttgatattatatttgtatttgtttggtttgatcttgtttaattaagaaaaactgtttattatacgcacattatatagagagtgtatttttatggtacgttattatgtgtttgttatatagtatttttttgttaaaaatgaacgtatttggcttaaaatagttttcttaactaatacttatatacatgttttttttatgatgagttattacgtgcgttcttaactaatatagatgatattaaattaaaaaagtaatttaatttcaaatggtttttacaatataaaaaaaaaaattctagagttcaaatattattaatattataaaaaatttatagattctaaatattataaataccaacttattaagaggtacactgcgggttgattcttttccatttattttataatttataaatttatgattttgtaaactataaagtatatgatatttaataagatgtagctcttatagtattattcggcatttactatatagctaaatatttatatgaataagatgaatgttattaagttactatcataaagttcaaaactaagtaagtttaactaaattgtaagataacttaaagatcgtccaaacaaaaaatatggtataggatttaacccgtggtgtaaaataaaatgaaatttgaaaactaaataaaattataaactaaaattaaaaaaaagttctttgggagaatctaaaaataagaaagttctttgagagatttggatatagaggatcttttttttcaatttcccttaatcataaactaaaataaaataaattacaaaattatagtttttttcttccttttttttgtgccaaaacatctaaatagaaaagattctttacatctaaaccccaaaaccactaattagagaaacgttaaaaaaaatttcctaagcaaaaatagaaaaaaaaaaaaaaaaaagaagaagaaaggttttgtttctctttctctccgccgatggttgcgcaagcggaatcttctctcagcattcacctcggcgtttctcctttttcagcgttcacgtcggcttaaaaagttgcaatacctaaaagttcaaagaagagggcaacatctccatcttttcccatattgcatctagaatgatgggagagaatctaacgcttaggcataaggtaaaccttttccaaagaattcaagtaatcaacagctctttctctgttcaccacaataaaagtatgttcatcgatttcaattttagacaaacccttaaaattaaaatgaaaatcaaaagccaaaatcaataaaccaaaatagaggataaaaactctgtcaatcaaaatggagataagaattaagaatactcactttcctcaccaaagctcaagctcatcttcagtaatcgcatctctaacaacacgcttatctctcgatcagtcttagcaccagaaagcatcgtcaaagctccattagaagtgattaacgaacctttctcatactcaatagcttgctcataaagctatacaaacaacaaaatcacaaactcaatctattaaattcgtcacacaagcactgataaatattctgtatagcaaaacatttctagagctatgcataagaaataccttgctatatgagaattcggagggatcatttagactgaggcaaattgtggttgtggtaattgttcgatatgagatggttatttatagtggatcatttagacgttagaatgttctagatattttaatttaggtaatattctgatattcaaatatcttgagaatatatgcttgttattagtttacaaatctaaacaaaaaacaatacccaagtgttaatgtggttaccttttttgtagggaaattttgccaaaagatatattaacaatgattgacgaaaattaacgaaaaattgaactcaaaatttgaaaaaatataaattagttatggaagatgctaaagattaccatttttgtaggaaagaaatcgatcacatttatgtttttagatatgacattaaaatattattacagttttttctagaattcaaataggaaaccatttgatttgaaaatagttgtttgttataactacatatacgatttatatattttcaaatcaaaaactaaatattgtttaaatatttttaggcgtaaagccaattaagaacggaaatacagatttctctagtatattgtgtgtttatttgaggtaacagaaattagattttgtgttgcaattgataaaagaagaataaattttggtaagatatcattagcatttaaaactaaaattattttcgaatcaaataattgtagatatggttagttatgattgatttccgggttttgttaattaggaaattagcataatgaatttcgtatagttttagggattgatttgtgcaatttatgagggtagtagttaacaatatccatgtttaggcaagtagttagtgcaatatcttaattgtttatcaaaaatttggttattgtcctaaagaaaatattttgtctgattgattttgtagggactaaccatacaatatcgaaattgaaaaaggatttttcgacacaaatcgtccccaaaaatgtatatgtagatatatcaaagagttataataataacttcaacaggtaacgaagagaagacataacaccaaagattctacacttgacacgtcttcggaatacatagatcaaactccaaaagaatacatgttaatgttcattaatcattagatgtataatatcatattatatgcatcacacaaaaaaacattataaatagcacaaaagagtttttttttttttttgaactctaccaaaaactataatttatcagctaagaacaaaggttattcactcctaatcgacaaaattaaaaaaagattcaatcaagaaaaaaaaatactaaaaccctaaaaaagatttcatcaccatcagaaattttcattaagattattacttttgctaatactatacctcaccatcataatctttcttcatcattttctcataacttaaagaacccattgtagtctttccttatgcatcatcctccattaggcattgtctttaactcattcaccgtggctctaatctgttcttgaaccaattctaatctcctcgaatacacttccagctcaagaatctgttgtctcctccaccgttcgtcccctactcccttaccaccaaaccctaaattcatcgacggcattagcatcggactcaacacaccgagagcatgagcaccacctccaggaaacccacccgttgcagccatcatcatacccgtcgtactattcatcatctccttaatcatgggcgatacacaattcttaaccgtctcttcaatcaacactccaagattcctcccatcaccaaaatcacaaccaacagccacattctcgttaagattaaccgcattcggtatcaccccgtcacacggagcaagaacaggcttatcctcgtcgatcttcccgatcctagaccgtgatcgttttctacttatcgtcactttcttctctaaaccattctccgaatcaacatcgacattcgcattaccgataacagagacattaaaacccgagctaccattcgcgttatttacatgattagtttcttctaaatccatcacattattatcttcaaaaccaataattttcccagtttgattccaaatcttcctagagatatcaaaagtagcttgatcatgaggacttttaaagaacacttctttaccagaactaaacttactcataacattcctatacttcttcttcaacctccttagcttctccacaagctgattcttattaaactctaactgtagcttagatttaatctgttcataaaacggcgccgtatcaggcggatgagagctgttaccacggtggtttgtgatgtaatcgagaaagccacggagaagctcgatctcgtcttcgtcagtccatagtctctggaataaacgtcgtgaatcatcaatcggtggtctctgatgaacgatttcagtcatacggtgccatttctgatcggaatctgatggaattgaagctacaggtacggcggatccagcgggaagagcgacggttacggttcctgaggatgatttcgtcgccggagctctggaaatcattgacggagaattcagatcttcgtattctggatcgggatcgggatcgtgatcgtcgtcttcggcttcgtttggttcgggtataacaacatcttcgtcggattcagtttctcctcctcctcttccgccaccgccaccgccgccgtcttcttctagatctggtgattcagcggagaaatcagtgtcacgttgatccgatgccatgagaaaaacgtagcgagagagaaatttttctggtagatcgaatcagatccagaaagaaggaattgggttcacgaggattgatacgggtttgttttttgggtggtggtagggtatggagaatattggagatgagtaggggtagtttcgggattttaagagttgtaattatgactaagggtgttgcggttgcaggcaagtggtccagtgtttgtttcttttacccgtgctttgtttgggttgttgcggttttagttgaagcgtgatcatgtgtttaaagtcaatggtctaccgcaaccgcggcgaaacagaaaagcgttcgacaaacttgattttgttattctgtgtactgttgcgtttcttcaacgtcccatattaacgggtgttgtgattggtgactgttgtttatgacggttaagaatgtttttagagattatagaaaaagcgattagagaaaatgcgatgacataacaatgaaaaaaggtggttactttaaattgaaaaaaattgttataaggaaggaatataagagattagataacatataaaattacttttactattaataatctcttaatagaacaatacaaataaagttatattgaaaaaactaatacagtatcaaaacaattggtaaactcacagatttttcatgtggcttacaatcggcttgttttaatttttaaccgctcacttcatttgttgtaacacccaatggctatttttaggtatgactggtttaaacgcagtggatattgtatgacttgcgagagtttgtaaaacggacggttgtgattttaaacattatgaaatatttttcaatgatatggttagcttttgaaaattggtgcatttacagaaattttatgaatgattaaccagccggtttgaacgaaattaaaccaaataaatataattaataattatagaaagtataattacaccaaatattttttattataataataaaatgtaacataatttaaatataattaataattaaaatcatatataacattctacataattattcaaaataaataaatttcatagttaaatgttattactccatgcatttagttcatgaaaaaaatatctttatactaatataaggaaagtacctttagaaaattcacattgccttttctaaagtattactaaccaatgccattagaagtataatttcaaagtccaaattaattcacctcattaagaataaacaagtcaaattacataagatctatttgtttttctcgcgggttagagatcttatacatatgttatgttagaaccattacttgaccaaaatcaagaaactctttacttgatcaaaatcgctggttacaaatcttatatatactgctttttcaagaaactcggctctctaaatccttattgctttgaagtacgctttaaccaacttcctcattatgcattgaaatttggcttggtgttgtggtaaatctgactctcaatctatgaatttctatagctatgctttaaactcgattttgaatctctatagctttgaagtggtggaaaagaaccaaaagtatgcttttctttttatcgctctcttgattttgtttcagggttttttattatgttacacatgctttatatatatatatatatatatgtttggtgttaatggcttctcattcttgactatgcaagttagtaaatttctccttatgtcgctaaattttctatttctctaggtttagatttagaattatagttttggtgatgactactaaacaaatttggtgcttcataataggtaattatctcagctctacgtcttctcgatgaggttttgcaccaacaaatcgataattgttggactattgggctctctaaccaattcacatgagtaggaagaactttgggatatattgttaataatgaatccttatgaatctagtacctattcaatggagttaacaaggaccactttactccaaaaggagccatagataacctccttagcgcgaaatcattttggttaatgaaaggactattctggagagactttgttctctaccttacaaacttggtgttgcaaatgaagttgtagagttatattaatgtatagttattgcttttatttggagtgttttagaaatgaattcatatttgttttttaattttgctaactagatcaatgcatcaagattcaaagtagttgatcttattgttcatagagtagaagactatgaaaatcttaccaactttaacaaagatttatttcgctgtcttaatcgaacgcatgtggctttgttgttccagtcttttagtcctttggaaatattggaataacgaagagtagaagattacattaagatggttatggatttctaatttatatctcactttgttgagataaaagggttacattatacgcccaaaaaccttaagttgaagttcaagcatgtaaattttgttgatcagatgctgcacaatagttacgttgaggccataacattgtaaaatgttagctcactaggcaagtagttgtttttttctcttttggaatctgatggcttcttttaatggttctaaaaaatggtgattttaacaaatggatcttatcatttatcttgctgtatttaacaaattgatgcggatttgattttcttattttcaattaccttttaaatttctgatttcttgataattattaattggttaatattagtaaaaatgatgttccttaaaaatttgttctttaatgtctttgattaaattgtaaattaaaaattgaattagatttttcttttttctttttttttttgttgttctaagattttgtcaatgattttgttagaaaaaatagtttaaccattgatttaattgtcttgctctttattttatactagattttaacccgcggtataccgcggagacaatttattttttaaattagtatatataaaagtttgcaaattaaatctatttatttttattttatagtttacaattgttattaagtaacgtcctgccaaacccgtctcgccaaatccatcccataaaaaaaaccgcggtacaccgctaatttaaatatataattaaaataaatattttacgggattgcaattgtattttggtttgtcaaacaaatatttgttttaaatagttgccaaaatctagttcaaattttggagaaaaaagatttattggatagataaagaatgtatttaggtgtgttttgctcattttaagggattgcaattatatttttgtttgtcaaacattttttgttttaaatagttgctgaatactgtgtgcgtgacatatgagattggaatatttttagtttgttaattaatttattgctggaaaaaaatcaataattaaaaggtaatggcagccattgtaaataaatctcaactccaggatttatttcacaaaatgactgcaaaaatgtatatatagatttataatttgattagagataaaatagttatttgattttacctttctataattgttaatcatattttagattcatagttagctcaaaactctgaacttttgagcatatttaaggaccaatcaagcaagagcaccttttgtatatgcttgataaaattaaaaacaacggtcgacgatttgaagatcagagaaaaaagatgatctcgatttaatcaaggtaagataacttccaaaattaacgtaatcaaaacaaacgaccatgattgaaaaactggccaaaagccaacagctacgattttattagatgatagggtccaaaactcacagaaaccgggttttgtgacctccacatttgtcaaataatataattcaaatgaggtttgataccctagaacgtttataaatttgattataaaaatttatcatttgcccatatgttggcaattgcattacgacattaactcaattgtaacaattattgtaattaaataatcaacgtaattaacatttttataatttcatatgcaaaataatctaatataaaatattttttaacaaatctatatatacatttttcagccattttagcaaataaatcctcaagttgaaacttatttacaaagaataccattaccatcaattattattaattaattaatattcctaatttgtagcatttccttatctaatatattttcatcaattttaattacataaaaatgaaaaattttaggacattattaatatatacttgattaaaagataaatattatagttaattaaacatttaaaatatttaacggaaaaacgttttataatatttataagatgtgaaatttataaaaattaaataatcatttgaaataaaacttttaaattgatgtgaattataaatcttttaataaaaatattattcaaacaaaaaataaaaaaaataatgtttaattttacagaacaggattagatgataagacgggtttagaatatttataatatatgaactttaaaacaattaaataaccatttgaaataaaaataatattacaatacttaggttatatcttgtcatttttgagtttggattgacgtcatgattttgatagataaaaaaaaagttataagaattatctttattatatatagggtttgagaatattcttttaactttttaaaaatgtttacgtatttgttgaaatatatagggtttgataaaaaaaaaaatttaccaatcgctattgcctgcaaccgcaaacgcttgcgggaataagcatttagaattgggtgatttcgaacagactatagagatccggagcagtttaaagtgttttttatgattagtttaaactctagcaaccgcaaacgcaacgtttaatgatggtagcgagagaacccaatcaacccttagtggtcttatatcctctctcggcccgtgaacccatcaaaaccggggtgttacattcgtttctcgtttaattggtagccaaatgaacagttttactttcaaccactttctttaagcctttggttcaacaaatgtttaatagaaaaacaattcgatttattagtgaagaacttggccttgtacagaaaatagaaaataaagattttgacagagaagaaagtatttaccagttcaattcaaatgaagaaaagaaattacaaatcgtgtcaacaagaaccgaaattgattttttttttcgtttccttctgtttttaaaatgaacaatttgaaacagagatttatttaagttaaagcaagtgcagttcttcttctactacttctaattaccatcatgaaggagaagaagaagaagaatgtggtaatggagaagtgctttagtataaacggaacttctcctttgtgttctggaaaacttgctccgcaatcgcagcgccattcccgtctgctttcttgatctccagactagatttctggtaaacccccgtgcctctcaaagcatcagctatgaagtcatcaaacccgatggctatagctgcttcggctttggctccataaaccaacctctgtttacaagtagagacatgagtactcattgtgataaatgaaatgattagaaagatgggtttgtgagtagacttgtttcgacatcttaccttgagtctcgagagatggatggctccgaagcacatcggacatggctcacaagatgcgtaaatctcgcattctgataactcgattttgttaagtttcttacatgcctgcacattcacaatggattcaaatcatcatcagaaaaccggtttttgcaacgtttcaagagattcaagcgtaatactcttttcttacctctctaatggcagtgacttcagcatgtgcagttgggtcagtatatttcaaaaccatattgtggcagctagcgacaacctcgttattatgcacaatcaccgcaccaaatgggccaccatcaccacagtccactcccttgtaagcttcttcaacagcttgcgttaggaatttatggtcgctatcgtgaacagctgatcaaagacaaagtatagaaacataaaccacaacaacttctgcaaacacatacaatcttcaactaagaatggtggacacataaatcaaaaatagcaagagcaaaattacaaagccaaaggtataagcatcacagtgatcataagtcatcactataagtcataaggtctattaccttgttggtgaccggaaaatgcagaagctacggagatggtaccatcttttgcttccactacacagttcaataacaaagcaaatcagatcctctaaacacgaaacatcaaagactaaatcgacacagacaatgatcaaaaccaagaacaattacatccattgaacaacaaagcttcatggttactcagatcacaagttagtagacacaagaaacagataccataacttgtggtacaagtaaacatcagctaatagaggaatcttcaagctaagataattagataacacaaaactagaagccattgtttctaatcaaaaagtcaaaatcacctaaaaatcgaacacaaatctatatgcttatgtacattccgatgatatataacactctggtgatctggtgattgacaacgagtaaacattcaccagaaattttctcatctgcatgtgaaattagaatgaagaaataagtctagaatccagatctggaaactgaacattgaatcagcttgagaaagagtctgattcgaaatagaatcatccaaaatcgcgaagatcgattcggttgtataatcaaaccgatgcaagcaaaaacaacgaatctcgagtagaaattgcaaaatctaaggagattaaatactccgatctcgatcgagaaactaacaaaaatgcgacgaggatcgtaattgattttacctttagcttcttccatgagtatgaacttgaaggaggatttctggagaaatcgaagaaggtaggtggttttgtgtggtgtgtgtggagattgaagaagaagagaagtgtttatataaacaaaagcagacgagtccaaaattgagatttgggagagagataaagacgaacacagaaggctgaggtgtgagggagataaagagagagatagattaattgtggaaagtgaatttgtgaggaaggaaccaagaaaattgggtttattactcaaaaggtgtgatttgacatgaaaaagagctagcttcatgaggatttttttcactaatttaaacatttttgttaactcatgttttcttaattaaatatgctgaatttcaaagtaatttagtagtttgagaattctgtattatgagaaatgtgaattatcaaaatttaatttatgatgcatagttcaacgtttatgtgcggttgtgattactggcaattttcacattaatcacaaaaaattgacaaaaaaaacattaatcgcaaaaattagtttctagcgtttgaaactgtttaaaattaaaaaatggttaaaaaaagtttctaataaaaattttattgtacaatatttaaaaattacaataattaattgttttctcttattatatattgttacatggaattctatatattaattgatatatatatatatatatatattaaacgatttaacagattggtttagtcataaaaaaaataattgtatataaataaatcctctaaagttctgaaaaacaatattctaaattagttattgcatgagttcttgaaaattagataacttgaactcaaatgagcaagaaaccactatcaatagtaacgatgaggactatcaatctaatcttttgtggattgcgaatgggatttaattttatgaaaggcagtcatagtcgaatttttttacttagactatgtataatagaaatgttgaataaattatttaactgttaaacttttagaccatatataatagggatgtcgaatttttttatgttggtatgattgtatagttattatataaaaaaatgaacaaaaagatacataaacatggcacaataatagaatcggataagtgataagtcaaatgactctaactcataacacaaatgggatcaggagcacgttagcatttggtagataagactcatcttccacgaaaacgtgccaaaaaatgtgcaataaaggcttataaatagttatatatggaaaataagaatcatctcttaaattgtagtcttttactcttcttagtcattacaaatggagttagtttgatcgtttaatctgtttataaaatttctttctgaatttcaactatcttttttgggttgacacatataaataaaagttaaaccatataagcaaaccaagattctttttcttcttttctgtttaaatatttggttggccaaaagactcctagtgctaataagaatgattagagtacctctcacaaaaattctaaaaatgacaacaataaaatgcaaaaagtgtatgagaaaagaacaaatattttaaataggcgaatacatgcatgtatgagaatatataactattttcatttatgcgaaataattattgaacgagagagacgcacgttaccggtgtgagttggttataaataaaataaaccaaaaaaataaaaattgaatcaaatggcccattattgttgacccatcaattatctttctttatcaatgaaagttaagaatactttagaaattgtttatacgttacagttgctattggtattaaaaaaaaaaaaacacgttacaatggagggtggtaactagtctggagactgtatgcatgtaatccttaaaagtgttgtcacctttcgtagaaatttacaagatggttcgttaaacaaataaaagagcatggttgttttagtgattcaagataagacaataaaatagagatcacactattcataaatgttcgcgtgtacggcttccactcttacccgaatcttccctcttgcatgttgcctctcctttctttaaagaaagcacgaattatcaatgatcaaaagagtgtgtggattaagatttaggattgagtttaaccatctacaaaaatcgttgtggttctatttgatttactattagacgtttaaaaaaaaagattacttgcttttctacatgtcttcagaactagtcttggttttgctataagattttacccgatgataatataaaattaaatacgaatgcacttgttttaccaaaaatcagatcacatttctaaaaaatgttaccaagtgtgtaacaaactatattttaatctgtggtacaccgcggggctatatctttttttaaaaataaaaatttaatttgtttagtagatttaaaatatatatgatttaattttctgtattttctaaatgtacaactcttatatctacatattatttagtgtacaattactatgtttaaattttactgtttaaaaatatagaaagaataacacatagtttattaagttaaaatctagactataactaaataattcaaattttaattatatttgttttattaatattatttttttgtttagtgtttaagataatataattgtattttgatttttatatctaggattttacctatggtataccatctcgtattactatcgatccaaacccgtcatatcatctaataccgttcagtgaaattaaacatatctaatggattttacccatagtatagcgtcttgtattttatatacccaaatctgtcttaccatttaaccccgttcgatgaaatttaaaatattttgttatttttattttaataatactttatttgaaaagatatataatttaaatcaattttttttacttcaaatggttatttaattgtttaaaagttcatatattataaatattataaattcatcctaccatctaatcccgttcggtgaaattaaatatattttcttttgttttttgtttaaataatacttttcttaaaagatttataattcaacttaatttaaaagtttttttcaaatgattatttaattttatagatttcatatattataaatattctaaacgtttatttcgttaaatattataaaagtttaattaactacaatattttatcttttaatcaagtatatattaataatgtcttaaaatttctctttttttaagtaattagaattaatgaagatatattatataagaaaatgctactaattagaatcattaattaattgaaaataattaatgtcaatggcattccttataaataattcaaacttgaggatttatttcataaaatagctgcaaaaatgtatatataaatattttatttaccacatattccaagtgaaaactaggaaggattcgaaaaattattcagtaaataattcctacctttttgcaaaaataacggatatatcaacatcgtcaataagttggtccaattatcgtgtttttatttttatttttatttttatataacatagatcttgcataacactacaataagttatttttatccgatgacattttattttacattataccaccttatttatgtaaatcatagaaagtaagttcagtagttacttacggctttacaacaagttctataaccaatttaaaattttgacccaacaaaataaaataaaaaaccagttacaaaaaaaattgattatgtaacaaataaacccaagaaaaaagaaatagtatatagcggaaattatcttgtaatttaagcatttaactgttccctacagaaattaggaaagtaatattgagtaactctcaattatgaaagagagttgtatctttttctgtcaaactataatctttattggttaaaagtctttatgtatttaacacataacaaattttcagttgaaaattatataatagaaataagaatccgattaaagaaagcaatgatcattctaagtattttattccattatgtcggcgaaagatctcataaaggagatacaccaatctatatcagaatgaaaagcagacaaatgacaagccatttaagccacttttaaatattaggttacaacaaaaactcaaacaaaaaaaagtaagggtaaaatagacaattccaaagccgatccgagccgtgattgaaactgacccggataaagacgtgcagatcctgcaagataaaaatggacctcgattcttaaattatttgtcgatttaatgaatcctggtccaaagtgataaaaggttttaaactctctcaggcacagttaccaatatcgtaaaagaagttactaacttttgaaaaaacagatcttacccactttttactactaaaagaagaaagtttacaaatttggtcaacgcttttcaatctttccggtgaactcttggtcgccggaggacatccgtggtgctcccaggtgagtctggcgtaggaggtgcccctcactctgtggtctccttgctttctatcttgaggtcaagagaacaacttctttattcagccctctagttccagacatcctcaacgctcctgtactacatttccaatggtgtatgctcatgctaggcgcccacctgtagcagtaatacttggtctggtaacttcctgcttactctcttgatacttctctctccctgaactatctcacttttgtgaagaactatcctttttttgagaacattgtagtgaaactttcagcctccgggcaagaactatctcaccttgtgtgaagaaccttttggaacgcttgtttacctctagtgaagcctttctccaactcctacgactcaaagaatggagagaagaatcccatactacctgaaaaggaaagaaaaaaagaatgagttctctccactccctcgaaagagaataagagcaccaaccttggataatgctgaccttatcagggagaactctctcatactcatgggaaggctcacaaacccagagatccaaagactctggtccctcatctctttcctctcaaaccgttggaacttgagagacaaagcaacaggttctgacctaggcagaggatgctttcaattccgctttgactatgaggaagatctacagaaagtcttggataatagaccgtatcatttcgaccagtggatggtgattcttcagcgttgggaacctgttatctctgcttctttcccctctcagatcccattctggatagagctccagggactacctatgcatttctggaaaccttatatgcttctgtcaattggatccgagataggggaagtcgtggaccacgaaataacaccagctgcagcaaagataaaggtcattattgacggtctcaaaccaataataaaggagacaatggtagattttgatgacgacagtgagatattagtaactttggagtataaaaatctcaagaatcatcgcctacactgcttaagattgtcccatgagaaaaaggactgtccggggcttcaatcctcaaaagtttctccaaaaaagagcctccctcctcctcctaaagctgcgagcaaagctaaatctcaaccctcttacacaccaagagattactctagaaaatcagtggcggggaaaagtcactactctgatcacatcacttatgaaagaagagataccagcagaaggggaaatgatgatggacgttacagaacacaaccatcttctgggacaaggcggtatgagccaaaagatctaccttatagaagatcacccccagatcctatgcatccaccagagaagaggctcacaagtaccctgctagatattctcacagtgactccagacaaaacttgcaatggagagaaaaaagcaaatcaagagacagccatagaattgaaaactcagattcatcaagcacaaggctctgacatctagagagaaacacaaaagcagaggttacccccccccccccccccctccaccttttgccagttcctactactgaagaagttatggggggaactgcgagaggttacacttcaatataccagttgtgctgatccaacagagagcgcaacacgaaaacgcagggttgtttaaagagaagcgagagatcttatggctgagactgcagctcaaatgatagaggcggtcacaaaagcaaaccaagactacttgagagcctctgttgatcaagttcagaccaaaactggagagcattcagatctcccaattcacccagcagagctccctacatcctcaaatgtgccagcaaaaaagaaacgagctcgccctcctttgaacagagctcaaaatagaagccctctgacgctcactggtgtaaaatcaagtaaaagaaacaaatgtgtgattcaaaactcacaaagaagaagaacttcctctgcgtcaactgcccctcaatgtgcagagaagaacaataatagcagaaaaccacctgttaaaaagaagttgacgttacagggagatgcaaataatccctccacaagtaatgcagcccctaaaggaacattaatacctgcaatgataaagccgaagatggattttcacaatccatcaaatcctcttccttaaaggctttgagctgaaactgttgtgggttggggaatcccataacagactggcgactgcgtgagattcattctgacatctcacatgatcttctattcctcatggagacgagaaatgtggatgacatggtaatcaaaactcagggatggatgcagtgtccttctcacttccttatctctcctcatagcccaggcggagaaggtctggctttattctggaaacaagaggtggaagttgagataatatcttcctgccacaattttatagatacacgcattaaagctgcaggcaaacacttctttgcaacatttgtatatagggaaccagatagagtaaaaaggaaattggtttggaatctactaacagcccaaggtacaaacagagaagatccatggttcctcactggtgattttaatgatataattgatgctacaaagaaacaaggaggaccagaaagacacgaaggtacctttgtggatataagaagcttcatggctgaatgtgatctctatgatttacgccattcaaggaattttctttcatggcgaggaaagagatatgagcacgttgtccactgtaggttggatagagcaatgtccaatggtgcttgggctgaagcttatccagcaagcacatgtgtatacctttgcttcgaaggatctgatcatagaccgcttcttaccgattttgatatgtcaaaaaagaaaaagaaaggcattttcagatatgatcgacgccttaaagaaagtgaagaagtgagtcacctaatagaagaagcttggaattatgataatcaggaagatgtggaggaaaagatcaatagatgccgtagagatatcatcatttggacaagagagaagcaccaaaatagtcaaaagctgataaaggaatataaacaaaaactggaggaagcaatgacaagtcaagaaccaaacttacagctcatctcatcaattaacaacaatctactcttggcttataaggctgaagaagcgttctggaaacaaagaagtagacaaatatggttagcattgggagacaaaaattcgggctattttcatgctataacaagaggaagaacagtgataaacaagttttctgtgatagaagatagcgagggagtaccttcttttgaggaggaggggattctgaaagtgatcactgaatactttgacttgttattcacatcacaagacggggaaagagcaaccacagtccacgaagctattaggccctgtatctcccctgcaaccaaccagaccctaatcagtatgccaagtgaagaagaaataaaaaaggcttgctttgacattcacgcagataaggcacctggaccagacggattctcagcgagcttctttgaatcaaactgggctactgtgggtcaaaatatcatcttggaggtccaatctttctttgcttcaagtattttgcctgcaaacattaatctaacacatatcagacttatcccaaagattgcaagccctcagaaaatggtggattacagacctattgcattgtgtactgtgttctacaagatcatatcaaagctactatcaaaaagactacaaccggttcttcaagatatagtgtctgagaatcaatcagcatttgtgccaaagagagcgatcacaaacaatgttttgataacacatgaggtactacactatctgaaaacatcaggggcaaaaagaagatgttttatggcagtaaaaacggatatgagcaaagcttatgatcgaatcgaatgggatttcatcaagcatgtaatggaaaagatggggtttcatccaaaatgggttgaatggattatgtaatgcatcacctcgatttcctactctttcttactaaatggtgcagcccaaggatcagtcaaaccacaaagaggcataagacaaggggacccactgtcgccctatatctttatcttatgcaatgaggttttctctagtttatgtcagaaggcacaacagaatggggacttacttggagtcagagtggctaaaggcagtcctagagtgaatcatttgctatttgcagatgacaccatgttcttctgcagatctgaccttcaaagctgcaagaatcttcttctaatctgcaagaatcttcttctaatcctgcaaaagtatgagaaggcctcaggacaaatgattaacaaaaacaagtctgccataaccttctcaaccaagacaccagaaatgattaaagccgaagctatgcaagttttaggtatacaaacagctggaggtttgggaaaagaccttggcttacccgagctctttggcagaaagaagaaggacatgtttaacttgatcatcgaccgcatcagtcagagagccaaaagctggtcctctagatttctgtccactgctgggaaagcaaccatgttaaaattggttctagctgccatgccaacatatacaatgtcatgtttcaaactcccaggctctctctgcaaacggatccaatcagctctcaccagattttggtgggactcatcattaggaaaccagaaaatgagttggatagcatggtccaaactaactaaatcaaaaagagatggtggaatgggtttcagagatatacctaactttaatgacgttcttttggcgaaagtgagttggcaaatactcactaaaccatcgtgcatgcttgtaaagatcctcctgggcaaatactgccacacaacatccttcttagactacaaagtctccaactatgcttcacatggatggcgtggcatttgcattgaaagagacctgttaaagacgcagcttggcagaactattggtacaggctctgatactctgatctggcaagaaccgtggatctccctcactcaaccagtcactccaatggggccagcacctcaaaactctcagtacttatcagtggcaaatctcatttgtccaatctccaatacctggttgaaagagaaaatcagagtgctgttacctgcttatgaacaagagatcctagaaataagaccaagtcagagaggggcaaaaagacagatacctctggctgcttaccaagtccggcgagtacactgccaagtcaggctatcatgctgcatctcaaacggaggcgattacgatttcaagccctcctctcgatgatttcgcctggaccaaagagatctaaaatatcaaaacatctccaaaaatcaaatttttcctttggaaatctatgaagcaagctctccctacggggaaaaacctgagacttcgaggaattgtatctacagttgtatgcacacattgtggagaagaagaatctgatactcacctcttcttccattgtagttatgcacgctcaatttgggaacaagcccctttcaaacatcctattgacccgtccagaattatcactctgaggaaaggtattgaatcttcaaagcttctgatcaatttgccacccacaggacttggaggaggaccactcttcccgtggatcatgtggacgatttggacgtgccgcaacaaacgaatctttgaacagaagcagatcggaccctcagatgcgatctctcaggcagtctctcaagcccgagaatggctagcggcacagatcttgataaatcaacctccacatccccgaattccatatccaattgacgagattgaggttgatacaattcgcgtttatacggatgtagcttggagagccgagacgaaggaggcgggctttggatggatctacaaggatttctcctgtaactcagagagacaaggcaaatcttcttcctctaacgttcgatctccattaatggcagaggcgatgacggttttccttgcgatccagcaggccatcgtccttggttataagaaaatttcacttgcttcagattcgcaacagctgatcaaagcactaaatttggagtctcaatctaaggagctctatgggattcttcacgacatcctttctttatcttcagtttttgagtttatcaaatttttctttgtttctagagatatcaatcgacgagcatatgaagtagcaaagtctgctttaaattcagcttttaatgtaccagctgttgtaccggtttcaatttcactgtaatgaaaaccagcttttagacaaaaaaaataataaaaatggatccttgtccaatttgcattccaactaagtgattcagcgtctccaggttcgttcgattctcactcatctccttcaatctccaattctctagtttcaaaattttgacgaattgaaattgaattactctcttttgttttgaaattgaaggaatattgggcttccgtggatgtgccgttatgcaaccaagtaacactgaggtcggagctcgcaccatgaatccttgtacctttttgagggttcttggtcctgaaccatgaaatgttgcttatgttgagccaagcatacgtccagacgattctcgctatggagaaaatcccaataggcttcaaagacacactcaatttcaagtcatattgaaacctaaccttggaaactctcaacaactctttatcaacagtctttctgctttaggtactcatttgaaaatgccttctcttttgtttccacttatatgtgtttaaacactcaattgcaaccaggataggttcctttccttgtatatgtacaattgattgaagttttctccatgtgctggttctggtttgtggttttatagagttaattttgatttcctcaaggtttgattatgtgaaggtcgtcttttatggtgcatttggaaattttctcaaccggataatccttcccttactattcttaagcggtcttataggtattgatgtgattgcgcatgatatacggtttgtagaagacaactaggagagctcggtaatgtgtgaaccatgttttttttgggttttccatctcttttagtttctcactatattctcaggtgcttggtcagttgttaatatatactagctatctgatcatttgaatgatttacaggtgcttgggggttgggcgagaagattttggatggatggtatggaaatcacacaatttacttactttcagcacgtaattttcattttatgtaaacatttctagaaattaactatagattaaggtttgcctttttggtttcttagggtagatattatattttgttctgtagtatattttctgctttggttgttaaaagacaatataattgggaagtttacttctttctaggctggaagtcttccattgtctccagttgaaataacctatgggcttgaacgcatcatcatgttgcttcaagtcattcctatactcccttattgttcatgtacacattttccgttataggttcgttttgtttgggataagttagcctttcgttttaattgacaggaagttgaccatttcaaaaagatcttaaatgctgatggaatcacctacagaagtttttaattgaaaccttataacacacacaaaaaaaaaaattgagtttcaaattaaaaataaaattagtagaattacttaagttcttcattataaataaaattaactatatgtaatcaaaatattaaatctaacacttgacaaacaaatattataatatatagtactatctaaaatcaaatataaaattcatccattaaataaatgcacattcaaaaaaaatataatcaaatactacaatcaataaatctaacagttcaaatgtttgctataatatttaacaacgcacatatattataataaaatcgtataaaaaaattgacaaaaccaaaatattaacaaaccaaaaaaatttactcgataatacaattaaaatttcatggtataatatctttcaaaaatctaaagttttgtatttatttatcaaaacttaacacccgagcgaagcacgggttatcaatctagttatagtttaaaagccaagaaattttttatcagtaggttaaaagccaaagacaaacaagttagtttccgaattcttaaagagtagaaaacataaatggtgtttttaatttcaacctatttcaaaaccacgtgaaagcatagcacttgctctttagagttggattttaatttctttgacccttttttgttgaatcaattgaaagagataattacattatggagtactttagacgaaagtttttacaatttaggcactttgcaagaagtagacattttctcatctttttaatagaaaattagacatttatacccttaactgaactaagagaaacataacgtcaattctcttctctctctctctctctctctctctctctctctctctctctctctctctctctctctctctctctctctctctttatctctcttccttaacaatccctatagcccgttcaaatctcccattaacgtcatcagtggtttgattctctgtttgattcatgtggtttgcgtcatcagtgagaacaacagcaacgtcatcggtaagagcaacaatggagattcgtaaaattgaaaaagaacacatgaagattattttgctctgatttgtctatctgttgatttcgatttctctttcatagaagttgagtgagagcaacaatggagattcgtaaaattgaagaagaacacatgaagatgttaacggaatcaatgaacccatgaagatgttaatggaaaaaggctgaaattaatcgaacgaattgattacttccatggattttgttaagacggaacagaccatttattgttgtctacgaagttctttccattcaattatttaagaactacactaaactgtagatgtaaaatcaaaatctttaaccataccctaaacttttcatatcatcaattaaaagtacatagtccatttttctttggccaatacacttgtgtatggtttagatttatacttgtgtatggtgttaaatatacttgtgtttggtttagatttaaaagtaaaagtgcttcgacagcgtgagcagtcctaaattcttaagatgatggcactgcttcttggtttataacaccaactccaggggaagcagtgagtcctgcttcgaggactgtaccaacgtctaggggaggaggacatcctaagtggtccttaaagcccattccaggtgaagcaaaccctccatattggttctcagtaaaatcattgcctactaggttggcatcaacatcatcacgggtttttctctcactttctaggtacaacataaccgatgtgccaatatcctcttctccagcagcaagtactggcctcacaacattaggtgtgctttcagctccttcggcatgtgccatatctaaacccgatgggctgaaatcgattggatactctctatcaaaagctagagtccaaatatcttcatcagagatatccacatctgaaccactacgacccaccccattagtgtaagaatcatcactagcattcttgacaatatcatccacacactctttacatttgctttttcccttagacatacgaacataattctcacggttctcaactgctttaacctctcttaagaaatcatcatcctcatcagatagaacttgttgcacaaactcacactacaagaaaaatccacattcttatcaccagagaaacgctatgttacgtcattaatagcgatttcataaacgctattttatgcccctgttatcgtaagtaccccatataagataacgtcatgtatgctatgttaaacaattctattatagcattatgaaaacgttgtgtcttgatgcgtattaatttgttattatattatgtaataattcattacccatgctatgttaggggactctacgatagctttgttaaaccggtttagtttatgtttttatatagtaatatttatgctatgatatagtatcttatagcgtttgtctatttttaaaattttgattaattactaacttattgcgctacagtagatggatctaatatagcatttgttaaatcttacattttgataaccaatttatttcgtagcaggtttttaaatgccataacaagtattttcatgacacatgttttataaaattccacgacattgcattaatactttcaaatccaaaacaccaatcacaaaacaagtcaagtctcagataacaagtttcacaaaacacaataatctcattaagatccaaaagcaactaagagtctgaaaacaagtttaactaacaagttccacaaaccaaacctcatgccatgatcactttgtcctcaggccaagcaataactgtcctaagggcatcttccataatctctatttcatctgatttcttccaaacttctgcatcgctaactttgacaatgtctacccacactttaactgcattagaaccgaaaagaacaaagtgaaccttctggttttggatcatttgttgcccatcgtccttcagcaactacttgattcttgtctataatgtctatcaacgtgcacttcttattttcctttaaaccattttgcatgatacgctgccatgttacaacataaaacaaaagtcagaagatttgacagaaataagcagaccaaaataaaatagagtatttacctgtgatttccggataggagactgtgaatatggtataaaattcttaactgtagagcttggtcgtgttgcagtctccataagtgattcagaacctgatcgtgaggatttagaggcacttgtctctgcagattttgttccaacagcagttttagatcctgatgttatatttggtgatgcagaatgctgtctagcagatggaatctcaaatctaactttattaacaggccatgaaacaaaagccatcaaacagtcttcaaggtaggtcatatccattgtaggcctctatatgaatgtttctggttaaagcactgaatccacaaatacctttactgcctttggtccaataggtagtccattaaccaatgcagtttcttcttgtgtctgccaacgaccctcagcaacaatcacatcatcattagacaaatccaacaatttacatttattcggagagtttgctcgtaggccctgtcacaaacatttagaaaacaactcctcaaataccaactcattaataggctgagtacaacgaagcaacaataagaaatttaccaaaggcgcaatgtcttctatttggatttccttgtccaaaggaacaccactattctgactttgtctttgaaatgagcatgtgtgaaaacgttgtccattcactatataaccagtataggaccttgcactgcaccgtggaccatatgcaagccatttaattgtttcttcatgttcagatgaagaaacaggtatctagcaagatgcatatatcagagtcagtcacttaattataataagaagaatcagacaagttatacaaattacagagaaatagcttgccttttcttttaaccaagatgcatagttcttggcatgcatagaccataacgttgatgcatcacgtctacaccttggattagtgtcttgtagatgttccaagtgcatgtttgcaaaacaggattaaaagaaactatagtcagattgctaaactgacattgtaattgacacaataagaattgttaacataaacagaacttactcaacaaaagtatccaaggcagccatattttgaatgactgcaagatgggctatgttctttttcatctcagtaagagtaatggcagttccagcagataaaggacgatcttctagtatagaactgttctcatattctgtatttatgtcttctttttcttctaccattgttgtcttcttcaagaaatcactacagaactgcacacattcttcaacaagatatgactctacaatacaaccttctggtcttgctggatttcttacaaagtcttttagaactttcatgtacctacaaagtccaaagaaaaagatatcataatgcagaaaaatttgaaacgtattcacaagagttcaaataatgtttacctttcaaatggatacatccatctaaaatggactggtcctccaagtcttgcttctcttcctagatgtattgtcaaatgtaccatgatatcaaagaagctgggaggaaaaaaccgttcaaacatacacaatgtttccacaacttcacgttccattactgagataatctctctgtcaatgactctctggcacaaatggttgaagaatgcacataagcggaatattgttgtcctaggacctttaggtaatagccctctaagtgcaataggaagaagttactgcatcaacacgtggaagtcgtgagacttgattcctatgatcttaaaatcctctagacaccccttgatatattagaacaatatccatatggtcctgtaaattcaaataatcttttgcagaatgtttttttctctttctttgacaaagaccaaggtgttgcaggtagatatgttctctttccttgtgtatttggatgcaaatcgttccttataccaagatgctggagatctctacgagcattaagaccatctttagattttccacaatgcaacaatgtagaaacaatgcttgaagcaacatttttctcacaatgcattacatctagattatgccttacagggagatcctacaacaaataaaagtatagttagattggattggatccatacttaatcacagcttaattgatcaattatgcaagcatacctcccaataagacagcttgaataattttgatcgtttcttccactttgataattcctcctggtctacttctgcttcttcatcttcctcggattcactagacgaatcggaactctcagaaactggatcaatataggcagtcctttttctctttctcccagaacctttaacatttccaaaatcgtttctgtagtttttcaggttttgatagacttcatgaccagttaaaattcttccctttttcccatgttcagccttcccatcaaaccatgttttcttatgtctatatctatgtgttggtgccaatccctttctatggcacatatacacatgcttcctgctatacttcaaccacatagaatctgtattttttccacatataggacaacccattttctctctaactttgcagccagcaagattactataagcgggaaaatcactaattgtccagagaagcattacctttagagtaaatgtagatttactataagcatcctaagttacctctcccttcttccatagatgatttaaatcctcaataaggggttttaaatagacatcaatgctattaccaggttgttgtggaccaggaataagcaaagttagcattatgttctccttcttcatacataggtgaggaggcaagttatagtttactataagaactggccagcaactgtacttagtattcttcatgttgaatggattgaagccatctgttgacagaccaagccgcatgttcctttcttctgatgcaaataaagggtatttgtcattcatcttttcacatgtaacagaatctacaggatgacgaagtttgccattaatagacttgttactaaaatgccatcttaagtcctttgtcatttcctctattctaaacattctcttcagccgcgggattattggaaagtaccgtaatactttctgtggcacacctttcttgacctcacccgtctgcatattaatcttccaccttgaagaattgcatttgggacaattttccagcatcttgtacttctttctgaaaagacaacagtcatttacacacgcatgaatcttttgatatcccatatcaaagctcttcaaaaacttcttcacatcatacaatgatgtgtgaatcacattgtccttgggcaacattttgggcagcgtctcaagaagctcatcaaagctcttgtcagaccatccattcttggtcttaagcctaaagagagacacaattgccgatagcttgctgtggtttagacaatcatgatttaaaggggtttctgcatctgctagcttggcgaggaactcatcttttctcttgtcctcaccctctacaatctcacctaagtcagccactggattgtcacctagatcaccattagtagccaactcttggtcattgtattcagcagctttgtataactcatgaatttcctcattccaatgattgacttccctttcacattctccatcagctactgagtctccatgatggtaccgatcactttgcagcttgtaagcctcatccatccctctcgttacaagatgaccaccacatcactacttgagtggtggtacacattacgacagtctttgcttggacatattatcttatctatatctcctaaagccgcaaccacatcaaatacaaaccttcgagcacctctctcataaccaggatcagctcttcaatgaagaaataaagttgaaaaaaaaactcaagcaatgttctaaaccccaatttaaattaaacctatctatataattttattgattacctgcatagatgcacccatgacttgtccaacattatatgttataagcttaaaaaaccttattaagatgaattgaaaccataatcaacaacagtcacagtcacagagcaacaattcgagtaagagaacttatcagacaacttatcatgaagagccaacttaaactgaacacatagtggttatacgctgaaaaagccggatatccggctccgttacagggctaatccatttggttattcatttacaacatccacttttttacttttaatactccacatcatcttctctctcttccacatcattattcaacacctacacaattttcatcattacaatactttgtttaataaaattacaacaccttaccccaccattttcatttcatattttttattttatttatgtttctgtttttttgtgattacatattattaatcattgttactatcaaattaaatttaaataattaaatattaaaaaaattataaaataattttgttttaatatttgtttttatttttataaaatattttaaaaaacttttacaaataataaaaacgagaactagaaattattattattttgggtctaaaacagttttttctgtatccaaatcaaataaaaatagtctctatttatagagaatgaaaaattataaattttgatataaatttttatatttttatgtataaatattgtaaaattatataattgagatgaaacaaaaaaaataaaaatcaaagcaaccaatcaaaatataatacttgtcacacttatcttctctcttctactttcacgggtgttgatatttatcaacactaactttgccatgtctcacctagttttttattacaacacactattatagtggaaatattttttcgccagttgtaaaatggtttacaacaaaccattgttttagtcttacgagaagtcacgtcagcactctccccaaagttctaaaaatctctcttctaagtgccatgtggcataagacaaatgtcaattccacctcatctgagattgaacgcgtcctcttcttcaggaaagttctttggagttgtgttccattcaggctagagtatcaattaaacttttttttcatttgcaacaatgggaaggccaagtagtcattaatcttcatgacatgcaaattcaaaaacctttaacctatatttgtcacaaactagataacaacccgtactatatgcgagataaaactattcatgtaaattattataggtaaaattatatgatagtttttaggtaattatatatttgattattaatttagttagcaaataccataattggtgaaagaattaaaattatcaatcaattataaaatattgttagattccatattttagatatttagtcgatatgcatcttcttaaattgattacaaattttaaaatagatatttgattattcatccttttaaatatactttggatattaaattagtggggatatttcttattcgatatcatataattatcaaaagcctaacaaatgtgcacatatgtcgacattatatattttacttcatgtactgaaaataagattataccattaaaatattttcagttctagattttgttaagaattccataaatattggaatattaaaaaaaacaaaatattactaagattttacatctacaactgtttaaggatcttaacgataattcatatttcatatatatgatttagatttcaaattttgggtggacggaaaaagtattagattgtggtaaaacacatttatatatacacaaaattttgattattataaagataaagattattgaaaaatgtaactattagaaaattttgtaacataaataagattattaatttcatatgacataatggaatatgttttgacaattatttctgttaaaaataatgtcaaagtcctaatagattctataaaataagggataactgtaacatgtataaagttgtcgttacacaaaatattaggtgtttcatcttgtaaagattaataactcttaatagcatatattaaaatgtaatttttttttaattaattgattgaaaaataacatgttaagtgtcttgctatgttaagttcatttttaaaattttatttggattaattaatgagtaaaataagtgttagtagtaacaatgtcaaattgatgtaaatattctaatagaaaatggagaattaattaaatgggttgatgagctttgtaaacgcgacacgtcagcatggcattttcgttaaccacacgtaagggtaaggttattttttaaaaatgtttctctattaatatatagaggatttatacgaatacgatagttttacccttaccttgctttttatatttatacgaatgagcgtctttatatctattgatttatactatcttgaaaagactctagaattagtttgacaaagatataacacaatctgcctcttcaaatgattgtgatattttatccaatgctttccaattaatagtatagattgttttcttatatcttctttattttttaaaataaatttccatataatgtttttcctgaataaataataagtaaatttttaaccataagcggcctaaccctaagatcgcgaaagagaatcatcgtgtaaaccataactctaagaccatctccaatagttgtctctattttttcatgtaaatagagaagaaaaaatagagatctctatttttacttcaatggttcctgaaaaatagaaatctctatttgttagaaataaaaataggggaagaaatagagatctctataatagaggtaagaatagagatgggttagagtgaaatagagacaaaaatagagtttagcgacaaaatatggatgggttggagatgccctaagagaatcgggaaactactcacagtttcatgcgaaccaggaggagtcggaggatttgcgtccggaggatttgcgttcggaggatctgcgtctggatatttgttatcggaaaagaatccatttttctaatgaggaaaaaaagaatttttcgtgaagaaaaatatgtgatctttggggagtgaagaaagaagaagagagaaactaatttaaagaggaggtttgattttctctgctatgatttttttatatttttttttaccgttcgattgttatagggagtgatgatacttagacttgtcggaaatttatcacgtgtttggagattgaggttacaaatggttgtcttaagatgaatagttggaaaatattaagttggaaaaaaatgaattgaatattattcaacatgttcctctacaaaaatgtagttgaatgagttgaacatttttgctgcagaatttgttcaacttttcagtttttaaagttgaatgggttgaatcatttttcaactctttcatctcaaatggtaaaaaataagatgaatgctaattcaactcttttaacttcttcatttaggtcaactatttgcagcctaagggttaaacgatgacctttttgatcggtttatgttcagttttgctcataagcgcctaaccctaagatcgcgaaagagaatcatcgcgtaaaccataaccctaagagaatcgggaaactactcacagtttcatgcgaaccaggaggagtcggaggatttgcgtccagaggatttgcgttcggaggatctgcgtccggatatttgttatcggaaaagaatccatttttctaatgaggaaaaaaagaatttctcgtgaagaaaaatatgtgatctttggggagtgaagaaagaagaagagagaaactaatttaaagaggaggtttgattttctctgctatgatttttttatattttttttaccgttcgattgttatagggagtgatgatacttagacttgtcggaaatttatcacgtgtttggagactgaagctgcaaatggttgtcttaagatgaatagttgaaaaatattaagttgaaaaaaattgaattgaatattattcaacatgttcctctacaaaaatgtagttgaatgagttgaacatttttgctgcagaatttgttcaatttttcagtttttaaagttgaatgggttgaatcattttttaactccttcatctcaaatggtaaaaactaagatgaatgctcattcaactctttaaacttcttcatttaggtcaaccatttgcagcctaagggttaaacgatgacctttttgatcggtttatgttcagttttgcttaaataggtgataaaaaagttttttcttattattataaatggagaggtttgagttcttaacttagaccatctccattgattagagactgtgaaagtctctccaaaataatattttaatgtaatttagtttttgatttaatttttaattcatgaaaaaataaactaattgatatataacacatgacataatgaacttctcatcgtttttctcctctcttatactttttctattcttttaatattattttggtagaaatatctaattcttataaaaaagtttatataacttttcaataaacatattcactatctagtatttgtaaatcaatatctagttcttataaatcaatatctagtattttacatgttaagtctcccaaatgggttccttacttccttcttgtaaaatccctaaatttttccaatggtttttcggtttaacatgagacaaggaaacatctattttgcttatttagattgttgtatccgtcatcgatgttgcgttggtggaaaatgataaacctttgaatggttcattgatatacatttgaaaatgcagaaagttgagttctttagaatattgcagtcaaaaatagaattcccctgtgaaaccagaacgtagtctttttttctttattctcatgacaactaatgaatttcaagtagaatccaacttttaatcttgtggtatgtggtagcaaaaattgaaaagttgaacaatagtctcaatctccgaaacgcaagaggatgaagtttaaaatcaatgtattcaaacaaaatcttaaccacatgtttctctaaaacaagatccaaaccaaaatagagcaagtgtgacaaaaagaagcacaaaatcgagaaataattagaagatgtctaatagcaaacatggcttcaaagaaggagtgatgcagaacaaaaaccatattgctgcttttgtcctcttcaaacgtcttacttcttcttggtatcaccagccttggtctacactcacaaaacaatgcaaatatcgttaagacaaaacaggcacaaacataacaatagcaaatgtagatttctggttagtgttggtctctcttaccttcttaacaccacggatcttcttcgccctgttcttcctctccttgatctgtttccttgatttctcaatcttggtgtcaagtccattctgtcaatcacatcaacaatcatttcagtatgagattgcaacaccattgtttcatcgcaaagcagtgaaaatcaaagcaccaagagtaagctagactaaaaactagaaccaaaagttttacttaactatcaaacaagtaaagagaaattaccctgataagtctgtacttaggctcaaacttcttagcgttctcgacagtatcatagatcaaaccatatccagaagatttaccacctccaaagtgagttctgaacttgaaacagaagatagcatttgggtccttaacctcatacatcctcgccaatttctccttaagctcagccttcaaacaagtaaagccccacccagtacacaacatcactaagaaacaatacacaactgcacaagcttggattgtaatcaacacaagccaatgtacgtaaagaacatacctttgaaacattggctcttccaggatgaagaacatcaataacctacattaattgattcaaaatctgatgattaatactccaaatgcaacatcgaaatgaatccaaatactaaacatcaaacctaaaagttgcaaaattcaaaatttcctctagcaatacatcaaaatgatcaatgaatctgttcttataagattgtttctacctaaactatagtttttatcattcgatacagcgaagacgtaacactgtgagattgcaaaatggaacatagagatgggaactcacgaattgctttctggcgagaagcctgttggtcatgaagtttctggtcctgatagtgacagctttttccgccatggctgcgatttactttccgagatcagtctctgagctccggttttgaaaatcgacgagtttcgcagcggctttggaaggaggagcacactaaaccctagattatttatatatagctctctttcagattattagggttggtttcgtttgatgggccgaatttaattgggccttacaatatccatgcccagagaatagattagtttgtttcgggtttgatatacaaagacaaaacaattgtctattttgatcattcatgttataaaaacatactttcatattttatttgattaacgaacgacaatatcattgtatactgtataattatttctaatcttttgtttacttatttttgatttttattttctagaaattttcttttaattaatttaattcaaataaacatatatattataaattgattagctgcaagaagtttttaaagtttttccatgtgtttatgtcaattaaatgaaaaatatttaagaggaagctacatggcataagacaaattgcaatcacatcttctctcgattcttttcatttcaaccaaaacaatcatatgtcatccttcaatcctagcatatattaccacgtcataacgattctacacaaattgtcatgttagagcaggtccattggggattgaaaatttcttatcaagaatccttagcaaaataagacaaaatttaaatgaaacatgtgatataaacttacgaacgacctaagcttagagttttttttggtgttaaggttcgatgacgtgtccatttctcattggacgcgtgttttgacaaaacaatatttttttttcagttgcctgtggtttttctcatttctggatatctctattctcttctttggtgcgatggcgattgaacggtctctgatgatcatcagcctcacgcgttcatgttcatcaaatcggaagagaatatcaacgaaattcgtctcttatccactgtcctcatcatctcaaccgacggtggtcaacatggacgagtttggtgaaccaaatcggagagaaaacgtgcataaattggagatttgtgtcaagccatggtccaatcaaattctgaatatatagatctaacaatttaattgtgtatatcgggattaattagggttattgttagattttatcaaaattagggtttcctgaatagggaattttagaagataaattagggttaattgatggtaattgttgacatttctaagacaagaatagattgatactcattgagcttattagaagagaaattgaatagctcatgaaaagctttattgtgcaaagaatctaaagagagagagagaagctttaagattgtctagaagaacaaaaatgattttgattgtgattcatataaatgtttgagggtgactgctcagagaggcagccttggttacatgacaacatcatagatatatatatatatatatatatatcttattatataaagtacggagttactaactcacgagatcatgacacgtgtcaggtctatcattgagatgttgacatatgttaaaaaaaagtttctttaaaaaaaaaaaaacatatttacatatactaatttatagttctatatctaaaaaatttaacttataatttttttaattaaaaaggaaaactaacaataagatgaagtgtatagaattaaattttatttgtattgaaaaattggattgtatttgaattgtatacaatcgaactaaattgtattgtattatgataaaaaagatatttaaattgtattgtaaaatcgaatttgtaagattgaaatttagtttaaggaaatactaaattaaatactgaaaaatatgagttacaatttaaaattcaaatatcatcaataagttggagtgtataaaattaaaaagcagtttattatgatgaaagagatagttaaaatgtatagtaaaattgaatgtgtatgattgaaattttatttaattcaaaaattactaaattaaatattagaaaaagtgtgtggatcactatttactattcaaattttaaatattatcgataaatatttgaataaatttatatcttttacccgcctatttaggcgggccttatctagtatatatatatatgagaactcttagtacaaaacctaataacatgggcatagatggacttctctaataatcatttcttgggcttctatgtttgctctaatacttccccgcaaacttagcagcgggtgtgaaaacgacgttgttaagtttgtcttagatgatcgaagagcttgattttcagtgcatgatctaatgaaggcacataatctatgtgtgctcttatcttctcgaatcagtctcaattttgaacccagcaaatatgaaggattattagcagcaatatgagaccaagaaacatgcacttcacaagattcacttcatgtcttgaaaggatctagattttgtatcttcagaggtagcaataaaagtttctggctaattcggatggcttgacttgggtgagacaacatatgtagcaagatacaaaatcaagatcacttggatgtagatagcagcatctcttcaccacaaaatcagacattagtgtgagaacttttaaggttcttttgacctatttgtctcacgaagagtccgtgttttctttacctcgtttaactcccctaagctgtcccatgtaaaagaagaattctcttcccacaactacttagatcctacttgctatctgctaaatatgacaagaatagattgatgctcattgagcttattagaagagaaattgaatagctcatgaagagctttattgtgcaaagaatctaaagagagagagaagctttaagattgtctacaaaaacaaaaaaaaattcgattgtgattcgtataaatgtttgagggtgattgctcaaagaggtagccttggttacattaatccataacatacattacatatatatatgagaactcctagtacaaaacctaataacatgggcttagatggcctttaaccctttctctaatcatctttcaagctttttgaaactcctaactagtcaacaagataatcaaaccattccaccaatttagtatgaacgtttttcacctaccatagaacttgtatcatcttacgtccatgttttatgtttgttcttaatgttggtttcttgtgtttatttgctcttactgtaggtttcttatcttgtgtctgcaggtggtcgacgatatcacttgtgcaaagaagaaacgacacagagacccatttgcactcgtttggtttgacatcactatcacttatgtttgttgctcttttattttgtatcacttttgtttgttacccttttggctccgaatggagaaagcttatcgggcggagcggatcaagcggatcaagctgaacaaaagcggattaagcagatcaagcggatatagcagtataactgtggatcaaacgaaattagcggtccaaataaagatttgaatggtgaaagcggatcaatattgtagatcatattatataatatttaattataaattaaatgataaataaagtaaatatatctatttaataattattaaaacattaaaaaatatatttcaaatacaacatcaaaaatagattcaaatctattattttgatttttccataacttataaagaagaagatttaacaactattaagattgggatagattcaaatctattattttgatttttccataacatataaagaagaagatttaacaactattaagattggaaaagtggaagaagtgaagaactatggtttcgtagagttggaggcggagagaagtcgagaaagtgaaacccaatattagggttaatgaagcattaatgacaacaatcaaggcctattaggtttactaaaggatctgcgcgtctgtgaaacaggtggttcaggatgcggctcggatcggctttaaaacgcaggaagaattacgattttacccttaattgtctgtttttttctttttcctgtaacgtaaaatgaaaaaacggcttatgtggcttgtcattttgccataacatcaccatcaactgtatctaaagcttccatatccctacattggtttcagaatttgtgtcaataacctctgtcacttccatttcttctacaaaatcatcatctgaaaaatttgaaatccttataaaattatgtagtcccattgtagccattacaactatcttctgcacatgagtattatatctaggaaattcacaaagaatcctatattttttcttccaaactccaaatgttctcttaattatacactcgaaagttttgtccatatagctacagttttaacgaccacatacatttgtaacaactttttgctacttataaattacaaattagtaacagaaaacgatttaataaaacatgtagctaatttgttacaacccgtagcaatttagctacattttgcgagacagaattttttgtaacaaatatgttaccaaatgtgtttaaaatttagttgcaaagttccacaaaccaaaattcgtcgccgattttgtaacaacagttgaatagaatatcatttaacgttttacgattattatcaactagaagatttgtaagtattagcgacgatttatgcattttattttagtaacaaagttgatatgaatttagtatcaaaatttttgttgtaaattttcacaaaacaggtttcgtcacaaacttttgtgacaaagtaagattattaatattgtttaatttttacaacagttgggtcggtagcaactagaaataaaatggagactcacaatatgtttcgtagcaattatgacaactttgtgactgcccctgtctcatatcaaaggccacttagtgtgcggtagcaaattggttaccaaagccactacttatgcgacactataattgcagcaagttgattacaaagccacttcttttgcgacagtcttattatagcaaatttatgatgatgtcttgtcgatcttccaccaagtttttgtttaattattggcttcgttttctctcttgttcgaatctatatatatgcatcattcttctttgttgtatattcattcaaatctttggcttctcgttttctctcttcatatctagcaacaaaaaaaaattctttcatattcattctaaaatttttcatttgagcaaaccgtctcttttttctttttaatctattctattatctttttctttgtaacaaaaaaatgtcttcaagcaataatatagaaatcgtaagaaagtggatgtataatcgtattaatcgacacactggacatgtattcgacgaatatgaagccgggataagtcaattttatagagtttgcaaactattgattatatgatgggatcgaatatggtgtccatgtcgaaagtgtagaaatgaagaacttatttctattgctaccgtatctaaatatttgtataatagacgatttcaacccaactattatgtttgaacagctcacggtgaggagtttgagcacagaccgctcacggtgagtagtttgagcacggacaccaattttacgatcaagccgaagaaaatacatttcaaacagttgaaccggaatggaattttaaaactagttatattggagatactgtctcaacggaagatatgtcaataccacgatcaaggtaaattattagttatatatatatatatataatgaaattgaatttaaaataattaattaaaaagtttttctttaaaaaaaaaaatatatatatatatatatatattgctcttaaaatttggttaatagaaatattaattcgatttacattaaatataaatatatagaaattgataattagaagtggtgtgctagctatatataaagaaaaactatgttctattgtatattttattttctcttacattataaattttctttatcttaattcatatgtacaaaacataaagtccatatataaataataataatacttattattaattcagtttcatcatataataataatgtttttacatctactagaaattaaaaatttgaagtggtatgctataaatataaattattatattagatatatgtgatcattgaaaatgttataaatcttatttatcttattccatacaaaaaattataatccatatataagataataataatacttattattaaagataaatattcaaataaaaataaaaaagaatgatgttataatttggttaatttaaatattaattcaatgttgttatataatagtatttttatgtcatctgatagaactcgtgtatataaatatatgtatttgtgtcatctataatagaaattcttaaactcatttgttaatgtatatcaaatatattatttaaacatggagggagatatatatatatatatatatatatatatatatatatactttttgaaaatgttataaatatagatctttcattagtactttcatttaatacttactttaaaagtctattaaaaagaaacatatatatatagtagtaaaatttggttaaaagaaatattaattaactcaatacaaatatcatctaacataaattaataattagaagtggtatgttataaataaaaattattatattagttatttcttatactcgttaaaaatattataaattttatttattttagtccatacaaaaaataaaatattaaattcaattttgtcatataatgataatttatgtcatctaataggacttcatatatatatatatatatatatatatatatatatatatattgtcatctccaggaacgtcgagaagggggacaaacagctttgattggatccgatctggtagacagagacgaagacaaagatgaataatttgaagaagatttctttgttaatatatcaaattataaagatataattgtgggaatttctaattagtatgtacataagaataatgaaattccattaaataaataaatatattacttaattattaggaaaatagaagttaattaataaagaaattgtgcatatcagatagttgaaggttgtttatcaatttaattgattatatatatagaaaagtatattatataatttaattaattttttatcgttttgattaatgtacatattactaaaaatactgtacaattttatgaacccgcggttgaatataatgcttgggaagcccataatcctgagaatgcagattttttcaaccgtttaaatacagcaagtgagcctctatatgacaactgtgttgaaggcttgtcaaaaattttgttggctgctgatatgatgcacattaagacgaaacacaatcaaacagaagcgtgtgtcgatgatactccggacttgtttcataaggttttaccaaaaggtaatattgctccaagaaattattatgaaacagagaagttgatgcagacttttagtatgtcgtaccacatgattgatgtatgctaaaataattgcatgatttattggggtgatcctgacgaaaatctaacagtttgcaaattttgtgaacatccaaggtacaaacctcggaaagcatcggttcgggctactagaatgcatattccatacaagagaatgttctctttgccaatattatacggctcaaaagattgtatctatccgaaaagacagcaccaaatatgagttggcacgcagaatatacatgtcttgatggagttatgcaacatccttttgatggcaaggcatggaagcatttccaatatcttaatcctgagtttgcatccaaaagtagaaatgtttatctcaggttatgtactgatggttttaacccattcggatcgtctggtggtaactattccctttggcccataattcttactccttataatctcctgccagatatgtgtatgaaaagagaatatctatttcttttcatactagggccagggcgaaaccatccaaaacggattttggatatttttttacgaccactgatagaagaattactggaactttagatcaatggcgttgacgcgtttgatatttcagtgaagcaaaatttcaatttacaagcagttttaatgtggactataagtgactttcaagcatatgggatattgtccggatggacaactcatggaggaatgtcgtgtccatattgtatggatcaaacggatgctttccaattgaagaatggtcgtatatctagttggtttgactgtcatcgaagatttttacctctagatcatgtttttcgatcgccaaaacgaaaggtcttttcgaaagggtcatattgtcaacaatgtcccaccatattttttgtcaggagaagaaattctggaaggtcacttggcttattattatggggtgaagaaaacagtggaatgtggtggaaacagtcatataaatagtgacatcgaaggatatggcgagacgcaccactggcacaaacatagcatcttttgggagttgccatattggaatacacatctgattcgacatattcttgatgtgatgcatatcgaacaaaactttttcgataacttgattaacaatttgttaaatgtcacaggcaaaacaaaagattctatcaactcacggaaagatctcgttttatattgtaatcgaaagaaattacaccttacatcgtctggaaaaaaccctgttcaaatattcagggtgtctcctcaagcaaaaacttcttaaatggttaaaagatgtggtgaagtttccagatgggtacgtgtctaacataggacaatgcatacacattgatcaaggaaggcaaatgtatggtttggaaagttacgaatgtcacgtcattatgcagcgactatttccgtttgcattcgctgaactccttcccaatgaagtccatcaaaaaatatcaggtaaattagaataatttagcttaagtgtacttacatagttattaatctgtataataaacttatttttgtttttttttacagatgtaagaatatttttccgcgacctttgttcaagaaatttgaaagtcaatgatgttgttcgtatgaagagtaatattgtgctcacactttgtaatctagagaagatatttccaccatttgtttttgatgttatggagcacttgattattcacttaccaagagaagccgaactttgttggccggtgcagtttcgatggatgtatccattcaacgattcatgtttcatcttaagaaaaaggcgaataacaaagcaagtgttgaagggtcaattgtggagcaatttattaatgaagaaattacaaatttcagctctcaccactttaatcccgaatcgactattgtgtcgagtagtgctcagagacgacatgctagtggtttgcctcaacagtacatctactcgtacgacgacgtgccgacattaattagaaatgtcggaagtggaagtggaaaatcatattatgagtggttaaccgatgatgacaaccacatcgctcatacatatattttgctcaactgtgaagaattggcaccattcaaaaggtcattaataatttacatatatatatatatatatatatatatttataaacgtaaaatgaaattttaattcttgataaaaaaatttccaggctatttgataacgaagctagagaaagatatgttggtctcacctaagatttgttaacgactatgaaagaaagagacttttcaagttggttatatattttggtaagttttagctacatatttcacaatttatgatgtgtatagctttgtaattaagatgtattatatacgatatcatgatcatctcataatgtgttcatacaggttcatagtgatcacacgaatacattgtatcctttatggttacaagagcttgtgagaggtccaataagacagtgcacatgttggaatgcatatttttcacgaggttataattttcatacagtaagtcatgcaatgaacaaaactacggctaactacggtgttagtgtgcgtgagagctctgaatacgctcaaacttactatggaaaactacaacaaataattcagattgcatatcatggagctgttggattgaaagttacattattttgatgcgattggtatgatacgacttttggagttgggactagaatttataagcctggtgttgttgaggtatgtgcatctcgtgtgtatgagaagtatgatccatttgttttgacaacacaagtagatcaagtttgttttttgccatattcacgtgtaaaacgacgttttgaagaatagttggtagtagtgaaagtctattcgagagaaatacttgaagaaatcatcacacaacgagaatcaatgcaggaggaaaacgacgatcttcaatattctacgacagtcaatgcattgaatgtaagttaactaattttacctggaggacagcttgaagacattcccgaagatccactaggtgaagattctgaagatcatgatagcgatcttgatatgacaaattcagaaagtcttgaagaattcaaaagttccgaagaagaataattccattgcggaaatgattattgtcttgggaatttaatgttttatagccaagtttttctatttgattttctaaaaaataatatgaataatatgttttaccttctcttgtattaactctcatactttaaatcgcttgaaacatacccaaaatattttgttgctggaataaaaccatgattattatagaatataggggtgggcatttcggtttaacattgggttcagtttggattcggtttcccttctcttggtttatttgggtttcgtaaaactctaaccatacacaaccgtagttagtttggtttgctttgtgtttgggtcagttttagttcggttcgatttggttttagttcggttcaaaaaattaattaatgtatcaaattctatgtttaaattgcataattcaaacaataccaaaaaagcaaaacctataaaaactcaacctataaatatttagagttatttacaatatttttaatattgtaaaactaggtacaaggtatagaatgttttctgatttattcatgaatcgagtacaatgtttatatacacagagagtctttctctccaagtctaactttctctccaagttaaatttaccaaaaaacccacatgagaatatttacaagatatacacacgatattcttttggctaaccccccccccccctcaagttggagcatatggattgtaaatgcccaacttgaccacgattgactcgaactcacgtcgtcccaatgccttagtaaacacatcagctaactgatccgtagtatgaactttccgagtacgaatcgttccattcatgatctcatcccggactccaggacaatctatttcaacgtgttttgttctttcatgaaaaacaggatttgcagctatgtacaatgctgcttggttgtcacaatgtgaatctatgggcttggtttgattcactcccaagtctttgagcaatgctttcaaccattttaactcacatacagttaaagccatggatcgatactctgattcagccgatgaacgagaaaccacatcttgtttctttgctttccacaaaactggtgagtctccaagtgttataaaccagcctccgacagaccttctactcacagcgcatcccgcccaatcagcgtcacaccaacctgccaacttcaaatttgaatctgacttcaagagtataccttgtcctagtgttcctttcaaataccgaacgacccgcaaagcactatcccaatgatctgttcttggggctttcatgaactgtgatagagtgttcacagcatatgctaaatcaggtcgtgtcgccaacaagtagatcaaacgccccacaagtcttcgaaaccgctctggattatccatgagtggctctttagagtaactcagcttgtgttgctgctccaacggagtgctgactggtttcgatcccaacattcctacgtcttgaattatctcaagagtatactttctttgacacaagaaaatcccttctttgtttcttgctacttcgatgcctaaaaaatacttcagagatcccaagtctttcatgtgaaaacactcccccaagtatttcttgaattttctgatttcttctgaatcattacctccaatgatcaaatcgtcaacatatactagtatatatatttctgattttcctcttcgtaaatgaaataaagaataatcagctcttgactgcttaaacccatattcaagtagtgaaccatgcagctttgtgaaccaacatcgtggcgactgtttcaacccgtaaatcgattttcttaaacgacaaaccatgtttttatcagaaactttagaaaccgaagttgtttatatgttctaaagttgtttatcacttaaaaaaactgaagttgtttagaaactaaagttgtttatttggtctttgatttttctacaggttatagcacttcaaaatggaaggatttttggtgttggaggattcaatacacgcgagcgaggtgaaagctcagcagctggtgctttgggtagagtcactcttgaacgccaagtcataaccttgcaagagcagcaggcatctgttgtgaagtgtctgaaatagtacatgccaaatggtgcgccaaactttggctcgacgcagcgaacacaaggaaccgacgcttcagtgaccagtccagaccgtgctaacaacaacatggagagtgaatatgctgatccggaccaagatggagttgatcatgtgaatgaggatgctgatgaggctcttgatggtgaggatgaagcaagtgatgctgcctttaagtgatctactctttttatggtttgattattatttaattatggttacaagacatttatcttgtttaattatccttgtttaattatctttgtttaattatgcttttcatcttattattaagacttgtgtaagatataatcaactattttgatgtatgatattaattatgcctttctgaatttctgtttatacattagaattttttttaatgcaaaacgagttaatacaccaattagaatgcattaaaacagaattagtcattttgataagttggcaacaaatatagaaagtatagttaattgtaactaagaacaccaaaatagtctacacgagttgttgctaattgctactcgagttgttattaattgtaagttataagtgacaagaattacgttacagatttgttattacatttttgtatatacattgtaacaattgttacaagaatatttattgcacataggtttttccgaaggtaataagctgttgcaattaacttcaatgaccttgtgagagtttgtaagaattaacacagagagttgtgtcacaatttgtaagaatttgttattaactcatattgtctcttcgttgtatcatttttcacatgtttttttgttgcatttcatatcacttttgttattacacttttgtaattaaggccttgaatggatgctgattttcgattcagtttttggatttagattttagtttctagattttagattttagttttaggccttgaatgttttgtagattttgtaagagtttttggattttgtttttcaaaaacttattttcataccaatcaagattttaaaattttggtttccctacagtttagaaaaactattttgttgtagttttccattcatgattttagttttttagttttcct

SEQ ID NO: 1102 - DNA, 16898 bp, Arabidopsis thaliana
gatcttaaaattattgtatttataacaataataatttattttctttgattttataatactaatatttagctaacgagataatatagacaggtttatataggatgacaggttttgatcgatattaatgaagaaaggtatatcaagaatgaaatcttaaaatttacaattaaaatacaattgtacaatcttaaacacaaaaaaccatacaattttaacaaaacgaatataacttgaaatttaaattttttagctataaaaaatagactcacggtatactgcggataaaatattcaaaattttaaaatccacgatacatcgttacttaaaaaatatgtgttttcgtacctatacttcaaaaattgaaacctaaacaatagtaatcatatactaaataatacagagattgatatctacatttgaaaatacaaattaatatatatcttcagttagtctttttaaaaaataacattatatttttgttaaaaatatagcctcgcggtgtaccgcgggttaaactctaataaagttgatttttcaaaattgttaactcacatgatcatgagacgtgccaaatttatgattgttacacatatcaaatcaaattttgttataaaaccctctaacttatctatttttgcatctttattatcgacctccaacaaatgcataataatccaatgaattctaaaataatactcactgtaaccctttttgttcattttttgctaccaaaacattttgtaaatgcattacattatgcgtcgagaatatatcatatatattgggaatgcattacattatgcgtcatgattatgattttgagaacgagagtaggaaaaaatgggacatggaacgggaactacgccgactcctaaatatttttatttcactcaagcgggtttaatgatttttcgactgttttaatccaatttgatagctcacaagtttaatagaaatttaacgaggaccaatccggttgagttggaacacggtccgaccgctggatcattcctaattttaataaaaatgaaccattattatttgaactagattttaacccgcgatacaccgggaacaatttgttttttaaagttattatatataaaagtttacaaattgtatttatctataaaatattttattttatagtttacaaatgttattaagtaacgtcctgccaaacccgtcccgtaaaaaaaacatttattttattaacgttgatcttatttatgatatgtttataaatcattgtctatagattttgtaattttgtagtaattaaatgctatcaaattatatctctgcgctttgatgattataattgaattgttatagtcatggagaaaagcaatatcaaaaatgataattttgtagtaattaaatgatactccctctgtttctaaatatttgtagtttaaggtttttacacacaaattaagaaaacatacaaatttcatttaatttatctatttcctataaatgcatcattaattacaactaatccaaccaataaaaaaatatgagataaaatataattgattaaaaactattaaatacatttaatttttgtatagaaaagtgaaaataacacttatattgaaaaaaataaaaaacctttaaactacacttaattagaaacatagggagtattaaatattttggaagttttattttagtaaataatcgtgtagttaatgtggagagattttgggaagattgttaaatgtcaaatatttaattcgaagattttctttctaattatcaaaaacaaacattaaatttcaatggcagccattgtaaataaatctcgattacaggatttatttcacaaaatgactgcaaaaatgtatatatagtaatgctagtaaaccagaatgaaaccaaaccaaaaacaaaactaaatatccaactggtatgaattcatgttataaatatatatcaaataatttatttataacctacgatgttataaacaggggcggacccacattatagtttgtaggggcagttaccaccagtaatatataactaattaaagtttttagcttaaacaatatagttaaagtagcaaaatggtagagattgcctccactaagtgctgaagatagcaggttcgattcccatttatttacattttgcacccacttaatttcttggcggatattttaacttttaaactcatgtaacatcttccggaataaaattcttgattctactattttccaactaatctacacacaaagtcaattacattaatcacctcgtgctatagcaaggtttagtacctagataaaagttaaaaatgtaaaattagaaacgaagatgtaaataagtaatatctaaggtaacaaatttagatatttggaagttttctgtttttggttttatatacaaacaagatatacgtgctaacgtaatgaacaatcaactagaattatccctaactgggagaagtttaatactttcttgtgtactaccaatttttttttcctttttttttttgaaattcaggaggttctgggtcgaagctcgtaatctccccaggcccgaaaccacatcatgtattattagtttcgtcccaagcatcactcgaaccggcgacctctaagcttcgcctagggtctttaccaattgagttaacaacacttggtcgtgtaccaccaattactctcttgttcccttaagaaccgtatcaaaacaatggaacgctctcttcaacgacaagacgttcatcaacaaccacaagacaacgtatcgattcatcttaacaaccaaattcaagatttattcggtaagcattcatccgaagatagaaatatatgaattaaccttagatattcctggtttagaatcccagatacctaaaaacatggtagattgattgctacgttgcatggagaaaggagctgtggtttggaacccatgcttgagacagagtggatagatcgagcaagatttacaccaaactcaatggaatcctatggcataggatacaacaataaggggagttacaagatcattgctggttgtcgtctgaaggaacatcccacaaagaccttgtggacaatgcatgactttgcctccaatgcttggaaatacctcaagtcagtatctggtagtgtaatagtcaggaaggaaaaacggctgaattgaagtactcaccacaagttgtgtattatttttgatgacaagactgatcccatgtacacctgccctatataaattcaattcctccagggaattctttttcagattttgtcatctaccatgtggaacgatagactatcgtaaggatgctcttgtactcagggtttatgagggggatcaattttcattgttaaatcaatgccatgcaacaaagaagattgaggtctgggtgagcaagtacaagattaataataattgggttgcctgaatttttaaccctatactagttggagtctcaactttccaccataaacttttaaccacttgaaaaaccagcataaacaattttaatctcgataaaactacatgtactttcggatttgttcttaaaactacgtctccaattgaacagaccagttaaccgataattatacatccggtttgacttacccataatttaaccgaaattaatccgattttgactctattttagcctaattttgacccaaacaaaatgtaaataaattatcttattaagaagtaaaattatttttattaatttttatttgtgataaacaattaaaaatattaaattataacttaattttagcaaaaattattatgacaaaatataccccaaattatattttgagctacattttgttataaaattttgataatatacaaacatatacattttccttttggcaatcatttatattttttataaatataaagctatgtctttattttaaacaaaatattcattttcttgaaatcataatatttgacctttgaactttatatatgtaatgaaattcaaaatatatgccaaatttatttttatatatatccgtaaacaccataatcaaagtatatattatggtatttataaattcatttttctttatagattcagttttctttttatatatttcaagatgagttatatatgtatatatatatatatatatatttatatatgattatggtgttttaaaaaagaaaatgacctttgaattattaaatttagagtatataccatatacatttatatatatatatataacaccattgtatttataaaaggaatttattgtctattttgttatattgttttgcggtatattttgtttattaccaaaatatatactaaaattttattatataattttgtgtggtatttttttatttttttattttggtaaaattaatttattttttttaagtttttatcaaaaataaataaaaagtatttttcttctagagaatatattttttgagtctaaattgggttaaaatagagtcgaaatcgaataagttcggttaaattttggttaagtcaaaccggatatataatttttggttaactggtcggttcaattggaggtgtagttttaaaaacaaatctgaaagtacatgtagttttatcgagattaaaattgtttatggtggtttttcaagtggctaaaagtttagggtggaaagttgagactgtcacctaaagttcatgaaactgtcaaatccttacttgccggatttagtagaccgaaaatactctaagccaagttacttcatcgaagataaaagacccgtagtgtgctcttgcgatgaaactggtcgggcttggatctatgttttcagggaaaataagctgaccagtaaaacttagatagataatgtggttgatccttgaccttcgcattctacatttattcccaatttggtacatgttcctcaaggttaaagagaagaactagcagagttaaaactttaattttcttacatttgggcttcttgtttagttgttgagggagctaagtttgatttggattttgcattttggtgctttattcacaaactatcctctttgttggaactagagattgtttttggtaatttttgttttttttgcaacataaattatttattgtttctagaacaaactagagagaattgcattcactctcgtggtcttggctttgttccgataataaaaatatgttagacttcacttgttgttgggtcaaatatgactaagctttggtgatagttttaatttacctagcttgtgtacagaatttaaatacatgatggtatgaagatcaataagtagcaataaatggaaattttctctttttcctagtgaataaatgtaagagttccatattttatactagttaatacttactaaaatgtaaaatttacaaatttcacggatgttttatatgtatgtaaatttttgtgttgataaatgacgatatactatatataaatatatgcccaatggttgaccaagggtttattaatgcttctacaccaagaggtcggggttcgagtctcagctactgcgatttattagcagatttgcagattaatggaggcaagtgtgcaaaagatctacaacgatgtacaattatagccgttcacctaggattctacgcagagaagatattgaaggtgtccatcaagcgcatggagaaggagaatgatgtgtcgtctgccatagatctaataagggtcggaaggaattatccgtggtagaatcgtctatgtaacaattctcataatttgtaataaataataaatctagacggtaaaaaaaaccagaaaaaaaagacgggagaaagaaaacatttgtctgtgtgcaatatgaaatgtatttgaacatttccctcttttaacttggtatatacatattgaaaactcggtactcttgtagccttgccattttcaaatataatagttgcttctgactcagaagttctgagtaatctggacaagtagggaagaagaaacaagcagaagttaccatgccatggagaggaattgagcttcaaaaggttaaccaagagccatgaacgattaagtgttttattgtaaaaagatgaaaaattagttcttatctttaaaacatgcaaaatttagcttgtcattccattgtattcctccaaacacaattacatagcctttagacgatcaattagagccttgtgcatcatatggtcctcattaggaacaacataaaaaaactaaactaaataattaaatcgaaccaaaattcatcaatttaaaactgaattgagtaaactggtttaagaaaaacggcatttttgattgatcaagagagttgatttaggatttagactacatgatctcgatgtaaagggtgcaaactaaacaaaatgatgtcagaatctagcaaaattttacatggtgatttgtggcaaaaatctcgcgaattagttaaatatttaaatcgtaacagagaaatcttcctaacaaattgattaatatttttgtctagttgaataacctccaaaaggaaaaataccgtttgagatagtttaatttagtttcaacgaatacatattagatcttagacaaaacgatctaccggatcaggtaatttaagttggttaaaattgtccaaaaattctctaatgccagacttgatctagtcccaattagtaagaaaatgagtactgaatataaaaaaacaaaaacctcatctggtgatagaaatcgagtgtaacatcatattttttcttacccatttcatcaaaattccacataaaacaggtttgccatttacttattacaccaaaacaaaaaactggttgagagtagaaacaaacttgacttgggacgaaaatactcttaaaagtcaaaacacaaagattcgaaaccaaaacaaaccaaaccaaaccaaactgataaaatcctaactaaaaaaaagcatttactaaacattttaaaataaataaaatttcccggaactaaaaatggagggaaatacgacgttacaataccaacaacaataaaatgacgaatttacccctaaacacaattatatctccattattttctcgattcgcgcatgtttctctcaagtaaataaaataaaaatcccaacaacaaaacattaaaaaccctttctctcttcccactttcacatccatagctaaacccttgaagaagattgtttagtgtgttctcgtctcttcgtttatttcttctccaccgatccaacaatgctactctccggtcaatctccgactctgattcgttaatctccctccgtctctctcgtctgattccttccgtatctctctctgattttggccagagcacgcttgataatcaaaatttctccggtacggttatgtaatccgtttcctgattagggttttgaatttcgtcttcgtattgtttctcgatctgttatgatcgtacgtttttcgtttattgttcgtcagttattttttaattttgattttgattcgttgtgaaattttgactgtaggggtctttatatgactgagatttgagaacattgtgtagaaaagtaaagaaatgttagaaactaacgagcaaaagggttttgatttaaacgtgtgtgcttcaattgaagatttcagtgagtctgacattaaggctgagggtgaaactgatagtttggttgatggtaatgtggagaatgtgattgagattaaggataagaaaaaagtgattgagcgtgagattctcattacgcgtagggttcttcgctcaggctctgtggcaagggatttagtaaacagtgataaacattgtaaggctgtgaaaaggaaaggaaatgttgttagtggtggaagttctgttgatgaggtgaaagaagaagtgaaacaggagtgtgttaagtctttggtacctgaggagattcgtggagatgattttcgaagtgaagtgaaagtggaatctaaggatgatagatcagatgatggaaaagaagagaaagttcaacgtaaaagaggaaggcctcgaaagtttgggatgagcagtcaatctgatgataatgggttaatctcaaattgtaaacttcggacatctttaggtaagaagaaagaactggtaggcgatgataatgttgagaaacttgttggtggaagctgctttaacaaggagaaagcagaagtaaaacttgagcatggggaatatgctgaagataaagagattcttggacttgattttaggagtcaggttaaggttgaaatcaaggatgatgaatgtgggattgttgagctacatgatgaagagttgcaagttaaacgtaaacggggaaggcctagaaaggtgcagatcagcagtcaatctgatgagagtcgccctaacacaaactgtaaacttgcgagaactccagaactaagtagccagtcgagtgttgacagaattagtttgagtcgtctgcgtggtagacccccaaagaccaaggagacctcggttagcctttacattgaaaaaggacctgagtctaatggaaggaggatggtacgtaagcgtggaagacctccaacaccacagaaaaagaggaaatcggggatgacagatgaatcagattggaaagcaaagaagagactgaaactttgtgagagtccgttagagtcacggcacaacaatcctttaattgatgacgaaaggatgattggcgaacaacggagtaagcaaactgaagctggaggacattcgagatcaaagtctaagaaaatgctgagtgacagaatactgcagttacttctaactgctggttggactgttgaatataggcctcgaaatgggagagcttatcaagatgctgtgtatcttaatccagagggaaagactcactggtcagtgactaaggcttatcaagtttataaaaaacaattggaaagcaacccgaatgatcaaaagaactctaccactggttctggttttggcttgctaccagaagaagaccttcatctattagagagaacaattcagaaaaaaaggagcgatacaggtaagcaaaggtcaaaattgaaggacagagatactaatgacatcttggtttcaacaaagggaacaggaaaaataaagagggaagaaaaacatagtagaaagcgttgtactccgtcagctcgtagttctttgaaagatgtggattccaaggaggatgggtacatattatttgaagggaaacgcaccatgctgggttggatgattgattcaaccattgtgccacttaacggaaaagttcagtgcatggactgcaagaagacagacatacttctagaaggaattatcacaaaagagggtattcgatgcaactgctgtgatgaagtgttctctgttctcgatttcgaggttcatgctggcgggaatcgcaaccagccattcaaaagtctgtatttagagggtgggaattctctcttgcagtgcctccatgagtctatgaataaacaaagtgaatcacaacttaaagggtaccattttgtggactttggttcgggggatccaaatgatgacacatgtggtatttgtggggatgggggagatcttatctgctgtgatgggtgcccatcaacattccatcagagctgcttggacataaaagtaagttgctccttacgttgtgaaaattttatgttaaagtgggcttttctgtttcttctagacttaatttctcttcaatctgcagaaattcccttctggtgcctggtattgttacaactgctcatgcaaattttgcgagaaagatgaggctgctaaacatgagacttcaactctaccctccttatcgagttgccgcctatgtgaagagaaatgtatgaactatacactaaagccatcttatctgtaattgcatttatatgtatatgctctgttaaacttcttcaaacggacttctaggctctaagcattaccctcacactcttgcagatcaccaagcatgcatcaaccaagatggcacggtgcctggtgaaaggagtactgattcattttgtggaaagtattgtcaagaggtagccttcctttttcttttttaccttttatcctggcgctttattacttgaaacgctgagtatttcatttgtttcttcccttctttttctttaatttatagttattcgaggaacttcagttattcattggagtaaaacacccactgcctgagggattttcatggtcattccttcgccgctttgagctccctagtgaggttgccgattgtgacatatctgagaagattgcatataatgccaaaatggctgttgcattttctgttatggatgagtgcttttcacctttggttgatcacaggagtggagtcaacctgcttcaaaacattgtttataattttgggtaagctcattcccaaaacctgtccttatatgcttctgttttgttcaattggtttattggcaagtgttttatggatatgtaaacagtccgtatgttactacttactagattatgtttaaactttttcctatttttttgtaggtcgaacttccatcggctagatttcagcagttttctcactgctgttttggagaggggtgatgaaatcattgctgtggcgtctattaggtatgcctttggtaccatgaaaatgagaacaaggggtaataagtttctagacttatcatactagacttaaaagcattacttagatgtgacattacactgttcgtatcatactagtggactagtggggcaaacaagattagaaaaccactttgtacccctttcattatactatttcttttgttaaggtacagagatcttaagtttgatagaacacactacatttagatgttagcagtttatgtcgtactaagataaagaaattccctaagtatatgcctctacatggtctcaggtgtttgattgaaactctgttgccgggttctcgataaattgagaatactaactgtgtatagaaattagcttttcttcccataggactgatatatctcttactcaggatacacggcaatcaactggcagaaatgccgtttatcggaacccgctatatgtacaggcgtcaagggatgtgtcgtcgactaatggatggcattgaatctgtaggccctcctccacttcttgtcatatcctaaattcctttttctgttagtttggtggttatttacattaaagttcgtcgcttatttctctcaaatgtttcttgctatatctgaagttttattagatgtctggcaattctgctgctatcctgcttgttttggcgacgggccattctgctttttctcaggttctttcaggcattaagaaagaaatatggaaatagctttgcatttccatgtctgatatatgctaaatgacaaaatgattgctagatcacactgaactaaaaacatggatttgtgtagtcatttgatttcaaatatgtataagtgactttataggatagttgatgcgaactagtcaagcttcttagtatgccatatgtcttgatctgctgtgtactatctcagtcttctgttttgtttagtttagacttcattctgtgtacgatttctgaagatccatattacaaatgtgctttatcatcaggcgcttggttctctcaaagtagacaagttagtcataccagcagtgccagaactgattgatacatggacttcaggctttggcttcgcacctgtcaatgattctgagaaaaaaacaattaagaatctgaacttgttggtgttccctggcgtagacatgttggggaaatcattggtgaaggagaagatcactgactcagttgtttcatctcccaatggtactaactcagtttctcttggcatctgaactttttaaaatgttcatgttatgtgtacatgcatacttgcatctattgactgacttaaatctactccaggtttagtgctgttggcacctgagatgactttgcctgtagatgtcgaggaaaataaacctgaggagtctaaagacagtgcacacgagcgaaattgtgcaactgctggtgttgaatccccttctaacccagttgatagctgcttgaagttaacttatgtagaagagggggataatgacagagaatccaatctcaagttacttgacgggtccgtggaagagaaagaagacactaagaaattgacagatatagacatcaattctcttcctgatgaagttgatgattcccatgcggatcaaagtgatacaaaagagcaggaaattgatgataaagaagataagacaccgttatctgatgatggctgtgaaggtaaagctgagggtaccaaggagtcaaatcaacaaccggatagtaacaaagtagataactctcagccacttggtaatggtggtacaggggaagagcttggcaacagaaccttagcgctaaagagagaagtgactcccacattgcgagcatcgccccgactgattcaaagatcgtggagaacatcacgggtgaaccagaagttcacaggtactactaacgccgtactgcttgactctccacaccggtgtgtctgaggctcattgcatagacagagcttttgtggttttgtgcatatgaccagtctaacacattttgtctaaagatggagcagccctttgctatttcggggtgacaaccggaaaggcgcagttgaaagaaaaagtagttagaattctaatttcagtactttagtaatttcattagtaacacatcgagccagaggtcagaaaccttgcagtggctcaatgcttattagacttaattgtgtagtaaacaatttctttcagctgtatttgagctgcttcataatatcatctaatgttaaaacatcttctggcttaatattcaattaacttattattagataccataaaaccaacaattagcaaacgaagataactttaatagtttaatcaccgcatttaatacctccaggaccaccataagacatagcaataccaacctgatgatcaacatatcctactaaattaacatcatagcatacgttgctgtccaccaaaggctctgtcatagggtaattaaatccggcatgttcatagtccggttggattatggtaagatggtcaagataaccagaccatagacggtcatctttgtttggaagacgaccattacccatcggtgggcttggagttcttggatcacctgaaaccattcctccaaatccaacgaaatcagcaccatctcctagaagattaaacaactcctttggccaatatcccaaatgatttttagtatcatcatctggatttgtttgtgtaagccaccagttttttgtttccttgtccttttacatgaattagcagttgcaaaaataattacaaagtattcgtctaatagtattgtcaagcataattcattgttttcaattgttgattccaaattatgctcttagtctatgctctatcttcatatgtataagaaaaaaacttatgatttggtataagaaattctgtacctgatgtatagtaagccagagaagataatcaaacttgagaggtacacttattggaccatttttggctacttgaacaaatcctggacattttacattaaaacagcctgttccatgtttcccctaaaattatataacatgaaaacatcaaaattacataagatatgcacttgattaggagaaataattcataaaaataaatcataactggttttaccagccatgtcccatacgaccatggtcgtttgtcgccaaatagttgttcattgatctgtaaatgatagtaagaaatttatgatttaccacaaagatttaattaggaaaacaatatagaagatgaaaatatgtattaccatccatccaacttgaatagaattggcatcaccactgaatgctctggctacataagcttgagcacttgtactttgatttttatcaattatcaagttataagtccttagccctgcttctacgcctctgtaattatgtttttctactactttcattcccgcaatctgtaaatgtgtcaattcaagttcaactaacatatatgcaaattactttttacatgtgtaaatgtttttgctctgtcttaatatataaatttcaatgcattttgctaatattcaaccatgtgaaaattttcttatgataggtgtttcatatttaacatatacgatttcatttaatgctgaatttaataaatttttgtagttatctatgttcattcttaccattttaaaaataatgagcaaattttgagagttaacgaatcagtttaagttttgaaacagaaaatttacaatttaaactttttaaagtatgaaagagatttttaaaattaataatatatattgtattttatttttgggtttttgcaaatcatacaaatgccaaagtatgcaagagattttcaaaattaataatttctattttatttaatgtaatattaatatatcacaatgaaaaatatagaatagtatacttacatgggtacccggatatttagctgtaagaacggtaaaattattgatggggtattcttgatattgtatgacatgtttttccttggctcttaaaataggaacggttccatttggacattctattttattgttgtgtcttctttctgcaaatttattctctgattgagaatcccatcctgttggtttcatctaataggaaaattaaaaaaaaaaaaaaaaacacatgtaagtgttaaagtataatgttcacttaacatactatcttaattgacgtacggtatatgatgccagtttttatttctggatatgtttatctattgaaatatagaatggttaacaagaataatgaacattttgaccgactcttaaaaaaatcaaaacatgtcttagagatttgttgaaaaagactttccaacaaacacaacgatcgcaaaagacttcccaataataaaggaagacaaaattccatatagatatatttcatgtcttttaatcaaaaaatagattaaagaaaaatgcaaaacaagatacccgaatattatgatgtttgagcaatggatgactaagagatggttgcttataaatatccatgcagtcgtaaataacatttttacccaactacaagatgaaaaaaaatcacataaagtaaaaataacaacactaaagaagatcacagtattgtatttatgtatttcactttaccttgatggatttcatatgtatagtagattcaacagataacactgaaaggataaacacaacaaaactcacaaagatatccattgaatcacaatgtaatatcttccaatttgtttaaattttttaatgtttcatcagtagtgatattatgttacgatataaataaagatgtaaaatgttgaatgcattaaaatgcaattaatgtttatataattaattataaagcttttatctttcaacctattattaatgaatatctgggagtatttaagagatttctcttgccatttggcaatagttctttttttatcaatataaaagtcatgaggcaaaatcttagcttagtagatgcaagcaaaaaatcataaatataaagttacccttaaatgtatcataattttatgcatccaaaaattaatagtatctcataccaataataatgtgccacaataactaactttattttgaaatagccaaaataactttgctttagaaaactgaaataattaaaaaaaaaacaaagaatgttatgaataatagatggatgcccattataaggctcatcatctagatgtctctagggttttacccttctcttgtactcctatataaaggatgctttattcaatggaataacacactcatttcttttatctctttctctggttataacacgttatcagcacgagtcctacctagctgagtaaaccctagccacctaagaaaacgaaaaaaaaaaaaaaaaaaactagccgcctaaacaaacaaaatcttaagctaacaagataagttttctgttcatatttgtttatgcacgaattatgcacaaattatctatcattagatctgtctgtatttttacacaaattatgaactaattatctattatcagatctgtttgtatctctatacgaattatacacttattatctattatcaattctgtttgtatttttgtacgatttatgcacggattatatgttattgattctgaactgttttatgcattatatcgcagaaaccctatttttgcacgaatgatcagcatctggatttttgcacgaaagataagttctcttccatacttttataaagataaagatctaatgtttctttgaaaattaaactttcatagttgatgcactattagttttacgttaatagagttgaccatgaatattgtttaccctaaatttgcacgaaaaaattatttaaaagatctgtattaatttttttttaatttttttttgagtttaaaagaaaaagaaaaaagactgttcattgttttgccctaattttgcacgaaattattttacccaaattttacacaaattcatattatcctaaataaaagttttgtcaagatatatgtaaaatccagattttgcacaaaatagttttattctgattggttttacaatattgcattaaaattgtatttgtatataatacttgattatttttatgaaataaattgattgataaataacttaatttaaaggtataatcacttatagaaatttttcatgaatgaatagtttaatgtatcttaagaagacatcataattttgatgttcaaagttttttcaagaacttaaattatcaccaaaaattgagaaaataaatatggtaaaaaaataagtaaaatttctaacttttaacgatgaaataatctagtatatcaagtagtttaaaatcttattaaaagactctagaagagcatatacattgttttctatgggaatacaaaattaaaatcatcgatgcggtatagttctccaaatctcaaagttaatatgatgagatataaatacattatgattctagagtg

SEQ ID NO: 1103 - DNA, 61510 bp, Arabidopsis thaliana
taaaaacaaattatgtcaagttaaagttaagttggattgtatttgataatagtaaaagattattatttatatataaaaatattgtatatttaagtccacacatagcgtgggatgttttatagaagaatgatgttttagtttttttacataaattaagaaaaacaacttttccattttaatattattattttgttagtttaataatattaactatacttctctcctctttttaattttattggtcacaaacaaaactataatgatgatgatgtagaacatcaatctttgtggaacaagaaaaaaaaacctaaaacagggaatagtatttttgtttctgaattgcttgggctcttcttaattttgatgatgtgtttgaaaaaattcattcaattttttgttctaaaatgtccggtttataatattttacgtcaaaaacatgaataactatatatatttatatatatatatataatgcgtgtaatacaaatttaaaattaaattatatctcgtgcgatgcgcgagtccacatctagtaccatagataaaagtctttagtgatttcaaaaaattataagcaaagtttacatttttatgtataaacatttatattttctttgaatataattaaacataaattttttataaggaaacatgtttagccaactttagaaagaaaaaaatctttgtccacgcagatcagttataagttataactgattccaaattcatggtatgaattttggcttttggcgttacgctagtgtaattaagaatcacgtgttttggtcctaccattctataattctgtttcctacgtacataatatgtttactgtttagccaataacttttaaacatctttgtccccgcatatcaattatatagctgattccaacctatttttaaatttatttttggtatttttcataaagagtttgctttttgttacaacgattgttcctgactttcttactttttttggacggcaagtattgcacccacaaattgtgatatgtttttttctctaaatttgctctaatttattttatatttggcatttcaaacaatgatttgatcaaaaaaaaaaaatcttgtgaaacaaaaagacgatgttttgtattatcatccatgtgccatcctagtcactttgttattgcagttttgtattatcatccatgtgccattctagtcaccttgctcttaacggaacattaacagcgtttggagatttgtgaatttagttttatattatttattattttgtcgtgtataaaatttaaagttaagttataaacgcaataaaaagttttgtgtataaatatgataatgcagtagacactcttaacatgttgttttgttaaaaaacttcaactatattttctttaaaatatcatataagatggattgatcaagtaaattcgttagggagctgtgagacatgacattcaagcatattcattgaagatatcactttattcgttagggagctgttatcatcaaatatcataacgtgacgccttataaagtagagcctattataaattatagaaatcaagtgggtgattgattcgtctacagatcaaatatataataagatttacggacatacaaaattaagataattatcatcaaatggatcaatctagctaatggatctatgtctcacaaagaacctggtgtttcacggtagaaacaagcattttgtattattatctatatgacatgacattctagtcaccttgataatgcaatagacacttaacatcgtttggagatttgtggatttagtcttatattatttattattttgttcgtatataaaattcaaagttaatatttagttataaacacaacacatagttttgtgtatatgataatgcaatagacacttttaacattttttttcttctaaaaaacgacaagtatattttctttaaatcatcatataagatggtatttgatgagaatgagatatttatttaaaatcatcttatatgttttcaactagtgttgagagaaagatttatttattctagatattaaaattttaaaaaataatatctaaaaatattataaagtctatcacttaataaattttatttatttattattttggaggaattttgtttaaaaatatttgagataagaattaaatttgaattcttaattattctttcaactatttctgagataaaaacttttttattttttatattaaaatttaatgaaaaatattgataaatattttcaaactctatcacttaataaagtttttctttttgacgaatttatttttataaatatttaagatataattatttttaaaattgttagttacattatcttaatttatggattttttgttctgatttaagtttataatcattttagttatttttaaattgttttaatgaggttatgagggcattttccaaattaaaactcaaaaatagagtactttccaaaattactcattaattcattcaagagtagttagaatttaaattttataactaaatgaatttttattttattttattatgtaacatattctaatcgaatgaaataaaatagcacgaataaaaagattaatctctagaagtaaacccaaatattcttcaaaaggtatccacgagaatcacactgcaggttgtaaccacaagaatcacactgcaggttgtaaccacgagaatcacactggtgctaacacccaagaaattgagttgtattgaacaatattattgatacttttatagggaaatgatatttaaggattcggttcaactaatacatcactttatgtgtattagttgatataaacaaagactgtaatgtatttaatcattgattgaattttaccaaacaaagatgaccaaattgttttgctttttaaaaacaaattaaaattttccatgtcatctaattaactaaattaaaacaattaatatgaaataaataaataaatttatttaaacccactaaatatatttaattattaaatctaatccctaaccattttttttataaacccaaaccaatatataatcccgtttaacaaaatctaaaccctaattctcttttgtaaacccaaaccaccatttaaactcgtttaatcgtaaaaagtttaaaccctaatcgtactttctaaacccaaaccgacatttaacctcgtgtaattataaaatttaaatttgtttataaacccaaaccgatatttaatcctgtttaatcataaaatctaaacttctaaccctttctaataaacccaaaccgatacataatttcgttttaatagaaaattagattttttaattaaattaaattattattagatggcaaattctaattggctaaaatgaaggggataaatataaaaagtaaaaactaatccatcacaattcttctttatatcaattaaaaggtttgaaaacgatggcaaaaaacaaaaaatggtttacaaacgaatttgttttttttaagacgacttctctgtaatttatttgctgattacttttttttttacgacaaaacaatttcagtggttaaccagagtcattacaaaaatgttgatcgaaccaaacaggtaaggtatcaaaatcagagtaacaagaagaataagtacatccggatttcgctaaagcatgtggtagtttgttaccctctcttctaataaaaccaaactaaatacttgaaaactttactgtccaaaaatggatgtcctcaagtaaattcgttagggagctatgagacataaatccattagctagattgatccatctgatgataattatcttaattttgtatgtccgtagatcttattatatatttgatttatagacgaatcagtcacccacttggtttctataatttataataggttctactgtataaggcgtttcgtcctttgtttgtttttacttaaataaaacatattatagaaatctacttatagtgttgtaagagcatgtccattgcagggaccttgcaagttttttaagaaatttttgtgaataaaagcaaaaaattaaatcagaatggtgtaataaactaaggtgcgaaccttgtttaaggtatttttgggtgtattaggtgcgctgacgtgattgtacattagtggatgacaacaaaacaagttttgtttcttttcccgtgttttttttctttcctcattcccaaactatttttttatttctctcctctctcctctcttgttttctccgaagctcgacttcggcggatcaaattcttcatcgtctcttttcttaacatgtctctcttctcattatcttatcacgatccacaagattcgtgatcgaagaggtgtcgaaaaatccaccggaagagctactcttaccggctttgctgaggtcaacgatgtgacgatgtttttcggtggcttggttagaatgttgatgctcataggatcctgcttgtgggttcgtctgctggtaagattcttatatgcgattgaagttttgattttgttgctcctttgatgcttaattgttgatctcggtttaggttgaatttgattgcaagttaaaatctgatgcttatgatctggtaattgcttcttacaagttgatatgtaacaatgctttcgaattaagtatatggattcgtatacagattctgggctttgctttatgtttaaatttgtgtttgatctgttggtttttaagattaaaaagtgacccttttgttgcttattcacttctcattagcatgacaacggattggtggcacagaataattggttctagggtttatgtttatgctcttttgtttgctcatttagttgatattatgagctgagataactttgttccggtttggtgttggtcatgttaaggtccatgttccttctctcgtgtatctctaagtggttttagttgatgtaattcacgttccatatttgagtatagtgatggtctgataagatgagaatggagtaagaagagtagcataattttggtcgaggttacttggagcagttgcagcaatgggttttggtcgaagttacttggatcgattgcattacttgtataaaagagaccacatgttttacgtcaccacaagtttgtactttggtttgaatgcttgtacaccacaaaattatattccgaacactagttcttattgtgtattctatgacattacttgtatgctaaacaataattttattttcattgttctaaattttgaagtctctgtatatgcataccaaaacactcttcttttatccactcttattgttttaagtatccactcttcttgttctctacaacaaacccaataaacattcttctttcaccaaataaacactcttctttaacctaacacacacacttccttttacccaataaacactctttttcacaaactaataaaaatttctcacttaaggatttcacttaaggattcaaccattggatagtaaaaattataaaagttctacaaaaactctaaacactcatttactcaaaatttactattaaaaattgtaaggagtccttaattaggactccccaatggagatgctctaagatccttgacaaaaaaaaaaaaaaaaaagtgttgtaagttgtaactaatattaattgatttgactcatcaagaaaaaaaatcagttttatttaaactcaccaatcatgtattttgttatttttaatagatactagatcgaaatctgtgctatgttacaggatattgtttttgaatttttttcattgttttatcaaagccagaagcagtaaaattgcaacaaaaataaaaagaaagaggatctgtttaccgtataattacaaatttgtttacttgtttgtatttctcatgtctgataacacaaaaataataaagtttgttacattgactttattttttagggtttatacatgtttttcccaaaaatcctaagtgctttgaaatactcaaaaactgataacactactaactacatcgtccactagagctagagaaattgttggacttcaaaaacaaatcttttgttaatttgaggaaataaaataaaattatttgtctttttgaacaaataaaaaaaaattatttgtttttttgggctaataaaacaaaatcatttgtttattaacaaaatatgaggataaaaatcgacattaatttacacttttgtgaacatatatgtcattttttcctcactttttgttttcaataattaattaactgaatttgaagctaaccaaaaaacgaaattattgatttactttttcaaataaaattgttttatagagaagtgtcagtttttttttttttttgtaggcgaagtgtcagttttgtttaaactaatacatcaagttctttgtttgattacacttaaatataaaaatattagaaaaatctactcatagtgttgattgttaatattaactgatttgactatataaaaaaaaaaaatcatatttgttcaaaactaatccgtcacgtactttgttgttttcaataaatttaaaatatgttaaacaaatcttctcaaagagctgtattattgccgtagtttatatatacatttgattgcgtatatcgacgagagataatgatcaaaaaatattaggtttgtttaaactaatccatcagtactacttttattttcattaaaaagagtttaaatgttggtttgagtttacaaaagaaaattaaagtttacattttgtaattaaacaagattatatatcggttgaaaagtggttagggttaagattttatgattaaataattttttatttattatgtgaaatattctgattggttgagataaaatggggtgaatgaacccctagtattgttctagaagtttaataatattagttctccaaacaaaataatttgaccaatatttcaagttagatttggaaattttcattttgcagaagaaaaaaaaatttggaattttcaatacattttcttttttacgtgtcgatcacttgtcaacaaggaaacttattctgcaaattaaactaacccttaaacttcagcataatgccttaggatttccctccattttccaagaaacagaccatcttataccttttgacagcttctaaagtgtattacgacatgagttgagagtgcgtctaacctcccgctaagatcatcgcacatgttatcttgacatttatgtcgtttgcacccttttcttggttctctataatttgctacataattgtcttaaggcacagtggctgagctctttacagcttggaaaggtgcattaagtaaagttatattaagttacaaacagcagcaatctcagctctcaattaaaacgagtttaaatgtacggtcaggaattaagttatattatattggattattaaagtcctttttcttgtagctgcaaagaaagcaaccggaaaagaaaaaaagaaaaaaaaaaacagagagcgagagagagagagaaatagaaatttggaaatggaggaaaagcaagagaggaggagaaggatcgtgttgattcccgctccagcacaaggacacatatctccgatgatgcaacttgcaagagcccttcacttaaagggcttctccattacagttgctcaaaccaagttcaattacttgaagccttcaaaagacttagctgattttcagtttatcaccatcccagagagcttaccagcctcggatcttaagaatctaggaccagtttggtttcttcttaaactcaataaagagtgtgagtttagcttcaaggagtgtttaggtcaattgttgctgcaaaaacaacttataccggaagaagagatcgcttgtgtcatctacgacgagttcatgtactttgctgaagctgcagccaaagagtttaaccttcccaaagttattttcagtaccgaaaatgcgacggcttttgcttgtcgctctgccatgtgcaaactctatgcaaaagatggtttggctccccttaaaggtatctatctctataagttgaaattgtttctctcacttttgcaaattacatgttaaaatatggtatttgtagaagtctttgtttgttttgtggcatttgcggtttacgattgggaatatattctagggatttttctaattttgtaagatgtgaaattctcttacatcaaaatttgtttgcttattgttggagaatatcaagtataaatgcaaatgcaaaaaaatacatgaggagaaattcattttttcatgactatcatcgtatatgttgatgatacgaatatgagtatcatcaagatacaaaattaagtaggactttgcgtttatgatttgatttatttctttgaaattgagtaaataaattgcggccataattttgcttttaatatatatatattggttttcacttatcacagaaggatgtgggcgagaagaggagctagtgccaaagttgcatccccttagatacaaagacctaccaacttcagcatttgcaccagtagaagcctcagtggaagtgtttaaaagttcatgtgataaagggacagcttccgctatgataatcaacacagtgaggtgtctagagatatcatccttggagtggcttcaacaagaacttaagattccgatatatcctataggccctcttcacatggtttcttcagctcctcctacgagtctactagacgagaatgagagttgcattgattggctgaacaaacaaaagccgagctcggtgatttacataagtttgggaagctttactttgttggaaactaaagaagtgttggaaatggcttcgggcttggttagtagtaaccaacacttcttgtgggtgattcgacccgggtccatacttggttctgaattgactaatgaggaattattgagtatgatggaaataccggatcgaggctacattgtgaaatgggctccacaaaagcaagtgcttgcacattctgcggttggagcattttggagtcattgtggatggaactcgactctagagagcatgggtgaaggagttccgatgatttgtaggccttttactactgatcaaaaggtaaatgcgcggtatgtggagtgtgtctggagagttggggttcaagtggagggtgaactaaagagaggagtagtcgagagagctgtgaagaggttactggtggatgaagaaggagaagagatgaagttgagagctctcagtttgaaagagaaactcaaagtttctgttctaccgggaggttcttcacacagttcactagatgacttaatcaagactctatgaacatttacaaataaaattcgtatatctactcatttcacttctagacatatggccgtttgggtttgcataaattaagtttaaattttacataaaagtcttgaacttctaataatgaatatagaagataaattggatcaacgaacatatagaaaaagggtttacggttcatatatataagagtttctcaccacttggggcacttttcaagattcttagagcaagtgaaacactttgagagtagtatgcactttttaagatttttaagcaaatcaataccattttaccttccatctagttacaaactcttaaatagttggaaaacaaaataatatgttaaattgtggaccgtacgatgcaaacttaaaattaagatatgatggttgtggatggacactggaattcggagtggggtttggttgtaatgagagagaaatgaagatttttgttattgagtagctaggttgcatgaaaactcgttccgatgtccgtttcccgtttccaaacattttagaaacgaaaactttttggaaacatgaaaatcgtcatggaaacgcgtttcctaaaagtctatgtttggaaacacgatggaaactcacgtttccaaaatagaaacttaagtttctgaaatagacatacgacaaatcatttttattggctttgactatttaataaataaaagtggaaatattaagattattaatacatataactaattttggaagactctgagttttaagatatttctcttgataaaccagatttgaagaaaggtttttattatctttgacgaaaactaatgaaaatgagaatgaaaatgttcgtctaaattaaatatttgaacttaaactttttaatctttatcatttaaaattttagttaacttatttaatattgatagtttggacttctattgtttaaaccattttttctttaatataattttatgttaatatcatatatatatatatatattatgtataatttctagttttctgataaatatgagttgttttttaatgaaaagttgatttacaaaagaaaaaacagttttgaatcaattaactttacaaaaaatgtaaaaaggtaaatttaaaaatgaacattgaaaaaatatatattgcataaaattgaaatgacattttatttttgatttacataggacaaccaaaaacattagaccggtcctggattcttcatacatatgactttatcagactccgtgaaattcatttagtatctactcatttcactagcctacgttttcatgctttgttttgcaaattaataaaatcatatattcttgacaaaaaaaaagttagggatgtcaaaaagggtcaagatttataagtcaattcaactcaactcaacacatgaactaataagttgaaaattttgactcaacttatattcaatatatttagaaaaactttaaatcgacaaggaaaaattcacaagttttttcttatctttaatattttgtattgtaaaaaatttggcataaaaaattcatactaaattgttttatattacttttataaacaaattttttttaaattgattcttttaaattctaaataaaatatgattaaaaacaatcaatagagacgaccatacgctgtgatttgtgctccaaaacattttctgcatctgtctccgtaggacaacacgttcttttatggataatatcactatctatacccagaagaatcaaaaattaagaatataccaatgttttctatataattagttctctctctataatttatgtaagttagacaaaaatgcccttattacatatatcaaattatttagtaatgtaataaaatagttatcgatatttttatcatcaatttctttaggaatattatattatgaattagatgattactattagattaacgtgataataatatatatatccatgtaagttaaaaataaattatgttaaaacatatgatatcgcgataagaataatgttaaagaggtatacaattagtaatgtgttaaatttatttttaacatattaaattatacaatatattatataaacttatcaatatattttaatctttcattcattatgacataaaagtacggtaaaaataattgtaacgtactaatgtttcatttagcaaaatctatatatacatttttgcagccattttagcaaataaatcttggacttggacttatttacaatctaatgccattagcattaaatctttttttaaaataattaattttactatcaattttttatttaaattatcaatcaaatttaatcccaacaaacttcaaatcaatcccttaaaattagcataaacatatttgttaacaatattttaaaacaaagttttttgttaaataaatattattcttactaaacgttttttgtttaaataaataaattttgtatttgaacttatttacaatgtcatgtcactgacattaattatttattaatgaaaatatttaagtacagatttaaatcttcaaaatccttgctttatagttattatgtcattaccttataagcaaaaatattaattttttaaatattcttatttatatatttaaaatttaacattattaatatttaaacttataaaaagtttgatatatcacaatttttaacatcattatataatatatagagtttaaaaaaatcttaattttttccgtcataatttatgatttaaaattttaaaaatgaacatatattaaccaattggcaaaaaatgtgtgggttcaacgtcccgcatcgacaaaaatatttagacaatgatttataaacatatcataaataagatcaatattaatataaataaaagttttttttacgggacgggtttgacgggacgggtttggcaggacgttacttaataacaattgtaaactataaaataaaaatatattatagatatatacaatttgcaaaaaagaaaatatactaattttaaaaagataaattgtccccgcggtgtaccgcgggttaaaatttagtatctaacgtaataatatagcaaaaaaaatataatccccttttattgtgctgaatatacataaataaaaaatacagatttattattttaaatcaataaatattttttaataaaaaatttgtaaacttatcgcgatatcatagtttttagcacgttaaacaaatagttatatacttatcatcaatatattacaattatttttattcaatggcatttttataattaatttaaaacaaaaatatattttttgtttaatattatttttccttcatacttacctaaataactaattgttatgcatagattcttaatttcttcatcttctatgcatagatattaatatagcctttcttttactgtactttggtttttcttcttaaaagtttccggcaaatacatcgcctaccaaaaatatttctcaataaatgatgtgatataattgagttttttttttctttgatggagacagttttctgttcttcattattttctttttaagtagacatcaaaattgttcaaagctatatatataatatgaatttcaattttatatctcttttttggtgaaatgaattttaattttatatatataaaaagaatattaatctatttacaaaattagtttaactatctcaagagttctcataaagaaaccagcttaatgtatgaaaatatttaattatacaaactatatatacaagaatgaatttgaaaaatttaagtcactttgattatcagtatttttcctcaagatatggtttgatttagggtcctcttttgtttcctccaactttcaccaaatggttatggtcaaaatttttttattttttttttattttttttttctttttttatatggtcaattttggttatggtcaattttaaaattaggtttgattttggattgaaagtatagttttttgtagttctttaaaaatatttaaactattttgttggagtcagaattcaattatgcgtgggactgcagattggttcactcatttttttttcccagactggtaataatatgaaatttcaataaagcgtagagttatgtgtcgtgtcatttacacgatttgggtatcctttaatgcgatcaatattgtgggcttcttagagacttctatagctaaaaaaatttatatttataaaagagaggaaaaaaaatatgaacaaacgatatcctaacttagctaatgaataggttttgtggctaaaaatgcaaacaattaaaaaatggatttatatctgtaataagggaaaacttcagtttatgctttatgcctaattaaagctattgaatgtgatgcaaaaaaataaaaaaataaaaatagcgactaaatataaatcttttcaatacatgatttgtttttccttttttactaaaaaattagcatttgggtttcctgtcacaaccttctcaaaatcgtaacaatgcaccaatatttaaactaagtattgtttaaggtttctgaacagaaattaaaaaagaaaaagaaaataatttacccttgtttaatgtgttttttttagtgattaagatattaaaattatgagaataaaatttggaaatttttaccaaacatgtacattgaaaatcaaaaacgacaactattagaaaacaaaactttagtactagaatgacaactaaattaaaacgtaggaagtatatcgcgagtaagcagaccttttgacaaaccgcatatttcccaaaaaattaatcacttgggctaaattacataataatctctatgtttgaaaatataggacgtttaagctaattagtacatactttaagaaatttatttttgtttttaaaaactatcatttaaatttaattcaaaaaatttgaaccaatgatataaaagactacacaatataaattaacgactatattaggactggtatattttgcgaccgtttttaacgatcaactaaagtagtcgctaagtagtctcgactaaggtgtttgcgaccatcttgtgacttttattggagttgcaaaatgcttgtttttgtagtattcaatatatttttctgacattttgttttcaatttccaatacttttaacaactaaagcactaatttatacttaaacaaaaatttatgtattttagatcgtgagattaaaattacatggagtagtttatgaatattatatagagaattcaaattggatttttttcttttacaaaatcttgagatcgtgagattaaaattacatagcggtttgtgttgaaaaagggttttttggataaaatctttgtgttttctaacggaattattgactgtcatgtcattacaatacggaaatgttatattgcgggtgacttttgacatgaaggttttttttgcaaaacaaattatatggaaactttttgggcacaaaaccttaaatataagagagacaaggtgaggttaagataagcgctagttagtgtctaaagaaggaaagactaaaattttagggttcaggaatttgttgtgatatcatgtaagaaaatttagatgttcataaaataaatataaaaaccacacacaaacattatatatatatatatcactcaaattacaatcatgagaatacattttcattaaattggctttgtttgttggccaacttttttaagcgaatttgcctttgtttttttttccttaaataaagaagatgtaacaaatgttcctacaaacaaacatgaacttttgccagaccaacaaggaacaaatcaccactgtaattatttcaaaataccaaataagagaaaattaaggaaatgatttattcataatataatgttttttgcttcacttactgtctcctcataggtttgttacttccttgtcaaggaaacgaagaactgaacagttggtttgttgcgcaaagtatcgtaacgctcggcaagatggtatgtatacctctcgaacagacgatccataatggcgtctccaaaatgagcaccaagcattggttcagtaatggatcttatgatgcttgccctctttcgaatgacttcaaatcgacatgattggtccaaattatcatcatcatctttcacttcagtacgaccagttttgtatgaaaagagaagaccaaagattgtctcaaaattgctgattttgaacgagccctcgctttcgataacttccctcacctcactctcgtcaggattgtagaatggcaagttaaaagaatctacatccgattccttcacaataccctgcattcaaaacatttctccaaaatcatattacaacaatttaatttaatcatgcagaactcacacaaatttatgatttcaaaatatatatctaaactaaaacttttaatatgtgaatataatcataactaaaaagatatgattggtccatatttttttgttagcaacattagttaaattcaaattcagatataattatagcttcgatggacaaatctgaatccaaataccctagttcttactactaaagactagaaaacaaagaatagtcataatgtgtttataccgaagctaaccggatcaaccgatagggaattaaaaaaaatatgcgtacctcagaaaccaagtcgaggagggaatcagatatcgacgaccaattttggaaacaatctttagataaaggatccaaagattttctgcccacgaaagtaagagccatacgtccatttggcacagtctcatccgcacgcagtctcagaaacaaagagaaatcattcttgaactgagtcaaataactcttgtacacatttggagggcatggacttctaaggtacacattcttcttgttatcttcaagcccatcaggaactttggaaagccaatgtagacaaagagatgaatgaacaaaatggagagacttgctagggaaaagtcttgagtagaatgagcctgggactcctgagatgaagcatttccctttaacatccatcttcagcaacttgtggaaggcagggaccaacttgaaagtagtgttgaaatcgttgtctgggagatcgttcaaacaacaattgatctctggtaagtttttgcctttttgttggtatgatgtaatgatcgtgttgactatttcggacatgaccaataacgtgttttccccggaagaacatcctaagtcggccacttttatacaaccaggaaaatctgttttcactatcatttcttttacggtttctaccaccaccggttttgcatcagaagcaagacgtttctaagaagccaaaatgccaaaatagagagacaaaaacacacacgtattgatcagaaaattgttaatttaatctactggtatattgatatatatatagattttctttttcttttttcctttttccccggaacttatggttctttttttcagtcaaagagcttatggttcatatgtagcaaaatttagatatgtcatacaaatagtggaggcaatacgtacctgtccctcggaattattagcataactgtgttctccatctcctcccttcatgcttagaacacccatgtttaaagtccctataatacataataatttgacttgattagattatatactaaatcaaacacaaaagtgatgccgaaaaaaaacaaagaccttgtgtgaattatatttttgcaagatgaagtgtgattattagatctatctagaaccatatatatagaccatcataaatctaatcatcattcattttgcaacaaatggcatgtgtgtgactgtgtgagagagtgtgagtgtgggattttccatgattaaaatttatttcattgttttttctcaccttcccaaatttattaatgttaattaagaaaaaaaaagtattattgtacgtgagagtatttgcgataccaacaaaaaaaaagtcaaaattattttgcaatacgtggactgtggaaattaataactattaatgtaattttcttgtcaaaataaccaaaatgaaagaaaacaagtatttattgtttctattcttgtaacttaatattgcaacatgcatgattcatttatgtaatttgttattttatcattaggcgtcgaattcactaaaaaaaaactttcatttatggcatattaatatatactttatactgtatttattatttaggactctaaataacaaaaaaaaaacattttgacttaggaccctagataactatttaaatgacttattatattgttttagggatctacaaaatcttttactctaacaatcctgaaatgttcagtttgacaattcctatccaaaatgaatcaccatgctaattttatagtttaagaaatcatctttgtcgaagacacatagagaaattataataaaatcaggtaaattcgtacattggccctcaccgttttactaatttattttctattgatgttgtagatgatacaattggaacaaactaattaaatctggcagaatcgattggtgacaatgctcagtgactgtggcaatgacgttcaatgaaaatggtgaagaatttcacgacacttagattaggtgaattaatttctttatatatatggacatcaagaagagaacttcttagttcttagagcattttcaatggagggtttttaaatagttcttatgtatataaaagtagattaggaagagagagaaaaaaactcttatctaagagacttgaagatttatataagagtctaatgagacacatgtctcttttatattgatttcatttaaaaaaaaaaaaaattaatcatctaaatatattatattaaaataataatatagaggtatttagaaaaaaaattaagagtcctctattgaggatgctcttagtagctgcccctgcccctattagtatctaatttagattctttgtattaaaatagtagaaaaaaaaaaacaagaaaagagaagttagaattggttcctctttagaaacttcttatacttacaaagaattaccttaatatgattttaatattaaaatttaattatttatttgaaatatattaaaataataatattttatggctggtaaaatattccttttgagtatctaaaggatgaagatgttctaaccaacagtatcatgaaaacaaagattgaaaatgaactttaatcatttaaaattgaaacattatcatcatatgaattttcccgattttgttagtttgttcatgtactagaaaatatgtttagtctaaaatagagtatgaactcattattctgtaaacttgtgatcttgtctgagataattacattattatttaatgttatttttgtatatatcaattaaaatattatcaagaattttgttttccaaattggtcaactgagtttgtgtggattaaaatgttaatgaattaaaaatttgtatgtgtgcagctcgttgtattgagtaaactataagaaatgataacttaaaatcaagaaagtggtagatgtgacgtattgtcagtaaataatctgattttgcatttaacttcatttaagaaaatcttatcatgttttaatctgattatgcatataacttcatttaactattacgagagaagtaatttattctcgttgcaaatatcttgtgatgtagacatccaatttattatatacattaatttttattattacagaagattctaatatattacatatggagctctaaattatcacatgaacttttaatttaccatatacactcataagctatttttctaccgttatttctttctaagaaaaaaacatttataagtgttggttccaatccaaaagtaatagacctttgagctggctaaacattttataaattatttacaaacccaatcaccccttattaactaaatgaaattaacattcatttttttctttgcagaaatttatttcaaaattaaaattctccatattcataattttgaaattaacattcattttaaaattaataaaaataaatcgtgctatttttattatgtatttaatatccagttgtttttacgagaccatttgcatgatcaaatatatgattttaggtagtaaagaaatcagtagtttagtaaaccctttttcaaaaaacgaaactatatatactacaacttatgactggttaacttggagaaacaaaattatacttcaagattttctgggcccacgatttctaaattttgttaacaattttttatcatttttggaagaaaatttcctcatattttgttttgaccgatgaatatataggcaacgtgaaacacgttatcatgtgcatgattaaaccactacgtgaataacgtttcacgttaacattaatgattctttgaaccactacgtaacatctgttacggctgtcagagtctctctctcaccagattggtcaacttagtaggtgtgaataaaaatgttaattaattataagtgtgcagctcgttgtatattttattcagttaatcctgaaacattttagaaaaaacacaaagggtaagatggaaagaaatggcatgatatgatatattttgatttacattttttttttttgtgacagcgtttacaattatattattttgttatatagatgtctaattttttgaaaaaaaaaaaaaagatgtctaatttatcaggtgaacgttaaattctttttaaggagaaatcaggtgaacataaaatttataatttaaattttcaaaattagcacattaaactataattaatttcatattgcaaataaaagaaaaattcaaatcttaaattcaaacctctatttcataaagctgaatggttgtatagaatgtaataaatttttagagtctttccttacaaaatatttttatattgaatatagaatatatattttttagttatacaagactgactcaagagaattatttttattagttttgtttttaatactaaaaataaacaagaaaatattttaaatatatttttgttgttaaatacttgattccgatgaacgatgtatcataataattaaaatgtcatgatattgattatatattatcatatagttgatacatgtgaacatatgatttttgttggtaaatacttgattttgatgaacggtgtatcataataaaatggcatgatattgattatatatcatcatttagaaaagaaagtataagtagtattttactccttgtagaaaatagaaagccaaaataaccaaaaatgaaacaaatttaagtcgtaagaaagagggaccagtcgatctctttgtatcttttctctccatttctcgaccgaacaagtccataagtgtcaagctcaagcatatcatctcaaaacctggacaagactcatggtacaaccaaaaagacacaaaaacaaactttgatgcaacaaagattcgacatgaatacaaatcacgagattaataaaacacaaactatatcacttcttataatgtctttttagtttaagagttgatctgatacttctcctccccactctcttatcctaccctcagccattgcagcctacacaagaatatgtatcagtaacaataggacatattgaagaatcgagtttagacatcacatcattgccttttatattatattattgactcacctctgtgtcccaatttgttctacagatcatccatgttaagactattgtctgaaccacggttcctgtcaacattccgcaccagattccctaacacatcaaagattttcgcattattggtgttttcattcttgtttttttctttttttttacttgaaaaagaagattcaagctttcattaattaccattacaccaaagttaagcttgtagcctagtaacagaccaaatgggattccaaacacgtaataacatactatgttaacgtatgccacaactgcttgccatccagctcccacagccacccctgtgtttattatcattttcatcagattcactaagctagcttcttatataaccaaataaagtcttcatatcaaatactattttttatccaaagaccaaccatgattgtatgaaaacaaattgaactagatttgtttctgtgagataaatagtttgagggtacctgataagacaggttggacattgttgatgacaatagagactgcgagtattggtgtaagatctttaacaacaatgataacttcttcgtctcccacaaataacgatggatatttatctctaaagatgagtagagcaattgatatagcaagtccgatcactgtagatgttatcactgccactagtagtgagaattttgcggttcttggatgttttgctcctaattcattagacactctcacactgtaccattttgagattatgccaaagagaggtttatattatattaatcatagttatgccaaagagaggttttaaaacaaaagttttaccttacggctgcgttcatcccaatagcaatcattgcagtccatcccaaaatgttcatgcttcatttttaatatcgttacaagaccaaaacaaaataattagaggcaatggctatacgattaatcataggagaaacgttttttttttcaatactaactttttgccagcggcttttttcaatcaaaacttcgacctcctgcttttctcatcccggaccaaatcaaaattcaaattgtaaaccttaccattatgaaaattagctgatttcaacatatctctatactgttcaagctttccacttggttcttcagaagagcattaatagatccccaatcacaagactattcaatatcttctactctacattttgcggacttagcaaccgttaacgcctaagtattcaatatcttctactctacattttacggacttagcaaccatttagagatattgtcgaaatcggctaattttcatataggtcaggtttgtaatttgaaaaaaaattagttcgggttgagaaaagcagtagtttggaatttgggttataaaaaaaattaccaactaggcaactcataattcttcattttccaaaccaaacttaaaaacattagaggcagtggctatgatcattgattaatcagagtactttcaggggataccaaatataaattttaattacaaagaatttactatgattaatataggtgtatagtggagtcaacaatgaaaaatgtaccaactaagcaaacaactacaaattcttttgacatttgtatacattaataatttagaatgatattattgaaccaagctcaagtgacccttttctaccgtagtaggtttttcgcccatgattagaggcataaattcaacgataatctttactttttgaaatttattaattgttactaagatacaatattacttttaaagtttatatgtgcttccatgaataactaatgttgaacaagctgtagatacattcaaaacagtcgatttttaatatggtccgtttgggttgagtgtatatatatatgtataactactacatgactaaaaataaaatgtagcaaaaaaaaaatgaaacgaataataataaaacaaagaatcaaaatattaattaatgcagcaaattattttgatagatattatcatattaatgcagcaaaaactgactagctaccagctagggtttcactgctcaagaaccaacgaataacataagtcaactacgcatgagtcacgacaaattacactagtgctaattcctagagatttttttttttctttctgataaatagatcctagagattcttgatgagaattttctaaaatatagaaactgaacaaatcaaacaacaaatcttataaacattattaatttgaaaaaaaaaatactaatagactagaattaccagatggagagagcagctacggagatctcagcattcttcaaatatccagcaaataatatgactgccataagataccatacctccaaacttccaaagtaaaaataaacaataatatgataaaaagttaaccaaattgaacaatgataataacattaacgatagagtcgtatgggtgtggttgtgaccaaccagagcataacagcagaagccaaagataatctgacgaaactccacaaattatgaaaagcttcccatgagaatccagaccaagcttcaccgcatgtaccactaaatatgtacacaagctgcgccacgacaatgaaccaccacgaggcgttgagcacgacggctagacccgccgtgccccactggagcccctcaatgacaaaccacgtgaggagcacgtgtagaacaagtgcaaccgctgatatcgcagccatcaccatgattttgctttgtgattgcaagaacttagccgttgggtaattaacagcgtaagcaaagatctgagggatcatgtagatggaaaatattcccgtggcgctagagatcgccggcgtttgaccgatgaacgcgaggattggagcggcgaagatgtaaagaagcgagagaataaccgcggtcacgtttagtatcacccatgatcgttgcaagtaaacgccaagcattgacaatttccctgctccaaacgcttgtccacatagcgtttctaacgcgcttcccattccaagctaattaatggtcacattcacaattattattacaactcaaaaaaaaaaagtttcttagaatatcttacttataaatatggtttatatggtaataaaaactattataatcttactacaaattgaaaaatcgcacaagatttcgttctttttttttggcgtttgtgcttacattttttttgtttgtgttatacatttactatcatatttatttttgatcttttaaatatctttttttgcaacattttgatttatattattgaaaatgatattttagaactagctcaaaacattttgaatggtttaaaaaaaaaaaacattttgaatgatttagaggtatatctcccaaactaatagtattaaattcagcacatttgaatgataaacgcaaaccaaaaaggtcaacaaggggatattaatttaccatgacaccaaatgagaatccagcgatgaccgagttttcaacggagaccgctgcgagagcgatggtgctgatgtgtccggcgaagacctgagtagcagcgccgagagaatattgggttatagacatgaaaatggctggccctgccaagtaccatagctttttgacctccacgttgaactccttgacgaagccaccaacggtggtgatcggaggaatatcttccacggatgagaaaggaagagcaggtggttcttccgccgcagatagaagggtctccgtaagaattttgtcttcttccatatccacgagatagagacaaagatggaaagattaaagcatgtaaaagactaaagaccaaagagtgagcatcttgggattagtcatacatgaattatatagaaaataatttctgtttaataagttaatttcctaatgttaagaaatattgatgtgttgataaaattgatgcagcgcaagtaaggtttaaaattggtggttcagtttaaaattttaatacgaacacgtcattgggtttaatcgtacacgacaagtatggacttttcatcgttttttttttttgaatgtaggttttacttttggtttattctttcttttatattcatgaaacaaaaatcttaagactaggcccaaaccaaacctaaaccttgactgaacgcttttaacatttttagttaaaacttaaaacataaacaacgaatatagactgtgagagtttgtcttcgagtttcatgaatgagaagagaaggcaagagaagactctcaaagaatcagaaggtttgattcaaagttagaaaacttcaggcccatacgcaagaagcccatctcgtacaagtcgttgaagaggaagcacgcctgcagcattgtttcctttaaaaggtctgtgtcgttttgttctttgtagaagtgttcgaacaaaacatgaaaaacaggggacaaagaatcaaagatgcagagagtagatgagatggaatggcgtgtttggttgaatgtagttaatgagttgtgtatgtacaagctctagtaagagccaactgtatataaggactgattctagtggattccgggacaataagtttcccggcgtgagtagggtttcacactgagacccgaacacgtaaaactctctcttgcactttactttctctgcaatttctcagtttctactctgcttcaagtctttctttctaagtttcttcacacgagtgtaatggagagaaagagaggggtttatggtgataaaggtcgctactttaacacccaaaatctccacaaaatggtatcagagctccaggttaaggaggaaacctctcaagaacctagattcgaaagattcgacgggagaggagattacacactgtggaaaagaaagcttcttgctcagcttgaagttatgggtatctcagatgctctaaaggagaaagaagaaaagaaggaagctgttgagacagaaagggtgaaggtcgtgtcttcaagctcagaaagaagaagagaagaacacaagaaagaccattcacgagaagagaaggagaacaaggccagatctgttatcatacttagtgttgcagacaatatcctaagaagaatcagaacagaggagactgctgcaggtatgataagtgttctagataaactctacttgtctgatccactatcaagtcgtatatctcttaaaaggaagctctttgagtttaagatgagtgaaaacaaggctgtagaagagaatatagaagatttcttcaggatagttgaagatctagaaaagttagatgtttatgtgtctgatgaagacaaagcattcatgttgcttttgtctctccctagaaagcttgaacagcttaagtactctttagattattgcgaggaacccttaactttgggtagagtaatgactgcaatatacaagaaagagcttgaggttgctcaaatagaaagacaaacagaggaagaagagaagcgtttgtctttaagggaaagagaaaggtcagattacagagaagaacaagctaagggaaaagagaaggtcagatctgaggcaagagaaaagaaaggtccatgttggagatgtggacaaaagggacatgtcaagacagagtgcttccaagagaaaaagaacaagtcaaggaagaagtcagttagatatgaagaatcatcagcgcaaagtattgtttctggtgggtctgtgttcatggtttcagaagctgctgctcgagcaagtaaaggaagctctgaagaatggatttgtgacacaggttgtacttctcatatgagctcaagaaaagaatggtttgaggacttggtattttctgaatctggaaatgtgtcaatggcaaatgacactactttacaggttaaagggattggaagtgtgaggatcttgaatgacgatggaacaacagtcttgttgactaacgtcatgtatattccgggcatgtcaaagaatctcatatccttagggacacttgagaacaagggatgctggtttaaatccaagaatgggattttaaaggtcataaagggatgcataacattgatgaaggctgaaaaagttggtacactttacatgctaaagggtaaagcagtaacagcgagacgaagagctgtacaaggaccaaaagaggagactaagatggagcatatcaagcctgctcacatgagtcaaacgagtctcgagattccggtcaagaaagggtgtatcagaaaacagaaaatcggtgaagtgaaagtctgtgaagacagggcacagaaagaagtaaaaagaatcaagtttgattctgaaaagattgtcactgaaatgaagcctaagattgtgcattcaaagatatggagtttcgcatctactccgagaaaaatcaaagaaggattgagaataaaaggcatcactgcaaaagaaacagggaaatcggtttgtgacactattctgttaaagtcatgtacaggaggtgttgatattgcagtgaatctcaagaaaagtttattctcatcaagttttgaagtctcaagagataaagagacaagttctgcatcaaactgcaggaaattggtcataagtcaagatgagaaatttcagagagacatcatttgtgaatgttgtcaagaacatgaatgtgaaaggcgaaagtgtgtctcagaaaagggaattttcagtctacatgacaagaatgagttagtctacaacgaatctgttattcaaggtggagcaagctcaagtgaaaattcacagcaacattcaagtttgaattctcatcaagtcatggcaacgttcatgagatcaagaaaagaagaaatggcaaaagatgggacatatcatcactcaacaagtcatcaagtgagtatgaaacgttctggagttacagtatatgcaccatcaagccaaaggaagccaagtccaagagaaagaaatattatttctgtcggatgttatgatggagaaatctttttcaagatcttgttgcctgaagataaagaggactgcttcataaggaaaaatgcagagtttctagaaggttatttgatcaaagtgttgaatcttaagtttcaggatttagaggatcaaagaagaaaatctgtgagagtaagtctgaaatctctacaagattatgaaaccagtagctttcaagttcaaggtggagcttattcagcaaaaggcagtttcataagtgaaggacaagagtctttaaatacgtcgttgcaaggtagagatgcagcatcagaaaccagtgaagaagaaacggatctgcagggttatctattgacaagaattaatgtcaaaagagaagttcagccaagtaagaaagatgaagaaacaaagttagttggatcagttcagtttatcattgaagatgcaggaaaaacagaaccaactagctttgaggaggaaaagagagatccaagctggtcaaaagttgaagaaatccagtttttgcataatagggatacatgggatctggctgataaactcatgaatcaagaggcaagtatatgcaaagggatctacaagaagaaaccagaattttctggaattggaaaaccaagttttaaagtcaacttgagggttaaaggtcactcaaaagaaaaagtggttctgaagctaatggagatgaagcaaaagacagatttcttacatgaaaattctgagaagaacattcggatgcttcaacctgcagtttatgaagaaaaatcaagaaaagagaaagcatttctcttggagaattttctgtatggtttgaagaatttaccaagatcacagaatcagagaaatgacacactcttgattcaagatggttatatgagaagcaagtacgttttgtgggtatacttcaaggtgtcaaagatggagatacatcaaaacagaggatttgaaagtccaaggctgtctcaggaagcttatgtgataaaggtaataaggttgttcaaggaagatcaatgtgagttcgtttttacttcatcggaaactctatttgagttccaagcactcgaagaagaaaaacaaggagatcaagcggattatatgaagttaatatcatgcttaagtgatgttgatagtgtggtagtcgccatcattggcacaagagttaatattgcttggtttagaggagtggtgtttcgttctaagaaagaacattggaagtcaatgttacggaggatgcgaggcattaaaggaaccacggaatcagttcaagttcaccggaaacaagaagattttgagcttacaagagttaatgactcaaaagttgcagttggtgctgatcaaaaacgagttttgacgtgtcggagtttcacgactgcaggcagctcaataagctgcaaatatatgtttcaagaagtagattttgtgtctacaaagaagggtgaacgcaacagatggactggggcttataagcgagttgtttgggtgagagactttaaggatttgatagaatcaagtctggttttcaagaaacaagaagagtctatgttaagaggatgctacagctcaaagtttgcagcaggatcagttttaaaggtaaactttcaacaatgtgtgttcagttttgcaggaaacacattaaggagagaatctggtctgctgaaagtgggtgtttcatctacaacagaggctgaaaagagggtccaggaaatggacatacaagagacagttttgtcaagagaattgcttgacatggacacaggagggctgaagaaaactaccaagttgggtatgttgtctagtgcagccggtgttgtcaccaaagggttaacaaggagcatgttccaagatggcgggccgatgctcaggtttaccaagaactgaccaaggtcagggtccggggaaggaatccaagaactagaatcatcaactcaaagacaaggtggagttttgtgagagtttgtcttcgagtttcatgaatgagaagagaaggcaagagaagactctcaaggaaatcagaaggtttgattcaaagttagaaaacttcaggcccatacgcaagaagcccatctcctacaagtcgttgaagaggaagcatgcctgcagcattgtttcctttaaaaggtctgtgtcgttttgtcctttgtagaagtgttcgaacaaaacaggaaaaacaggggacaaagaatcaaagatgcagagagtagatgagatggaatggcgtgtttggttgaatgtagttaatgagttgtgtatgtacaagctctagtaagagccaactgtatataaggactgattctagtggattccgggacaataagtttcccggcgtgagtagggtttcacactgagacccgaacacgtaaaactctctcttgcactttactttctctgcaatttctcagtttctactctgcttcaagtctttctttctaagtttcttcacacgagtgtaatggagagaaagagaggggtttatggtgataaaggtcgctactttaacacccaaaatctccacatagactgtataaactacaaggttcattgaatcattaaaactacaaagaaaaatatatttattacgtgctatggatcatgtccaaaccctgggacacgtgtgagcgttttaatagtatagttagtccactagatagcagacaatttattattgaggaataccatacactctacaaatttactaattgtatgaattagtaaatccctagttgtgtaaatttactaatggctaatgctaattttaaaaatatgtatagtgtgtacggtttataaaacttttttagttatttttagaagtttgtgaagtgtgtgttataattatccataaaacttgttttagtattatttttgaaaatttgtaaaatgtatgctataatggtccataaaatttgttttagtactattttagggaatttctcataacaactattttaccctcatctattgtttttttttagaataccaagaagtttatgtctctcagagattcacaccaaactaaatttggaaacaaaaactgttttttaattttgttaagattttcttaaatagttaattagtaaaaacaaattcaaaagtgagaaatggaatttaattaaaagaatattttatttaaaatctatattcaatgtataactctcaaaatcttattatataaagtatggttttcaaaattagtaattcacatgatcattacacttgtcaaatctattgacttaagatttggccatatgtccaataaagttttcctttttaataatttaaaaaagtagtaataagaaaattataaatttaaacagttttaaaatataaaaagataattattaagaaatcatacctatatttccataggagatttagctatgtagcaaacaaaaaatttgtttaacaattaaaaattgtaaaaaataattataaatagaaacagttctaaaaaggaatatatatatatatatatatatatattttcataaaaatagactttacaactaactgtactattctcataattctcaccaaacaaactatttttttagaaacaccaccattgctttaagttcattatattggcaaagcttttctttttttttgtcacaaattatttttaggataatattagtaactaacctttgactcaaaaataattataaaaaaatactcatgactctaaagacttttgaaactaacctttttccgatatgtgaaaattcaaaatgcccctaaaacaaaaaacaaatatacaatctcatattgtaatttggagaaaatacatgaaataaatactaataacacaaaatctaaaaacaaagaaaatcattaatgaaagtttgacgacgaaagagacatccaaaaatatcatttagaaaaatattatgtcatactaaaagaaacatgaatagcatatgattaatatggtagtgatgatggtggtggttgatggttacacatgtggtgataggttgatttttaaaaaattgaatcacataaaaattacattcatttatcatatgtactcgatgtcgtaggatataaagaaggtgaagaaataagagcagttgaagaaagaagagaagagactgattgtttattatttaatttttaatattgactaagatatgatttgatatgatatacatattactttgatatgaaaatttagcagtttctattaagatgaaatgtgtaaaattaaagttttagtttcttatgataaatagacagttaaattgtattgtgaaatgaaatgggtaagattaaaattttgttttacaaaacagatactaataaaaaatatgtttgatttactatttaaaattcaaatagcatctataagacagagtatgtagaattaaaatatagtttattatagtgaaatagatagtgatagtgtgtaggaaaatagactgtttaaaattacaatttgattttaaacaaatttttttaaatattatgaaaagtgtatatattactatttcaaattcatagataaaaaatttatatttatttttcttaaataaataatagtaaaaaaaattaaagtgagaagatggaatttaataaaaataatattttatttaaaatctttattcaatgtataacgtttgcaaaaaaataatataaataatcagtcttatatctatattagaaaataatcagacgataaatttgtatattttggtacagtaaaaataagtgtatagaaataatgaactaactaaaatttctatttatcaagaaaagtaatacataaatcttaatattatatataaatatatatatatatatatatatatatatatatatatagaggtgtcaaaatgggtaacccaactcaactcaactcataatcaaatgagtttaacaaaatgggttgggtcaacccataactcatttaatttgatggtttgagttgttaaatgggttaacccatttaagtaataatttaattaattattattataaaacaataataaataattatcattattaataattattaattcattatcattacggatttacgtttttggcgggaaaattacgggttacattgttggcgggaaaatcacgggtttacgtttttggcgggaaaatcacgggttttcgtttttggcgggaaaatcacgggtttacgtttttggcgggaaaatcacggattttcgtttttggcgggaaaatcacgggttttcgtttttggcggaaaaattacatgtttttcgtttttggcggaaaaatcacgggttttcgtttttggcggaaaaatcacgggttttcgtttttggcgggaaaatcacgggttttcgtttttggcggaaaaatcatgggttttcgtgtttggcgggaaaatcacgggtttacgtttttagtgggaaaatcacgggtttacgtttttggcgagaaaatcacgggttttcgtttttggcgggaaaatcacgggtttacgtttttggcgggaaaatcacggatttttcgttttggcgggaaaatcacggattttcgtttttggcgggaaaatcacgggttttcgtttttggcgggaaaatcacatgtttttcgtttttggcggaaaaatcacgggttttcgtttttggcgggaaaatcactggttttcgtttttagcgggaaaatcacgggtttacgtttttggcgggaaaattacgggttttcacttttggcggaaaaatcatgggttttcgtttttggcgggaaaatcacgggtttacgttttttgcggaaaaatcacggatttatgtttttggcgagaaaatcacgggtttctgttttttggtggaaaaattacgagtttactttttctcaattcatcgtttgtatatttaagaaatttggaaaaatattgattttactagattggtttagatgtgttggttaaacttaaattagcattggtttatagattttagttggtttaattcaattttacaaaacttgatggattaattgggtaaaccattgaaaccattaaccattacaatccaactcattttactcatcaaaccaattgacccaataactcatttgacccatcaactcatttgagtcaaaattttcaattcattagggttcatgggttgagttgagttgacccatgaattttgacccattttgacacccctatatatatatatatatatatatactgtacataatattaatatctaaaagtgtgttaacaaaaaaatatatctaaaagtatagaaataatttctaaaataaaaaaacgttagtcggaatcagattgtaaaaacgttacagttttggagcaacgatgattgagtaatcactaatcacatttttttcaatactagtgaagtaatcgtgtgttttggtatatggcaaaataagacaaattcaaagactaatgggccaattatatgtatttactcgtttaactcgaatggcctgtttggagcccaatcaaccaaaggagagacgattcgaaacttttaaacgatgaatttgtaatcaaacacgaaccctaatattttgggggatttttgttttctgtcaatttgttcatcatgattcaaaagcttttcaatttggtcatggattagaaatagtgtcaatgggtaattggaaaattcgatcttttaggctaattttgggaaatggaggagaagctctcgaggagaagaagagtagtgttggttccagttccagctcaaggacatataactccaatgatacaacttgcaaaagcacttcactcaaaaggcttctctattacagttgttcaaaccaagttcaactacttaaacccttcaaatgatttgtctgattttcagtttgtaaccatcccagagaacttaccagtgtctgatcttaagaatctaggaccaggacggtttctgattaagctagctaatgagtgttatgttagctttaaggatttgttaggtcagttgttggttaatgaagaagaagagatcgcttgtgttatctacgacgagttcatgtactttgttgaagtagcagttaaagagtttaagcttcgtaatgttattttaagtactacaagtgcaacggcttttgtttgtcgctttgttatgtgtgaactctatgctaaagatggtttggctcaacttaaaggtatatataatttctactatcgttttaaaacgccaattcatgtgttttgcgtttaaaaaggattggttttgtacttttgcagaaggcggtgagcgagaagtggagttagtaccggagttgtatcctatacggtacaaagatttaccaagttcggtatttgcatctgtagaatcttcagtggagttgtttaagaatacatgttataaagggacagcttcctctgtgataatcaacacagtgaggtgtctagagatgtcatctttggagtggcttcaacaagaacttgaaatcccggtgtattctataggcccgcttcatatggtggtgtcagctcctcctacgagtcttttagaagagaacgagagctgtatagaatggttgaacaaacaaaagccgagctcggtgatatacataagcttgggaagttttactttgatggaaactaaagaaatgttggagatggcttatgggtttgttagtagtaaccaacacttcttgtgggtgattcgaccgggatctatatgtggttctgaaatctctgaggaagagttgttgaagaagatggtaattacggatcgaggttacattgtgaaatgggcgccgcaaaaacaagtgcttgcacattctgcggttggagcgttctggagtcattgtggatggaactcgactttagaaagtcttggtgaaggagttccattgatatgtaggccttttactactgatcaaaaggggaatgcaaggtacttggagtgtgtgtggaaagtaggaattcaagtggagggtgagctagagagaggcgcaatcgagagagctgtgaagaggttaatggtggatgaagaaggagaagagatgaagagaagagctctaagtttaaaagagaaactcaaagcctctgttttagctcaaggttcttcacataaatcactagatgacttcatcaagactctgtgaaatcatgaattatcaagtagcagtgaaagcagaaacagcggtagtgaaggtagaactgctagcgagagtggaagccgagctagttactaggtcagctatgtatatatgtatatgtattttctagtgaacgaaatagggaatgtggaatcagtgtcttagctttaggagttcagcaatttgcctttagggcatgtaaataaatcttgtgttgttctgttcttttgaaggtcacaccatttctgtcaaactaggtacttcttgaaatcctgtttcgtgtgcgtaatgttatagaagcagaaaataatgcacattttttctcaatcataactaagatagatatcgccgggctgatacaaatggcacattttgagcgtacttttggttttgggattcttatctctaacacaatctgcgaaaaacttgaactacaatcagttctcctgaaaaacagcgatcgtcttataaaccgcgacgggcgtctttgtgattggcacggacgtgattgcggagatccttggataggcaggtataattgcagccacgcattgggcaagaacattgtacgaaaggacactgcttctcatggctagagagctttgtgtatgagatattctttttacacccgtagttggcgtttggacatgacactctagcggcttcaatgactttctccatggctctgcaacgaaattcgtacctaaccggtttttgacaggatgggcaaatgttcttaatttttttccagcacggagtacaagctaggtgaccattaatacactgtagaaatttaagaaccagtgttattatcacaaacaagctaggtgaccattaacttttctttttttatcactcttcttgagcaacaacaactcaaatagaccaattatatattgttctaacctcaattgggcccattatatatttttaacctcggaatgggccgtttatagtatagatccactaagcccacgtcaaagaatcgaacacaaacacgaaccctaacatttggggatttttcgatttgagcaccacgattcactaatttcgttcttgtttccattttgaaaatttgatgaagaagaaatggacaatcacaatgaagaaccaaaaatcgcaccagaacctaatcgttggtacaacattacgttaggaccaacactactcaacaacaatcactcatactctcccaaattctgcactttacgatgtaagtaacaattctcttaatggtatttgtttgttttcgagattcaaatgagaaattcgaaaaatttctggaaatgtttttgtttggtttatgttgaattttgcttgcagatgagtttaaacctgcttcaattgacagtactaaaccaggattgttacataagagtaaagacaataaggttacgttggagtttcaaaacaatcaacttaataaaccaaaagttagatttgatggtgttagtgaggattacaatgacagagataaagatgcaatcctcttctttgatggcgaaaatttccgattggagaagcttcaccgctctgttaagcgtttaaaatgcttacgtgtgcctgatgaatctgcttcagctagtagagtagtaacaaagattgttcctccagttgaaaaaccggtatgaagttttttttcgatctttgcttagttatcgaaacgggttttcgagaagtgttgccgacctttgtgtttgtttctttgttgttgcaggttaagatggcacatattgacattaacaaccctgtagactttgaggaggatgtgaacattgaagatgacaatgaagaagaaactttatcgagaaaggagtttcaaacgggtggccttgacattgacattaaccttccgcatcctgctgaaatggaagatgatgagatagcagttgtagacattaatgatgacgaatcttacaaaggtcttaacgcggcagaagcactcagagcgcaagtaaatgcagaagcgagagaggagtctcgaaagagttcgagttcaggtagcgggagagaaagtgagagtagtgaaagtggagttgagagtagtggtagcggtagtagtagtaccagtgaaagcagaaaaagcggtagtgaaggtggaaccgctagcgagagcggaagccgagatagtctctaggtcagcagtcagctatgtatgtatattatagtgtttgtcattttcatgttaaatcttcttgtcttgtcaataacatagggagatatagtaaaacagtctacaaaagttaactacctcattctggtttgggcggtttacatgatatctttgggagcaaaggctacattgatctcacaggccacggttgcatcagctaaggtcaatcatcgtccaaggagacatcggacatataataaccagattgaagatgtagaggattatatgataagcattaagcacatataattaaaagttttgttagcattgctcaccgtgtaaagactggaacagggtttgtggttggcacggacgtgattgtagagatcatcaagtgagctggtatagttgcagtcacgcattgggcatgaataatgtgcaaaaagacacagatcctcatgcttagagagatttgcgtatgagatagtctctttacacccgtaattggcatttggacatggcactatagctgcttcaatgactttctccatggctctgcaacgaatttctttcccaacccatttttgacaggacgggcaaatgttcttaattttattcctgcacggagtacaagctagatgaccattaatacactataggaagttgaagaaccagtgttattatcacaaccggttgcttagagtatatgattattctagtataaatggattatagcaatagttacactcacagaaaaaaaaagttctgaatttaaaatgctaaaacggcaccgtttagtaaaaaaataaaattatttcttgttttcataacttgtctgcttccatcatctctcccattttatcggagcacgacgatgtctcaagctttactaaattttcagctttcttcttcttctttctcaatccccaaaaccctaattcactctcactctctcaaaaccttgaaaaccccgaaactaaactcacgacaattcttctcacaatgcacagcttcttcttccgatggacccaaaaccttaagaacttgcaaaaactgcaaaacccaattcgatcctctcctcaataacccacgcgcttgtagattccacactgctcatttcggaggtaaaatttgaaaaatcccctctctgatttcggaattaggtttttgaattttggggttcttttgttttaggtgagacaaagaggaaatttgagagtgtatatacaggtggaacaatggatacaccaaattctggaaaagtgttacaatattggcattgttgtggttctgaagatccttttgattctggttgtactgcttctcctcatacaacatatgatgattgattgaagaagaagaaaggaaaagaattttgtgtgtaaaagttacctttatgtattcttttcttgcagataatctttttgtacaaacaacaattttgtgatatgagattcttgttttgttttgtccaaacttgtaactttgcttctcaagtttccgttagttgttgcttcatgttatgtctcttctttgtttattgttcatattctgatattgttgttgctggttgatttttctgacatttggtttctaactttctatatatcattggagtttttcttggcgagagttaggatgggagatcatttagtgttggtggttgatcggttatcaagcgattctggtcttgggacggttaaccgagcagacccgaaagctgactcggttaacgaagatggtgtatctgaatctatatctgcaggagctgatttatgtgagagcaaatttgtacagtgtaggatttgtcatgatgaagatgaagataccaacatggatacgccttgttcttgttctggaacattaaaggttctgtctttaggttgctgttgttttccacaaacagtatcatttctgatttttgattcatattgtcatcaacttttttgcagtttgcacatcataattgcgtccagagatggtgcaatgagaaaggtgatacggtatgcgaaatttgtcgtcaggtataaattctatagcacaatgtaatcatatagtctctgttttgatgaaattgtctcaccaaaccttgttcaaattgcagcaatataaacctggttacacagctccacgacaattgtttcactacacaggcatttctatgaacttcgggtacttttgttcgtcttgctttggtatcctcctttcttcctctgcacaatgtagaaatcttactgagaatcattatctttgttggaaacatcccagtagtgattggggaatcgagggactagatcttcgtaatccttatttcctaacctggggggatgcggatgatgatcatgatctttactcatttcatagccccacaagcttgatttgttgccgtctaattgccttgctagtatgtttcttctctctgtgttcttgagaacatgtatatcgaaaattctgctttgaacacaatgatttgttcatctttcgtgtgcagttcgtccttctgctcttcctgcgccattctcttccagttttactaggtggagtcgatgatttctcgataactttgctcatggtaagctcgataagcaaatgcacaaacatacatatatcctctcttttcctgatttagagaaagaattttgttgttcttttgcagttaccattagtgagaacattaggcatcttgttgattgcttatgtatttttcaagtcattcattgttatacaacgttgcaggcaagagagggtgagaaacaatattctttgaattctaaaatatgatcttgtctttgatattgaaacttaaaacatgtttcgggttatgtgaagctatataacttgttcctttatgctctatttgttcaaaattaggatactagactctctggtttctcgtctgacgaagaaactgcaccgcctcggatattgatggcattgccggaaagacccgagcttcatgttcctgtaaattaagaatcaacattcaatatctcttctccttatatatgttgtttgatttgtatatcatatacacacataactaacccacataataaacgttggtattccaatttaaaaggcaaaagggataaaagagtcctaaaattcacatcttagaaatggagatccttgaacaataacaaccgaggattgtggtcgattcacatgcttccaccagtctcgtaactcttgcactttgttgcataggcctttccattgatacggacaacttggtgcaatcatgacggctacgaaacctagcaaacaagggagaccgaagtatagagccaagtgaggagaaaccgaatagaggaggtggacgaaaatacaaaagccgaacgtgtgacagatgcgtcccacgaagtaagctttagatgctaagacattctcgattgccttaaaccaaaatatgcagctaaataagtttagattttactattaaacgaggttaaatatcagttcgtaatgcttgcattccttcccatagagacagtccaatcatggaagttagataccattggcctacatgtagaccaacgagtagagccaagtagggagaaatacaatagaggagttctaggaagaaaataaagcctatgttgtgactgatgcgtccgaagatgtaggcgagttcacataatgtcacatccctgattgcgccaacccaacaaacgcaacttaataggcgaaaggcaagaacataccggaaattatcaaaatcgttgaataatctttccttacgtgattttcgtggtttctgatagacaagattgcttcaatgttgatgattatcatgacgaagttcatcgcaaagttgtattgtaggttcttgttcatactgcaaccaatataatttaagaggatcagattcagtttaatccatcttatgttacgtaacataacatagtaatgggaaaaaagtaagaaaaatcattgatctagagtctcaccaccaatcacggagaaggctaggagattcatcgaccatagtagaaagaggctttgtagcagcaacattagtattagtcatggcttcttagataattgattggttgctaaagatgcgcaagatataaacttgattatgaggctttgctccgtagttaaaccctaatgcctagagatatataggtctctggacctctggttaacctaatccagtttcatgcctgagatgtttatttagttaatctaacatatcttcttatactaaatttgttttgttgtgtatatctattccaaaaaaataaccattttcttttagaattaggaatatattgtataactttcttaagataatcttatcatacaatttttaatttagaatttgtaactaactctatacgtttcttaagaaatctatcatataaataataataataacaaattgacaatcattttcctttcagctttagtagaaattaaacaaaagttttttcttttagtaaacttttcttttgaaacaaagatggtatactattcttgatgataatcttcttttacatttttattttaaggcttagtaattaattgtacaattttgaaatatactaattttataaatagtaataataatcattttccccctaaacttatattaatcttctaatatatactttttttttctttttcattttctttttagataagcagagaataaataagatatgtctcactagttaacaagtcagttgggattttctctaagaatttatctttttaattaatatttaataataaaaaattcccaaaagattataggagataaaaagagaaacaccattaaaaaaaggagataaaaagagttaaaccatatctgtaactctgacatatgcgttccactaaatatttcaagtacgattcttttgatcaacagcaactgattgtggttgattcacaaacttccaccagtctcgtagttcgcatagaagcagcccagtgatggtactggtagctatgtaccatagccaataaggtagacaaaagtgtagaacgacgaatagagccaagcgggtagagatacaatagaggagatgaaggaaaataacaaagccaatattgttacagatgcgtcccatgacgtaggctccctcacataatgacaaatctgtgattcccaaaatccaaaaaatgcaactcaatatgccaaaaatgaaataaagaggaatgaaaccaatccaagattcagcaacttcgttaaatggaatcttggtgaatttcatatacaagattgctgcaatgttgaggattataatggagctgttcatcgcaatgtcatatcgtacgttcgtcttcatcctgcaaccaacaattaaaacagtttacatatgttatgtttcgttataatattgtcatgtaagaaaaaaaggaaaaatcaatgatatggagtctcaccaccatacacggagggggctaggagattcatggacgattgttgcagtaggcttattagcagacacattagtattagtcatggcttcttcaataatttattggatgctaaagatgcgcaagaaaactttataatgtgggtttgctccattgttaaaccctattgcctatatatataagtctctggatatctgtattgtatgttaacctaatccaatttgttaatatattctaaaagaaaaaggattattcttatagaaggagtttattttataattctattaagataatctcattatacgaattttattttatattagtaataaatactataattgtttaaattaacgatattaattgtattagtcatggcttcagatagaataaaattttactcggtagccgagaaagatagagttgatgttttacgactgcaatatttgtgtagttgatccaccaaaacatgcaaatttgtttagccaaatgcgatgtagggaaaatatatctctaagttaaatgttataagctttgataaattgaaaccataatttttatatataattaatttaagattatataacaattgttattatttatatgtgatgtaatgaccacaataatagctatactttaggtaacctttaaaaaatgaaaccaaaaaattaggaatcatgtatatataaaagtaaggtttcactctttccttattggtccacttggcaatataagttttttttttaaaattcttaataaataataaaaattgaacacacagtttaatataaaactgaaatcataaaaatatgtatcaattatatttttccactctactttattcaacacacaataaattaaaaattaactcccacaatttatttccattctcatatttcatattgttttgtttacttttaagtttttttctttgttgttgttatgagtttaaaaatattattgtaaaagcttaattctaaactttaattttagattatgaaccttacattgttattttgtttaaataatttttttgaatttatatatattaaaataagtttagttcttttaaaaaaatcattattgtgtatatcatattacataaatttgttgtttataatgaataatttgtaaagctctcaaaaaaatatttggaattactttcaattaaagagagcaaattaattttattttaaatataaatttcaatttcattatggaatatggctagcttgaaataagtgttgttttgttgattttgaactcactacatttttttttcttttgttctaatttatatgaattatgtggtgtaaataataattattaataaatataaaattaaatttcaattagcatgtcaatatgagatcatcacatttttactttcaaaataaataatatatactgaagaaatttctacacatttttagcatgtcaagcacaccactatacattaaccgtttacccaaaagtaactgtaactacactcccaatctagagaaaaatatagaaaaaatgtttgtctcatattttgtaaaaagatacattttatttaatcttgataaaatatataattaaacctaaatttaaaatataattaaggatacaatgtatatagataaaagaccgcacatgatggcttctcatatactctcatataaaaaatcttaaaatttaagaaaagataaacttggaaaacataaatattaaatcatttcaatttgtgactcatattaaagaatctaatttttttgcatcaatataataaagtcttttataatgtattatttggtcctaaattgttttttaatgtgtatataacatagattattgtaatttgtattatagggcctttcaataattttgacttataggttttaaaacaattattgaaaaggtcattaaataaatgatagaaaaaattaaacaacctaaattttaaatataattaaggatatagtgtctatatagataaaagactgtacatgatgacttctcaaatactcttatataaaaaaaattaaaatttaatatgtcactcatataaaagaatttagaaaccaattataggtttaacaacaatgattggaaaggtcattaaatgtaagtaatgataaaaaaacaattaaacaatttcctaatatgtgtgaactaatgttgatcatgttttcttcagaaactaagaattgagcttccttatactaaaaatcagaaaaaaaaataagttttgttttacagagcatataagtcaacaaaatttggtaactatttatagcgatattgggtaaatgaatgataattttgatttaaaatttttaaaatataaataaaaggtatatataatttgaatttaatttaattaacaaagataataaatattctagttattttaaggggtaattcaaaatatttaatttggaaagacaaataaatagttctataattattgtggtcatacatgttattatcaatttttgagactaactaaaacacttgcctcaatttttgtattttatgaatgatcaaaactttgattcttgctttctcttgcaattgattctactatccatagtatgctagcttttttttcatatccaaaaaatggtttaaagtgtatttgatgcctaccaaaaaaaacaactaacaaaaatatataagtaagactcaatataaccattttagaaactttaaacaatgtagaatcatttacaaaaacttacaaattgataaggttgagactcttgcccgttttgcttcctctttcatatccatttatggtttaaagtgcatttgatgcctactactacaaaaaaaaaaaaaaagatgcaaaaatttctcgatttacatttagaacaaaacaaaaacatgtaagtaaaactcaatataaccattttagaaacattaaacaatatgaaatcattcacaaaaactaaaagaaaaagaaaaaaaaactgaaagctaatatgttggtgataccgtaaatgttggtgatacagcaagccattttccatttttctttcagtaattgagtaacttcaattgtcaaaggaaacaaaagcacttgtaaatatgtgtgtgttgcgtctgtgtaaatatttgctatttatattagaatagtagattgttagggtataactaataaaggttaataattatagaagaacgtttacaatacgaacattacatgaataacaaactaataattttttttgttttttaaacgttacatgaaacattgagtattcaatctcattgagccactaatgaccttaatgaggtttaattgcatggtgtttaataattggtcatttgagtcttttttaatcaggtgagctttatatctacttctcatttatttcttattaaatcatatttttaaaagcatatgtagtatttaaatattgataagtgatacatcataaaatatatactataattactattcttttatcattgttttgaataaatcacttacaaaataaaataatttggaactattatgtatgagtttatgtcaacaaattattttgtaatttactttatcatacatttattttgtaaaattaagatatgatatgtttattaatatatacatgcataaataacatagaaaaagaaaaactgttaaaatatgagcaaatgtaagatatcaaattttaacagattttttaaaattttaatcatataatattgaaacaaaattattttaattaattattgtttaaaagaactaaaaatggaaaaaaaaatcttataaaattggagaattatttatagttgtgaactattaatgtgcagtctaaaacataataacatgtcaaaatttaaaagatttgattttgtaattagtatagagagttgcaattatgctagaaaaaaatcatttcaaaattgtagtttaatatgtagtaattttatagtttaatgactatttttctaaatatatgatatatctattaataaattattgtagtcaaactacaattaatgataagtacacatgtgatcaaagtagagtgccaaatgtcgcattggtaggcaaagttagaaaaaaccttcttttatataataagatatatatatatagatatatgtatagagttaagcggtgacgttgcctaaaaggctaaaataatgcgtgaagtgacatgtatgttagattctctgtttgatctttctgataaagaaaaggtaagtttctgatgaatcatgtaaacaaaacatattttcattaaagcttcgccaagttttccagtaattgcaaaatgacaaactttttttttaattaggtgtatacaatgtacatatttattcctttatggttattacacactgaaaacgacacacataacattgatgaaagaaaacatgcacttgaccagagaaaagaaaagacttgaccaaaagtaaaatgacttgacataaaaaagaagaagagaacatgactacgtaggtcattatcattcattttcttttaagtacgatatagtataccacttgtttcttccacatcttaaaatcaattgggtgcatggtgagtttcttagccagttgattgaatagctcattgactgcaccatctccaaaatgtttttcgacgattgttgtgagaaaagctcgaaacgtggaagtgataaagtcgttgggttaatggcgtatcgtctaatggatggcttatagtctccatcagctcaattgtgaagcttccattatgttcaatcactcccctcacttcactaaattgaggaaaatacataggcaaactgaataattcgatcttttcctcgcttgttactccctacgatataaaaacaaacagatgattactagtcatttcttatctcttacgcattcatgaaacaattcatgaaacttaacgttatataagacttttgtattatgaaaataaaaataaaaaagttttggattgtatatcttaccaatttagccatatccataagacaatcaccgacggtatcgaacacattaccctgccatgtctcatacatgggcacgccatccggcacattgacctaaaataatcattaatccaccaggcacaagttcttccgctctagcgtcaataaaagcccccatgtcttctatgaactgaactttgtaagccttggtcacatcttctaataaattgttacagtgaatgtaatgtttgttccaggccggagatttcttgtcacatacatatttgggaactttagaaagccaatgagttgtgtaagacgtgtttccgatgtggatgctgtttcttggtaacactcggccatagaaggaccctggaactccaaccgagaaatattcccgttccgtggaaggagactgggttctaaagagtgtgttgaagtcattgttgggttgatcgttgaagaaaacttgaaattcgagaggcaaaaggctattttcgttgttttccttcaagtgtttgtaaagaagtctttcgacactccaagataacttattatatagtaccctttattacatagtacccttttaaacaaagctttatttttataaaattttatttaaattagacagattcgatatgtctaaaaattatggtgttaataaaaataataaaatgaaggtttaacccatataaaagcgacaagtcaataatatttaaaaacataataaatgttaattcaaatctgtcccgtcatataacctgtccagcaatatagtctgtctcatgctactttttcattatatcattatatcattattgtactttttcatgattcttcttcattatatcattattgtatttattttcgtttaagtactatacaatacaccacttgctttttccgcatttcaaaatcaattgggtgattggagagttttttagcaagtcgatagaatagctcatcaaccacaccgtctccaaaatgtttttctatgattgtagtgagaaaagctcgaaacgtggaagtgatgaagtcgttggttaatggcttaccctccaatggatgacttgtggtctccatcagctcaatcgtaaagcttccatttttctcaatctctccctttaattcactaaattgaggaaaatatactggcaaactaaataaatcgatcttttcctcgcttgttattccctaaaaaaaagataactaatgattactaaaaacaatcatgctttttaaatatactaaaaagataattatcttaccgatttagccatatccataagacaatcaccgatggtgtccatcacataaccctgccatgtctcatacaaggacacaccatcaggcaaacattctcctattacaatcattagtcctccagggacaagttcctccgctctagcatcaaggaaaatctccatgtcttttatgaactggaccttgtaagccttggtaacttcttccaacaaattattacattgaatgtaatttttgttccaagccatagatttcttgtcacatacgttatcaggaactttcgagagccagtgagtcgtgtatgaagtgtgtccgatgtggatgctgtttcttggtaacacccgaccatagaaagagcctggaactccgactgagaaatattcgcgttctggagaaagaggttgggttctaaagagtgtgttgaagtcattggtgggttgatcattgaagaaaacttggaactctagtggcacaaggctattttcggtactttcttccaagcgtttggatttcactgtatcaatgatactttgagcaacatggaacgtgttcggtccaatagaacatccaaaatccgcaattctaaaagtaccaaaatcagaacttagttggaggtcgagcttttcaaagatgcatcgtcttgtcttttctacagcgctacttatagctgctttctgtatcatacataataattttagctagttaatatatgtattgcatatacatgttttggctcaaattacaattacaaaaaaaatcgcataacatggtgaaattctagaaaaaaaaaagcatataatcatgtggagtttgtcaaaatggactaatcagacggctgctctgataaatgataatcatcaaaatatatcaaatatacagaattcaacaatatatcataacattacttggtatgaagaattatggatgtaactgtgttgatcgtgaccgctgctcatcgggtacatgtgagaagatgttgacattgcttcgtatttatgacttgtgaacttataaatctcttacaacgttagtttctgtttatatataaagaaagagttgaaaacaaattgcattttttaaaggttggacacagctaagcattcagtaagacaattaatagtgtgtatttgctgaagaatttaaataaattttaattgttatcgggagttttaaaaaatataactgatagtaacacagaagttgaccaaaccaaaagataaaataaaaaatgtaggagcatccctcattgctcacatgggtaacaattgtttaattattttagctcaaaaatttcgtttgttcaatgatattgaaaataatatttgttaatttataggttagagacatcgaagctttcacgtctacgatctggcattgcggcaaaaagagattagatattctggaatttaattttaggatatttttgatgttttggacgcaaaatttacaatagttggtattcaaatttaaatctgattccgtaagaaaatattataattaagtacattgattcaagaattagaaaaataaaaataactgtaaatgaaagattgatataagaatttggaaaattagttctattattttattaaaatatcaattaactgttatatttatttatatactatgttttaggtatttttcgttatatgtggatcaaacaagcaacatattacgaaacttggttggacaccatgaaacttaaaaaacaaactgaaaacgtgataacatgcggcgtcattaattagctgtttaaagcatgatcttttaatgtagtatactatgcatagtaatcgaaactctctcggacacgattattgagacaactcaaaagctaaagtttcccgaatgtttgaagaagatcggcattatgatcccgtctccaaggagcgatggttaccgaaacttctcaaacattttgtctaagcctcttctgattaccaagctctctcaagtgcacattctcagtttcaggggtaattaccaagcatctacaagcttgaagaagatcggcattataaccatacctccaaggagtgatggttaccgaagcttcttcaatatttcttatctcgcagcctcctccgtagagcattgtaccaaaagctcgtatgcgttattagcgcgagctgtttatgaccaccagttggtcgaggatttcgcggagttcatctccatggtcgaatccgctatggtttcaaaagacttttcaaacattgcaagcttctctaagttgagcatctctttagaaaactcatggagcctttatcgttatctttattgccattgtattatttcagttttagtttgtatgaactttcctcttatgaggctttaagtgaatacaaatttgtttgacaaaaaaataaaataaaaacatgatcttttatgatttaataattgacgagaaaagtggtcgaaatgaagacttagtctcaaggacaataaatgttctaaactacctaaggacagatgggcaaaaacaatcaaggatatcaagcaaaattaaagaaatggtcggacatgacaagatgggttgagccatggttaaaccaggttattagaagataacatgattcaagtggttcaggtaatcaggtaactaggtttagcgagccctggtgttgtataagtcaatgtcaagcatggtagaaattgagcaaggcttacgagaagtgatcttagagatatataattgatgcttcatgctaaagtatatcctttataaaaaaatgtctcgagttttagaatccaataaaaacatcaaaactcatatttgattgtttaatcctttagataaaaaccaaaaaaaaaaaacagccattttgttttcttctgagctagattttaatttctgaattcattgcttagctacatattctgcgggatcgcgataccttaaaaggttcagctaatttcatgcacgtgcgtttgcagctattctaattgtgtgtatgtaaggtgaaaacatgaactagcatcaaaggaaaaatttatgatgatttgcaaattaagttagtaaagaagtctttcgacactcctaaatttgctcaatgcccgtcaaacgagagtggggttcaatttccatgggcttgggagccaacagatatatgatgatacaatttgatagtcatgattttacaatgatatcagagccaattctagatagatatagagtgatgtgggctcataccaacataatctttttttttagcctttaagtaagaaataattatgaacgagtcggcataaagaaatgagaacagaagatataaaacagtttaaatcaaccttagaatttaagttatataaagtataaattaacataataaattattttttaggtgacaactttcctcgaggggaacgtagaatcgtggttattaagaccatctccatcactgagaaattcaattttataaaataatataaattttattattatttttattgtttaattttttaattattatttgaaccaatcagaacaaaataaaagtagaaatgagtttcttaaagtttctcacgttgaaaaacgtctctgttctctctcctcctttttctaaattttttattttgttttaatagagagtctctcctctagaaactcccaatagagattctagttctggttatacatagacattagcgaggtggatcttaccgtaactttttaccgtaactttttattgtttacgtgtcgtctcgcaaatatcattctatttttatttttgcatctctctattcttatctaactcgatcgtgatctgttttcacttagattttcactctttttttttttctttttttggtatttttatgtgacggaaatagcatttgtggtggataaagagatgaagctggatcactctttaagtctttgttacaataatttataacgaacaggagaattcatattcaaacggctgctctgataaatgataatcatcaaaatatatcaaatatacaagaagagaattcaacaatatatcataacattacttggtatgaagaattgtggatgtaactgtgttgatcgtgaccgctgctcatggggtacatgtgagaagatgttgacattcctccatatttgtgacttgtgagcttataaatctcttaaaacgttagtttctatttatatataaagaaagagttgaaaacagatttgcatttttcaatgaaataaataaaaatatgaaatgaaatattgaataaaataaaacattgatgtgaaatgtgtggtgtgaagttatgatgtgaagtgtatggtgtatgtaaatatgtatgaaagtttagtcggagaaccaaacggaaatgtttttgagtattatgttttgtatccaagcagctcgactcccacaaccctagatatagaagattttcagttgagctacatgtttggtcccccaccaagttaaggaccatcattctcattacaagaatttgaagaaaacaatatcaaacactcatggaagataagaaatccgaacacaaaaaatccagataggtcgataacacaaatcagtgcagcagaagcaacattatattagcaatcagaaaacgcagcagcccagaactacttcttaagccaaattgataaaaagatattcatcatagacctttctatcaaagaaatcaccaaacgagttttctttctatggtcaagtgacgatttttctttctatggtcaagtgttaccaaaaaatagcatccaaataggacacacttactacacgactcattgctttccaaagttcctgaactcatatatatgtaacaagaaatctctcacttggaacaaaacttacattcattgtaataataaagtaatcaaattttatttctccctttgtagggaaaaacaagcaaggaaaaggttcagttcttcaacttgcctatatattttccgcgatttagggggttgtattcaaattagaattttaagtgatttgagtttttttgagtttttaaataattatgataattttagggaagttcatatgatttttgtaaaatctcattcaaatctcaccttaaaccatgagatttggatttctgtattcttaactaaaaaattcctctcaaatcctccaaaatcattaaaattcaaatccacaaattattttcaataacagtggattttaaggtggatttcgaaatcattagttcaataacactaaatttcatgagactttttaaaatccatgtttgaataacataggatttataaattccgcacaaatcttttaaaatttcacattcaattttggacatagttttgagagcaagtataattggcctacatttcaaaaaatagttgggttcacttttagaggtaaaccatttcattcacctttttcattctagctaatcaaaagaacaattctttctaatgcccttttcacactactccttttcaattctacccttttctatttaccattttcatttataccctatttaaatttttaataaccattttacccctatttgtaaattgatttaggttaacaaaatgaaatattaatatttttcgtctaaaatattttaaaataaaatttctcgccaaaaatttccgaaaaaaaaatttcccgccaaaaattttcgaaaaaagaatttcccgccaaaaaaagttttcgaaaacatttttcccgtaaaaattttttttttggcgggaaatagatttacaagggattttaaaagggttttaaaatattttgaaagatttagggtttaaaagatttacaagagattttaaaagggttttaaaagatttacaagggattttaaagggctttaaaagacttacaagagtttttttaaagatatgtaaatggtttaaaagtgttttaaaatatttacaagagatttttaaagggttttaaaagatgtaaaagagtttttaaaagattttaaaagaaattataagaaaatcctttaaaaactcttgtaaatcttttaaaaaccttttgtaaaggtttagaagagatttaaaatggttcaaaaagagttgtaaatgttttaaatacttacaattttttttctaagagttaaaaaatgcttgtaaagactttataagagttttaaaaggatttacaaaggtttaaaatccttgtaaatgcttttaaaactctttaaaaactcttgtaaatcatgttttacccttttataagcttttaaaatccttgtaaatcattatataccacttacttatcttttaaaaacgattgtaaaccatgcaaaccttttttaaaatctcttgtaaatcattctttgacacttacttatgctttaaaaacgattgtaaatcatgttaaccccttttaaaatcccttgtaaatcattcaatgtcacttacttatgctttaaaacgattgtaaatcatacaaacacttttaaaatcccttgtaaatcattctatgccacttacttatgctttaaaaacgattgtaaatcatgttttacccttttataagcttttaaaatcccttgtaaataattccaataccacttacttatacttaaaaaaacattgtaaaccatgctaaccctttttaaaaatctttgtaaatcattctatgccacttacttatgctttaaaaacgattgtaaatcatgttttacccttttataagcttttcaaatcccttgtaaatcattcaatgccacttacttatgctacaaaacgattgtaaaccatgctaaccctttttaaatcccttataaatcattctatgtcacttacttatgctttaaaacgattgtaaatcatgttttaccctttaataagcttttaacatcccttgtaaatcattcaatgccacttacttatgcttaaaaaacgattgtaaatcttgtaaaactattgtaaaaagttttaaaatgatttacaaaggtttaaaaaggggttttaaagtatttacctatgtttttaaagactttataaatattttaagaggttttaaaatgatttacaagggtttttagcaactaccaaagcttttaaaaaaccttgtaaagttttttaaaagagtttttaaaaaactttacaaggttttttaaaagagtttttaaaaaatttacaaggatttttaaaagcatttttttggctgggaaaaaaaatttacgagaaaaaaatttggcgggaaaattttttttggcgggatttttttttttggtgggaaaaaaagtttggcagaaatgttttttggcgggaaaaataatttttggcgccaaaaatttggcgggaaactatcagtttccaattacatgttcttattagatgagggtaatttggtcattctgttcaagggaagagatatttttaaaaatgaataatataaaagggtattattacaaaaaggtagtaaaaaaaggatagttttgtaaatctgcctaatcaaaatctgctacttactaaaataaaattgaattcatttaagttataaagtttaatccacctcaaaaatgaacttttatatcagttttgagttgacaaaaaagagttagggtttagattttatgattaaacaaagtgaaatctctgtttgagtttataaacatttagattttataattaaacgaggttaaatattggtttaggtttagaaaaaattgttagggtttagattttacattttaacaagtttaagtatcggtttggagtttacaaaggagaagtaaagttagattttgtaattaaacgaaattatatatatcagtttggattaatagaagagtggttggattttacattttatagattttatagttaaatgtttttttattcatttattagctggcatattccgattggctgaaacaaaagagtgaataacattagtagaaatgaaccaaagtattctttgatttcaatttcttttcctttggtctcttctaatgaaaaattgttactactatgaattgaaaattttacttttttaaaattctacttttgttttcactaaatctttatactggtataatattacacattattctaattatatttttactctattcaacagttacacatacaatattgtcaattaattgttaagtgaaaacttttaactaaatctaaatttagcccatgggccttaaaacttaagtattattagttaaaatggcctcgatttcaattccttttatatttccctcttctaattgaggttttaaagctctcccgccaatatagttgaccggtaactaccggttattagccttataccaaccggttaaaaaaaaaccacccaataactggcaaattgaaatcgctctaaccacgaaccgtctctgaatctgaccgaccaccattcttctcgcgccggcgatttcactgtttacagagaaatctcgagaaccctaacctgggtctctctagatttctttgaaatttcgagaatctagggtttcaaactaaaatcgagtccttgagttttcccaatttaaatcgttatgagctctatcaatatcactaacgtcaccgtcttggacaatcctgctccgtttgtgaatccattccagttcgagatttcttacgaatgcttgacctctctcaaagacggtaccttttactttccctgatcctctatctttcgaaaattgatactatgttgatttattttcgattttgttattatattcttcggaaccgattgaagaatgaagaacctgtgattggatatgtgaataatgctacaaaagattcaatttttggggttttaaagtatgatttgtagctaattgacttcactgtgttagggttttcttgcatttgtatgagctcacacacgatctgtctcgagcttagtgtactctctttggcttagaagttggttatatgtctgcaattgttcgtattcaacattgtagttgtggtatttaggagccttgtctttgctctatgaggattgtttactgtgaatggttattttgtatggcttatctttcggatgtgttggctctcaaatgagatttgacctctggctcagtggctatgtactgtaatttcacacattactagttgcaagttatcggttcttgatcatggcagagaattattgttctagatatcattatgtgtgtgttgcttatccttctgcaataaaagcgtaaaaccgttttgcctataccaactggttaagtttctgtgctttgtaaattttcgtgatttctagtcatgatcacattctggtaagcctgatgtgtgagataacgtttctttggttttgctacagatttggaatggaagcttatatacgtagggtcagctgaagacgaaacgtatgatcaagttttggaaagtgttcttgttggtcctgttaacgttgggaactatcgatttgtgttgcaggtagtgtatgattagttttattcttctctctttgtttctggtggtttaggtacataatcttagtctaaactttttgtttgattaaatgataggctgactctccagatccgttaaagattcgtgaggaagatattattggtgttactgtgttattgttgacttgctcatacatggatcaagagtttataagagttggctattatgtgaacaatgactatgatgatgaacagctcagggaagagcctcctaccaaggttttgattgataaggtccaaaggaacatactcacagacaaacctagagtaactaagttccctatcaactttcatcctgagaatgagcagactcttggtgatgggcctgcacctactgaaccatttgctgattctgttgtaaatggagaagctccggtgtttcttgagcagccacaaaagcttcaggagatagaacaatttgatgattctgatgtaaatggagaagctatagcgttgcttgatcagccacaaaatctccaggagacatgattcttgtttgactcaagcttaactggaaactggattagaactatcatctcaattctaatcgaaagatttgtatttttgtttcttttatctggaacttgaactccagttgtgttactgtttgtagaaatttaagttcttcttgcaacatccctatactgtgctatgttcagagttcttagttcccattcttcttgttatcctagtggctaatgcaagcagatcattgcaaacactaacaattcacttgaagatagttgtttaagaaatgcacttattctcaaaattaggtatggcttagtgacccataaaactttcgtttagtccacgtttaaagaatttttcaaaatttaaaggtaagacaatccatttcaacaattttctcacaagcatcacatttaaaaacatggtctatgggtgagttgttcttctgatttattctgtctttcaacttagtttttcttcccaatcagtttccaccaagataatttcactgcacaatcaaagccataatacaatacatagcaaatacatcaaatattaagctacaaacaatcaaatgctttttagtttaatgtttttgaaatcttaacggttattagctaggaaacacttccatcaagaaatttccagtctaacaaaagtatttataaacttttaaggaactagaatatagttgaaaaatgcttaatggtcgacctatattcatccatatgtacactataatacaatgttattatactactattgttgtccatatagaggttcaaagaaaatcactttgtacttagagtcgagctcaaactctccaatgtcgataaaatgctcagtggttagatagtaaagacattgctgcaaaagaaacaaacgaacaagttatctaatcaagcatcacataaactgttttgtctcaagtaaaatcaatcaaaacattaactgaatacctgttgaatctgatctatatcaatcagatctttcattgctggcacattcacattagcagatgtaaacacttgttgatgcactacatcatgtggcacctcgttgtggcgcgtggctttcacggaaaacgtatgcgactggttattttttattcaagtttcatgagcccaaataagtatacatgttccaacttgtaaagttaatttcacaattaactacttttcctctttagggttcttgattaagtagtgaatctagttatattgataatctctaaaatgatagctagttattatttgttacggatcaatcttgatatatatatatggattttaaaggaattttagaatttctgaacccatgaaggcctcaaatatatcaccagtctagatggtctagcgagagcatgacctttcagaaataactgtccacatactaaactttattttctgatagatattatcaaccattcatagttctagaatttttggcaacattaccaaagaattaactctactaggaaaatagacatggaagtttttttcaagaatcataatgtcaagagagtggagagtttcatcatgccaaagtaggttcttgcgcctatcctctgaatggtgaagcattatgatggacatagagattcttagaactaataacactttgacgcatagttgtttgaagattatcttagaattcctttaaaatccaaacatatgatattcttgaatctgaatttggtatagtgatctgatttcactaactagaggacatgcttccagagttccaagtccatttcgccagtcctttaaagagacttctctcttttcttcgagaatccttgcgtttataattataagtaatcacactctgccagaacatcgttagtgtgctcctcctctagacacgcattttaggtctatctcgttttcagagagatagaagtgccttcaactacactccttggaagaaaagtagctcggcagtcaccggcctagtcctctttcttgtcctatgtgatcgtcaccgcttctcttagagttccaatacaactccggaaaatggtctttctaaatagcagattaggcattagatcgtcttgactagaacccataacatttgccccactagtcctgtattaatggcacttcgtctagttacattgacaacattttgaattgagcgtttaaattttatcctcccggagactatcctaatatatcgtactaataagataagatactgactccaagagacggtcgaatgagctaaaaattcaccaagcgtctacaaaaatctagcttggttcaccctgtcaaatcacttgatggctaatattgagtaaacaacgttctcatgataaacaaattccatcgtccaggatctagagaagttcattt

SEQ ID NO: 1104 - DNA, 38089 bp, Arabidopsis thaliana
gttttaccgaccaacttggttataactaaagtttgactacctgcggaagtttgtcgatgaagttactagcgttggcgagcttaagtgcggttctaatttcttggtcggacgcatcttttttgccgtaaacaatgttctccctaattgtggtagcaaatagtataggttcttggcttacgagaccaatcttacttctgatccatttcacttgaaatttctttaagtcaattccatctattaaaacttctcctgattccggatcgtagaacctctcaattaaactgatcacagttgattttccgctaccgctctgtcccaccaaagccacggtcatgccattcggtacagtcaacgaaaatccaacaaatatctgcacgtcaggtctagccggatatcgaaagtacacgtctcttagctcaatgtcacctttaatttcttctaaaacctcaccactcatgtcataagcatcgatctttggttttcttttgatagtctcaaacattttgtaagctgcagctgttccggccgcaaaagagttaagagaaggcaatgtctgccccaacgccctacgaagtgaattgcatgtgtaaaaaattagggctatcagtatcacaagatttcttcaaggacaagtaatcgttttactcacattcctccagtcaagattgacgtaatcacgttcatgacttgacctccagtatatcctttctctattatctgcctagcaccgtaccaaatcgcaaaaccataagtacaatataccacaaccatcattatcccaatgcctagaccggagtatagcccttgtttaaccatagatttgtaggctatctcaagcttcttctcatattttcccattgattgtttctccccagtgaaagccacaacctaaataagaaaaagaacatcaaaatattgaaatgtaacatgaatctatgtagttctaaaagaccgcggaactaactgttctaattgacccaacggcttgttgtactacgtttccagcttctgtgtaagccagttgaacacgttgagccttttttgacatgatataggtcattgctccacctgtgcccacgatcagaggaacgcacggaagaagagccaatgtgagtttcattccaactataaaagcaaccgtgaatccaccaacgaatgacgaaacgagctgtgtgaatttcccaacctaaggaaatcaaagccgttaattaaaataagaaaagtttaagcaacttgcgctgcaagaaagatccgatagtgtagaattcattaaaaccttttctcccatggaatcttgaataagaatggtgtctcctgacattcttccgatgacttcaccggtatttgtctcagtatcgaaaaatccaatgtcttgtcttaaaattgtttttaggtatagacggcggattctagtggattgacgctccccagttaccatccagcatgagacctctgcggagaaacgaataagttctttgtaaacaagttagctaggctaaggatgaaaagagaagaaaaacatagtttgtggcttacgcaggaaggacacaacaccggcgtaggctgcaagataaagaaacttcacagcaacctgaaattaattaagaattaaatcgatataaaccgtaacatttgtttcatgcatgcactgactaatgagtataagtaaatatataaatcaaacaaatggaaaacaatttaaagatgaattaacaaaaagaaaattttactattacgttttacaaatttaaaagaacaataatatagaagacaaattttggtgaacctgatgatttacatttaaactaaaacatataaatatattagtgatttcgcatatactacacaaaccaacagtaattaggtgtaggacacctccattggtgggatggaggaatgtatctcaccaaattctattaataaaaagtaataattgaagagaaagagaccctttcttaaattaaccattgaatgacacatgtcatgtaaccattgattaaactattaaaatacaattaagaagaaattataatatttttgtttttttggaaaaattctcatcgtttttaacgatggagctgctttaagcctctaatttcagttaaaatgatatcagtgattaacaactaacaagaatcgtaacattttaccaacagtaaaaactaatttgaagtcctaaccttggagacttctttaaacacgtgatcatgatcagagaaaccaaaaacgttaatgagctgccccatgagtattgacataaacggctgagttaagccgttggccatggcggagagggtcccgatgaccattaaaacgatgtcgtaccgatctgcaaacgtgaaaagcttgtaaaacgctattctctgatttcctcctcctccatttttcttcttcttcgctttctccgccatttgtttctcttgcctctttggttaacctatttattggttaaacagataatttgagtttttttttttaatctgtaaatcgaaaaattttggttatagagggagagtgagatttttcagattcaccctttggactttataaactcagtttcataagttttactacagagattttacatttccatttaaaatttatattattttctataattgtgtatggtagatttcaagaatcttatcaccaacagctgtgattattatttccacattttgatggatttttcatgaatacaacaactttttcctctgcatataaatcaaattatgtttggtagaaaatggtagtactagatactatgtcactatatctattgataatatgttataaaatatgcaaccaaatgtatatctaatttcattaattaattatttttacttaatcctgaaactctttataacgaaatgacatatggcatattaataattcataaagagttatcataagaataaattatgatttaggattatattatgtgtactatatcatataattaattaatatttatcttaaaatattgatacaaacaaatagaaactaaagttaccgtgttataaaacttttataactaaaacttttaagaaaatagtttattattcaaactaaaaccatatatataatacgaatcacatatattttttctaaaaaatttcatctcgcttctatgattaaactacatgaaaaaatatttttaattccacaaatcagatatatactatagcaaaaatgaaataggttatcgtatttaaattttgtaactaaatttgattctgatatagtacgtatcaagttatgtatttacaccgaaaatagtattacttcatgttttttttttgctacaatcagtgtattattacttcatgcatgtttcttacaactgaaaacataaatagtcttaggcatttctaccaaattcttttgataattgtgatgtcatttaattgaaatcaaacaatatatgaatgtttataaccatgaaagagttaaaaacttataaattagttgctttcattaccaagttgtgacagctatcatattacaaatgaatatgtgacatataaatataaacatggtgaagtgaaaaggggtatattaatatctatgcatagaagatgaagaaattaagaatttatgcataactattagttatttaggtaagtatgaaggagaaataatattaaaccaaaaatatccttttcttttaaattaattacaaaaatgccattgaataaaaataattgtaatatattgatgataagtatataactatttgtttaacgtgctaaaaactatgatatcgcgataagtttacaaattctttgttaaaaaatatttatcgatttaaaataataaatctatatttttatttatgtatattcaacacaataaaaggggattagactttttttgctatattattacgttagatactttgctaaatgaaacattagtacgttacaattatttttaccgtacttttatgtcataatgaatgaaagagtaaaatatattgacaagtttatataatatattgtataatttagtatgttaaaaataaatttaacacattactaattgtataccttcttaacattcttcttatcgcgatatcatatgttttaacataatttttttttacttacatgcatatatatattattatcacgttaatctaatagataatcatctaattcataatataatatttttgaagaaattgatgataaaaatatcgataactattttattacattgctaactaatttgatatatgtaataagggcatttttgtctaacttacataaattatagagagaaaactaattatgtagaaaacattagtatattcttaatttttgattcttaatagtgatattatccaagtgaaaatgtcagttttaaatttaatagcattttcatatattaacaaagttaaggttgttgttcacaaaaaaaaaaaaaaaccaaagttaaggttacaaagcattccttatggtcaaaaattacatccaagaggttttcttatagagaaaactctaaaggatctctccttcctcaagatcgtccattctcattgcatcaaatttttctgacccgatcacttccagttccggacaataatcatttttcaaaaccagacccaactcttcaagtaacaaccgagcttttgtcagactaaagcagccacagactttaacgaattttttcttcaatttcgagtggttgttccgttcaaaatcgaagccttttttcatctgtagacatgtttacagatattagaatcatcgttcttcaatatgttaaatcagggttttaaaaaactgcaaaaccggtttataaaattccgcaaaatacctttgctatttcaagccgttgactctcacgtttctgtttcaactcgtcttgtgccctcattcgttcagcaaccttagcagctctcatctcggcttcaattctagctttctctgcatattttgtgaaagaaacgtaagaggcaaacatcgaaaagtttgagactttattttactttcataagaacacgtagtagtgtaccttcacgttgtgctctttccatctgttccttttctatctgtattctaatcagatcagctttgttattctgtcaataaaaaaaaagacatcaatttcagtaaaacatcataagctgtcgaaagtctctgtttaggtaattgggattaagaaagtaatgaaacctggccaaggactattctgtgtttagcttttatgatggttcctgcatattgagctttgagtattgcagcacgaagagctttctcaggaggtaccggcggcagagcaggaaaagccgttttcaactctgtagcaattataaaatggtattaagaaaccaaactatacaaaaaagaggaattctacagattcgattaaactcataagagaggaataataacaacttaccattacccaacagatcactgtttgaaggtttatcaagctgagacttgagactaccatttctctccttctttgaagtgtcagacccttcattgatatagaatttaaaagtaaactgttagaaagaagtgataatagaataacaagtgcgaatgaaactatgaaagatagctttagatttcttaccattagattgaggatctaactcgctcgcttgtgcacctgaaatgttctttaattgacaatcctgtttgacaagagcattgaaacataaatccctattgttagtgacaagactaaaaggaaattaaatttgacagagatcaagaaagaatctgtatataccgttaacgaacaaacgtcacttccaaatgagctacaggacttgaggcatatgcaaattatcctaccacatttacaggttgctaatgctttaggcgtcacagcaggagtattctttttgctctgcactttcactggcttggacgaaagagaacccttttcggagttctctttagctggtttcgtcaatcccaccccagaggaagctgatgttccagtgctgctccgtctagaacaatcacgttcaactggctgtctcttataaccttctctaacttcattccaggataacctcaaaacctttttcttcatgagtgattcccatctaacctcaaaaatctcattaatctcctttgcaatcgtgtgaacctcattccacagaggattataatgcatcgcattggcaaaagttaaccgaacatccgctgcaaactcatcagcattactgtagacattcttcaaaagtttcgatttgacagtgcctaaatccattggcttttgtatgacattgaagtaatcaggaatctccattttaacaggatcaacaggctccttaaagagccatccaccacggtgctccatcaaaaaacgtaacaatgccaaacattgactagaccaatcacaatccagcctctgcttcttcttaggttgaacttcatctagctctttaggcccaccacgcttctttgatttctccgaggattgagataaatcttcagtcactacatgctcaattttcttcgaactatcagacaacgtttggaatgttctgacagaaccttgaggaccaaactttatcttaatattgggtatcgcaaccattcttacaagaacaaataaaaacctgtaagcaaacataaaaagcgactgaaattagggtttatctacgcgacatcacaagactcgaaattagggtttatacgtcaaaacgaacaaatcgacaaaacaatcagatacccaacaaaattccgactaaataccgactaatttcgttacaaatttctaacgatggaagaagatgaagaaggagtgaattagggtttatcaatttcgcgatcgattaacaaaaaaacttgaaaaaggtactttgagaaacgaattcaatgaaatatatagcgaaaagagtattattttacagagataaaagcttaccagaggaagaatcaatggaacagtatgagagattttggagtatcgagtgtgagagtcagagtgaggaggaggaggaagccaaagcggcgatagaagtttcttttttcttattgagggtttgtgtgttaaaaatacttgagataaaacgcgtattttgtggttaaaaacacttatatatttcactattttgaaaatactacttaaaattatctcaaacgatgtcaaaattaaaatatgacaacaaaatctgttgaataaaaagtgatttaataaaaaaaagctttctttaataaattatttcctatttttttttaataatatatacacggatttttttctctttttttctttacaagtagcggtatttctcgtactacttttttaccgttaattttttctcgtatcatattttttatactcactaaatcttaaaactttgcgaacctcatacttgaatttctttttcttctctttttcttataaacctgttttttacgtaccataaaccattgatggtttctaaacatcgacaattttaccttcaaccaatttttttttagatcgttaagatctcttttaatttaccaaaaatgcggattgagaatgaatggtggtcaaaaaaacaactcttttataaaatatcagcaaacaacaactcaatgataggataagcctaagaatactatttataataacatctcgaaaccctaaatttttttaataatatagattatttaattaaaagataattacataagatatttggataatttcgaaatatcatatttttaggttgccaaaataagacctactctttatattagattaggtctaccatcaaattctttttgcaaatagaaacaggaaaattctaacaacttaatattttctttaaaaacttatctcaagccaaaatccaacgatatctatcgatatggtattatcaatcaaaagattaatattgcataaatgttttgataattttgttaacaatagaataagtgtgaaattatgaaattaactggattctaattctatcccttgtaacttgggaagggtgttaagtgttaacacactcggtaaatcactcatggactttgaattttatatttgggcccataatggatcaatcgtaaacccatcaaagaagctcaaaacatctaattttattccatttttggcacctcaaaatatataaacatttatattattgcgaaatttccgatcatggattcgataccacggaagcgacccaaatcggaaaccagaacgggcagaacccctaaatcttcttcttcttcttctccgatcagatcaatgctcgagccaccacaaagcttatttccttccaagggagagttcttcacactattgaaggttttgcttgtcgcttgtgctgtagcttttacctgcaatttcctctctaagtctctgagctcaaacccttctaaatctttctgcgatagtaactttaatcccatcgattcagacttgggtaagctcgaaactcatactcaattcctttatatcatagttgaattatgtaattccttggattaatcaatttcattgtttcagatatttgtgaaccttgtccaattaatggagaatgttaccaagggaagttgcaatgtaatcttggatacaaaaatcaaaggaatttatgtgtagaagatggagaaatcaatgaatcaactaagaaattggtattgaattatgcgaaaaatcggaacttttagatttttttgtcttgttgataatttggtttaaattttggccactgttgttgattcaggttgggtattttgagagaaaagtttgtgaatcatatgctcataatgaatgttatggtacgggaaccatttgggtatgtttctgatatctttaactattgtgttttggtttacttgtgtgttcatactgtggtaatagtgagcattgtgctgagctattttcatcgatgttttaggttccagaaaatgatgtttggacagaactacgtagtaacagtttcttgagtaacttagacgagtctgcttacaattttttgaaaggaaaggctgttgaaggtgtcaccgagctactagagaaaaggactaattctaatgggttagtattttcatcactggttaattagtctattggttactaactattgattaaagattcgtacgttattttttatttatttgaaggattgacgagttgaagtgccctgaatccgtagccaaaagttacaaacctttgacctgtcgcttgcatcaatggatcttgcggcatatcttaatcatctcgtcgtcctgtgcaatggtattgtaatcttagaaaaaagccagtcttttgagtggcttagtttacttgatcaacatcttcaagcttgtttacagtgttgagatgtacagctagtgggcagcgcaatgttgcgtaggagaattcaacgtaagcaatgtttttcaagaagagtggaagagttatacgaccaggtacctctttatccgcacagcatctcgattagtcaactatccttgtcatttttgtaaaaatatataacggggttttattttgaattgattcataaggtctgtgacttcctggaagagaatgcagtggcatcaaattctgcagaaactagtaactgcgagccttgggttattgcatcttggttacgtgattatctactcttgcctagggaaagaagagaccctctgttatggactaaggtatgctgtttttggtctctgtctctgatgcttaatctggctttctctaacaatttgttacaggtgtcatgtttttataaccaattctcaattttgttgcctgacatggttcatggttctttatattcttggttaatttacaggttgaggagttaataaaagaggattcacgtatagaccgatatgaaaaactcctcaaaggtgaaaaaaaagttgtatgggaatggcaaggtatgaacctggaatagttctttatcctctttcactcttcgatttctatatttacatccattgaatgttatttcctcattcagtggaaggttcacttagtttatccaagttgaagaaacagagagagacgcagaagaaagtcagaaaaagtatcgactcaagcacaagcttgcaagagtattacaacagacgaattgccggttagaagctgaaaaccttttgttaattgagtatttctattgagtcaaatagacattcttttaagattgatctttatctggttttgttgcagagacaagttcttagtacatgtacagaagaacattatagaagcttgctatgattcttcacgtaatgtcagaagatccaaggaatgaagcattgtcgatttttccatgttttttttttatgttgatgatgatgcttgaatttgtaatatatgaagattttgtccatgtcctgaccaagttatggaggaaaaagggtgtttgaggagatcaagttctgacattaggaattgaatcctttcatggagaatgattgaatgttgcataccacatcatgaagatgtaggggtatgcatcaatggaattttgtactagctatcaatagttgtatagagacttaaataatagtttgctttgacgttaaagtcatataaactttgtttggagtgataaaagacaatgtaaattaggtttagttcattatgatgacgctacattgatgaaataactaataagtcaaagaattgagttgtggattctagacgatctccaaatgtattgccttcatggagaagcaataacatgcttcgaaattggtcgcacactgtctgtttcaggactttcgtcgaatagtttcatgtaattcccacaactccaaaatcttgaatctttagagaaaccctaaacacgatcttatggggattgaatctattctccacgaaacagagatttggaagccgaagacgaatagattcaatatagactgtcacaaaaccaacaagaacgaacatttggactctcgtggaaccaaataaacaaagatggagattcaaatttcaggaataaacgaaaaaccaacattcttgaattgatgcaatttacccttgaatcgtttctgagttgttggtttatttagcgaaccagtttaaaccggaacccgttcgatttatttttagtgtttaaatataattgacttataggttatgtcaccaattcgataagctcccaagtggttgtgtcatctaactagtttaacatgccaccttggttcgaatgggtgtaccttcgtcagcagtgatactgggacgttgcttatataaaaagctataatggtagggtcgttgtttagcgttctaccatctagcttgaggtaatctaaattaccttatttttttgcttttaattcatttaaaaatcctaatctcatgagatctatgttaacaattggatcggggcttagcatacaattgatataaacttgaacacatctatacgggaaacagtttttacatgattttggtagtagtctatttcaagagatcatctaaaaaagaatcttcaaccacaagttacatagagagatcattttaaacaacgtcaatttatatgaatcctcacgcattaagtgacacctgcacgtcagtcacacgaacatgtccaactctgttcattaggtctttcatcatgtgacactcttgcatatctgaaaacttttattagtgaatacgatttagatcggtaatttcttttgaacaagatgaaggatttttgggtctttgaattgaacgaacattggactcttgtggagcgtaagatagggcatcatgtattttttgttctccaaaataatattttgtttaatagaaatcatctatatattaaaacactaaaccaaagagatataatctctcgtaagattatatgattttggtagtaatctctctttcaagagatcataaaaaaatatcttgtaaacactaaaccaaagagatataatctctagtaagttaatatgattttggtagtaatctctctttcaagagatcataaaaaaagatcttttacaagatacattccgcatcgaacaacattttctatacgtggtttcacgcacaaaggtcgctcactagctggagtaatgtggtttggcaaaattatgtcagtgagcaacttcaccaggagaccatataactgcattaccatttcctcaaagcccctatcccaaaaatagctgtaaattaacacggtggagtaaatatgttgggacaaatattgcatgaaaccaaaaaaattcataatttaccataaaaattcttttaaaaaaaatctgagaccttaattttttcgacaatccaaacacaacagagacagaagtaatgttttagtatgggcatttttgttgttagcaacgctttgtcatgtaaacttttgctacaatgatcttcatggatgtgtgaaacagaggctgatttggtaaacctttttcaggtatcccacgcctcttcaatgagccaaatttatgttttcacacaatggtgagtcttagttttccattcctaatgagtataactctcttatgttcattgatctgatactttttctattatgatgtattgatgttcaaagataatcccacaatgtcttcattaccaaagctgatatttctttggacgtgagaaataaaagatcgccgacatttctactgaacacgcttcttgcagatcttattcagtaccggtaaattctgttgtgtagttctctagagaatagtaattttcttgaccatgcatctaatgagaataaggagtttaggttaatactaatatcattgtgtatatacttgtctcttctattggggaagcaggtgagaccttacattttagatcttggcagcaccaacaaggcctacattagtgagagtgttgaattgcatctcttcttaattgttttgttttcgtggtttagataaaacgtacgttagtagtgacctttgtttttcttttttcagaaaatacatattgaaccacaacgctactatgaactttttgagaaacaggattataattaagataaaagaattaaaaaagtgtgaaggaattaaaattttaatttcaatgaaaataaggggccaagttgaaatatatagaatatacaaaaaagaaattgtacaactattttccttttgtatgaaaataaattagttttttcttttagcaaaaaattagttcatgtatttgcattgcatcaactaaaatagttatattaaaaaaaggatttttgtgtagctgtgatatttggaatagaaaatccagaataataatatcgaaaattgtttgctttatccccctttcttttgtagaaattctcatatgattagtggatgattcggtccaagtactatcatttaaggatctgtgtagtattaaaatctcgaaatctctattcgttattaactttgtcggtgaaggggttgatatataataaaccgaagactttttgtgtgaaaagaatcatgtaataacggtacttattcattttgtacttatactaaaataaataccgattatgttggtggtagacttctaaattttaattagctttttaaaaagacccttaatttttaataaaattgatggaaagaggaatagttactttctatcttcggtaaaattcaggacccaagaaggtcgaggcacgtgccccatgatagacttgtcatgtgatgtgacctattttctttgtccaacaattttttaaaacaaattgtcataggctagaagtcgtcaaaagttaataagcaaaaaacgcaatatttcaaaaataaaaaatttaacaagaatgaatgacacaaacctaatcgtcttgacattttatctcatatatcaataatgctcaatcgagtgtaaatactttttttacatagtaaaaggcgaataagagagcagatcatgtagcaattattttcactattattgttattgtgttgttgactttgatttttagtttttaatagcagggtacaaatttgtaccttcaattatgtcaccaacgagtgtttgagataagattagacaatagtaaacacaaaattgatgtaagctatttaacatgtttattgaactgtaaataattatatctgttttaatatattttttaactattttttttcttaattgatattttattgtattaacactccttcttattaactttgcaaaataaactgtcatcttgtaaattattaccaaatcttaacactattattattgactttagaatctaagatatacctaaataatttcttaaggccaaaaaaaaaattatcatctttttatttaagttaatctaagatataaacattaagagaaagttgcaaaattaaagaaaaaatatctatctttacctggatacaaaacttatacttttggataattcatatgaaagtctctcttctaatgtagtaaaaacttctacatttcacagctaaaaactgaaacccaaatttaaaatttcgtgtatagtaccgaggaaaaaaagtatttgcaagcaaaatctagagcagaaaaatttaaagatcttttgcttcacatgactctattgtttttttcttacctctattttttcaagtctgcagctttttgaagctatatttttcagatctttcactctctctctagctacttctttttgtctttaagttttcaaattttattaaatttttatattctactgcctcctcagcttctctcacaaagcacaaatccaagccccaaatcaaatcccaccattgttttattacctcaatccaagaacactagacacaacaaaaatctctgtttcttatccaaatttctgatctttgtggagaacaatattttgattggatgtgagacaaatgggttgtttacattccaaaactgctaatcttccttcttctgatgatccatcagctccaaacaaaccagaatcaggtaataatactaatctcttagattctaaaaaactcacattttgtttgctcacttagtaaatctgcagtttttcgtctgttcttgttatgggtttgctttaatttgtggggttagggtttgtgaaaggcttaaagcagagaaaaagttataaagtctcttcctttttggaattaaactcttgtttagattgatttgccttttcggggtatgttttgttatgtggttacagtaaatggggaccaagtggatcaggaaatccaaaatttcaaagaatttgaactaaatgagttgaggaaagctaccaatgggtttagtcctagctgcattgtctctgaaggtggagagaaagctcctaatgtcgtttacagagggaagcttgaagggaatcatcttgtagctatcaagcgattctctaggcaatcttggcctgatgctcaacagtttgtggtaagatatctgagaaaaggtcaatgcatgatttgttgttcattgattcattgtctgattttagaccctgggtgattctgttggactatctcttaggcaaaccgcatcaatgactagtccaaggaatggtgatttaggtgtagtttttagttacagaagaagaacaaggcatcatttttcgataaaagaataagcgtccctgagtttggttaccactgaattgtagaaaagtcgataacttcgggtttaaagctgcttttaaatcttaggatacgactaatgtcttgactgtatatcttgactgcttttaaataggagctttgtcctggtgttgaccttgtttgacttgtgaaatcaggtggaagcgactggtgttgggaagcttagaaacaagagaatagttagtttgatcggttgctgtgctgaaggagatgagaggttgttggtggcagagtatatgcccaatgatactctctcaaagcatctcttccactgtaatagtcttatctttctctcgttataagcttggtttaaagtcttctttagatgatttactctcttctttctgtgtttgtttgcattgtttgcaggggaaaagcagccacttccatgggatatgcgtgttcgaatcgcagactatattgcagaagcacttgattactgcaatattgagaaccgaaaaatctatcatgacctcaatgcatacagaatcctcttcgacgaggaaggtgatcctcgtctatctacttttggtcttatgaagaacagtagagatggcaaaagctatagcacaaacttagcttatactccacctgagtttttacggacaggtaaaattcttgatcttgtgaatcgtagtcgaagacaaaccaattcattattgaagattaaagttctctggtttttcttttgcaggtagagtcattcctgaaagtgtgatattcagttatggaactattcttttagatcttttaagcggcaaacacattccacctagccatgtatgtgcttccaatgttctaatttccttcattttatcttacttttttgtcaattgccgaggattttatttgtggtcttcttatctgaattggtggtgatgtttcatatcaggcccttgatatcataagagggaaaaatgctttgcttcttatggattcatctcttgaagggcaatatgcgaatgatgatgcgactaaattagttgatcttgcttcaaaatgccttcaatcagaggcaaaggatcgaccagataccaaatttcttctctctgcagtagcaccactacaaaagcaagaagaggtttaaaagaatccctcctgaaaccgaccatatcatgaatttcatatccaaatttgtttatcctggatttgattttgttgcttaggttgcttctcatgtcttaatgggcttaccaaagaacacagtaatattaccaactatgctttctcctcttggaaaggcctgtgcaaagatggaccttgcgacatttcacgacattttgcttaaaaccggttacagagatgaagaaggtgcagaaaatgagctttcatttcaagaatggacacaacaagtgcaggagatgcttaacacaaaaaagttcggggacattgctttcagagacaaggatttcaagaactcaattgaatactactccaaggtgagaggaaatagcaacaaatccataattctcggtgttcgaaaagaatttctaacctctgtatctatggtttccagttggtggggatgatgccggttccttctgcaacagttttcgctagacgggctttctcctacttaatgacagaccaacaggagcttgcactgagagatgcaatgcaggcacaggtgtgcataccagaatggccaacagctttttacttgcaggctttagcgctctcaaagctcggaatggagactgatgctcaagatatgctcaacgatggcgctgcatatgatgctaagcgacagaatagctggcgctgctaagctattagaggaagtcccaaatatttatgggtcttttcagactgtaactgaaaggtgtgtatgcatgtaagagagagatggaatgtgttgtttacttttgtgaaatgagagcttctttttttgcatgaatctttatgaaaagtcaaatcttttggggaaagagagaataagactgcaaataactaatttgattccttcttccttatggtaatacaaaaagatggaaaattcaatatgctattacaattataaacaactttactgggaaaaataatgttgctttttagtttaggataacagatgatgatacttcatgcttgagaagtaactaaaggtggaaactttgattccaaccatgacaccaaatcctcctttgtagccacaaagatacctggcctatcgctctgtctaaatggtgcagagagttgttgcaaatgcaaggcgaaagagtttgctaatccctgtgagaatctgtgagttcctgtcccagtttgcgccaaaaacagctcaggaagttcctcttggcgtttaatgatgttggcaagtgttctcatccactcttcgagagcggtctcagctgcaccaactgataatgacctcacatctaggctccattcttttatggtcttgttgtgtagtcccgggtatagaccaaaaagtgttcctaagtagagaagctcatgagctctctcatgccggttgttgcctctgcatatatctatcaaacagttgcagaagggccttcttgcctctacttgggttgcattgatcactaacttgaactcttcttttacagtctcatattcggttttctcatctacaatcagattcacaaatgtcaccaacttcttattagctcgctccaaacaagccataaccttttcagcatcttcactactctcacacaaggccataactgaaagcagacacccacagagcctatcgtcaggcttaactccccttttaatcgagagatcaaacacataaaccacatcatcaatccttttagctttccctaagcattgtactaaacaagtgcatcccattacattaacctgaaccccagctttcaacatctcttcaaacaactccatcgccttttcggcttttccaccactcccatatatattcagcattgctgtgtaactaaaattatcaggtctacattgcacagactccttcatatcattaaacagcctctctgcttcttcctccaatccaatatcagcacacatattcaacaacgtattgtacaaaatgaaatccatcggccacttctttgccttcatttcctcccacaactgaagagcatctctcgcccacctcgcttttccataaatctttacaagagctgtcaaagttttctcatttggagttaaacctgcctcaagcatctcattaaacaaactcctcgccaaacccggtttccctgctctccccatagcttccaacaaagtattatacacaacaacattaggcttcacatccatagatttcatctcttgcaaaacatacctaatcccatcataatctccagcttcaccaaacattttccccaacacagagaacgctatagcatcaggtttccaacccgtagccaccgctctttcgtacaaactaagaacctcctcaacttttcctgacttggaataaacatcaagaattgctgagtaagtgacctcatcaggcatcagacctgttttatacattctctcaaaccactcaatagctttgttgtaaagattgcaccttttagcacaagtgatgattgtcgaataagtaatgttatcaagctcaacaccatccttcaccatttcaagtgccatctcctcaataagctgaaattgcctcccaaatctcagagacttcattgtaacattgtaaaatatagtttccataggaaacagactcttggatttaacccaattaaagaaagtatgagtcttttgccattctcttaagctgtttagcacaagcaatgcgttatctctattgggtggatgaggaatctcatcgagaagagataaaaactcagacttttcagtgaaaatagaactattgagcttcagagcaaaagccctaagatccttgatttgaggattgtaagagtaagcagaacgcttttgtctctgaagtgaaagaactgaccttttgggtcttgttggattgacccagacagatttcggtttagacaagatttgagtttgctcttgtctgagtgttgttgcagagagaggcttgagttgctcagagagagatggggtttttgtggtgattggttcttcttctagggttttaggttgtttcaaggaactgcaagaaatgttaagctttctggaacgagattgtctgaaaagagaaggctttaagaatagactgtgtttctttgtgtctgaattttggggattgaagcagacatcaatggctgtggtaagaacagtcgccattagaaacgcagagtgagaggttttagcgtgaagatggtttatcagaacatcttatcttgattttgaaatgacgctcaaaactaaaaagtaatattaggttatgggcttcatggggcctataaagattggcccatatatacctgcggatggcacatcataaagtttgtgtagtgtagacgtgtagttctttggtcacgatgaaattaattcaatctattttagttttcctcaactttagttaaactttgtttgattacaaaatcaaatcatctccgcatctatatatacaaaatcaatacattttccgcatgtgtttccgacttgtactcttgtagttttgaaagagacacaaatgactcgatcgagtcgtaaactgttataatatatagtaacgtagaatatatatcaaatgaacaattattagtagcattttttgtaaactttttatgattccagttagctctgctaaattaatagacatgtgtatataggatgcatatatatatataagtatttgtttctcaaatgataatataaaagttattccaaacataattcagatttctgttaaattctgtttgactcaaaaaaattcatacaaatattgttctattttttacttttcgtgtattgtcttctttgagatgttcacactttatgataatgacacccaattatatacacataattgacattgtgaacaactacaaaacaaatcctgccaacgtactagtcaaataaagaaaatcgtaactaatgtttggtcaaatcactaatagatttttcaaatgatatgttttgtttttgtcattacagtttcatataagatagacactatcaaacaaatcctctaaattcacattaaaaagtgtacatccactcatataggaacgttcaagtctacataaaataaatatggatataagcctgatttataacaaaactacactatttttttttttatagttttggcatccttgtatgatacatcaaaataatcttccgtttctcaaaacgttgatagttggttataaaacttgaagagaccaaaaaaaataaaaagatgaaacaaaaaaataaagaagcaaataaagtaaagaaagaaaagaagggagccgaaagcaaaaggaagaaaaaggtgaggagacaaagtgtgattaagtgataagatgagtcctctccttttccaacgttcatggcttctctttgacaccaatttcaccatcttcctttgtcaagcttccaatttctgaatttagttaatttcaaattctccacaagtttaacgttcaaaattattatatttcataaactagaactatgactagaagtctaggactacttgttggatatgtgtctttgatcatacgtttgaagagggtttggatctcaaatctcgaaccaaaccaccaaaaacggtattaaagtaaattattaaaaaattaaacaagttatagtggtttactttcaatgtaagatttacgtctattttgtgtgttacagtaaattttactataataataaaaaaaaattgggaagactataagcattttatctctcttttcgctttctcattcacatataatgtaaaacaacggcataaatttaaataaggaacacaagccgatcaatgtgccgtccgaacatcgcatcacatattggggtccaagagattaggttcctcaacttaacttgatattttattttctaccatcataatataattgcttttattcatttgttaattatctaacaatgattaacaactttccattatctttaaacccaaactaggtataatataactgtacttacaaaaaagcattttttatgaagagtatcatctgaaaatttataaaaccatatacatcttaattagtatcttttcgttatctataaattttacatgcatatttaaatcttaattacgatacggtaacaaatttaataatacaaactgttatattacaaatcgcccccatgtcgaacatggctccttgtggttcaagatcatccataagtttttcaagatcatccataagttcttccatctcccgaaagtttccttagagacaaatttaataatacaaacagttatattacaaatttttaatctgtctatcacattgttatctgacttttatttatcatcaaaatgatgatgtagtttatacaaagagatccatatatccgtatattaaaaactgaactcacattattgggatatagaaaacccgtataaagaaccgaagatcgacggtcaagaggataagacgaaaatatgacaaaaatatattgttaatattgaagtttagaatatttagcattatttctaaatatattatgtatatttatatttatcttagattatgaaacttagatcaatctcatctctatataaaagaatgcatcttgtacaattattcttatgagaatttattataattaatcctagacatatttgtgttctttactcttatcaatttatcattgcatcagaaccagcttagaaattaagattgaaagctctgatactataataaagttacataaatttctaacccaaaaccaattggcaataagtacagcgacttatgtctcttatatattactcaatgtctcattacatgcttcctaaacattatagatcttaatcttatgacctaataatccctaccttaatctctaacacacattatacatgttacgagatatttacgattcagacgagatatttagaattttaattactgtatcaacgtatgaatattaatttattggctaactacttactagaccaaaaacgctttcaccacgtaaggacaatattatttacaaaactaatataggtatccgtgtaagggtggtcattgatagatccgtttattcgtataggcaaactttttcgagtatattttcctctacatatgcttttagtttttttttttttttggggttaattctcttttccgatcgtattcccgctgacgataccatgggttaaagtgaacgtacgtaaagtagtgtgggaatattctcactctaccaaaataataaggtaacactttcatagaacgagaacctatgttaccgtcaactcaagtaactattttgagctttttgccacttggatttctcaattacgaacaaaatcaaaccaacaaaaatgattttacagattaatacataataacgcttcagtatcttttttctttgacaacatgcattatctgagtttaaatttggttagtactacatcgataatttacaagtacctatgctaatagtcaaaattcaaattaaaaatctaatatccgaataaatggaaatcacgtatatataaccaattacaaatagtttataaaaattcaacctttcgtgaatgattttgctatgtatagactaaaaccgtgtcaaaccaaatatattagttggcctactgttccaccaatatggatgtcgggacataccataccatccctttctacatttggtatgttttcacatttcttttcatgggaagactaagaactggattacattttatttttaatataaattagatattttatgacctctaagtaatagttgaaacctggattctatcgaggatgatcgatctttcttttctattatattttttgttacaatttttggttttacttcttaaaagaaatgacttacaaaaacagagcatcaaactttcgggtttggcaactctggtttttagcaattaaaacaacaaaattaccgagtgaaagagtctcaaaaccacgaaaagaaatgtctcgcagagtaattgttgcgtattactcggtcaacttgtttcaacaaataacacagaagattcggttcttacgttcttgccattaggtgtaactataacagcttgggttgcaataagacgaaggatggattattggttatcatgtcgaggagactcgaggcaagttgagagtcccatgatgtggcatctcaatcatgatgtgcaccatcgtcacaattaagtcatagctattgggacaacgttgaaacaatttgtctcttgttttcacatatattttacaaagagggaaagtgttatcttatctccaacaattcccaaagagcataaacgggagaggaggggtaatcgattcaaacaggcgattcacatggtgaaagcatgttttgggactgaatccgagaaccatacttgatgataccaagggatcggacttccagaagtggctgcatgttgtttgtgagacatggattaatgtcaagtagcagaggaaaacctcaacattgtggatttaagcaccagaaaactgccaaccctcttcattagtagcgttagctaaacactagtcaatgttagaagctgtccataaggaataccagaaaaagcatatattaccgtctttaagcttgaaataaaaggaaccataaaccatttctccttaggtttaggagttgttgccacatggagagctccctaggctcttcttcattagtggccaaaaacatctccatttctttttttctttttttaagttaactatgaaattttaagattatgtgacgtatcattcgagaagtcatatggtttatgttgactgcattagctaataaaactctacttaagattcatgttagtgatgtggaaattgagtcatcgtgtataaaggcatcccttttccgaatgctatgaaaaaacctaaattgatccaactaaatgggaaaccatgaactgcaactttatattatcgggatattttaggcgaaataataaactaaactcgagaatatgaagttactatgtaattccaaaattgttaaagaagaaactttatatctcaagcatatgacaactaacttctatataagtggctctttggtcgttcttaaagacatgaacatataaacaaattagaaaatgttaaaaatatgttttggtccgattaaagcagccgcgggtccactagcttgttccgactcaaatagttttcgttatcactttcttctctccatttttttcatacgacataaaagtgatatagttacactaaaaagttgttttgtcctacgcatagtgacgtgtaacaatattttaaaactcaatatcacagtaatatatgactgggaaagttacaacttgaggtgtaaaagttgcacacattaacatatctataggctatagcattggtacattttaaaaaactatagcattttttttacaaaagattacattgaattattagtaaatatataatatacataaaaactgattatgttgtaaatcacataataattgtatgattgaagattgaaatgataagcctattatcgaaaataaaattagtcaaggagaaaactttgaaagatatatgaatgagttgttaattgcttgtgcataagtgtgaacatgtaaataaacttttgaatctaggtaggtccatttactttggaattgttacatagaacacttcagacaagttatgtcttaatcactttatcggtcacccataattttgtaaaaaataaaagccacattctaacaaacttttataattccattttacatttatatacaaatcaatattctaccaactttgtgctataaatattcatcacaccacaaccattcaacactctaccaacctcttctaatttctacaatcactctcttaactctttgctaagcacttcttgttaggaaaaatcattccttaatcactctcgaagctttcacaccaatattacttccttactacatctcttcattttaaagatttgttagttactttttttttttgttattgtacgaaataatttgttttctttcagacaatgttcttgtcacacaaagaatacaatcgacttgacttgcaattttttctaaacaacaaatccagcatcgagaaaagtttctatttttggattttccaaatattaacagttatagcttcgtgacttcaagaaatatccatttcaagattatttaacctttttttgtctagcaagtcatcgtattctactttgttgttgcaaatgggaagttcatgtttacctccagggttccggtttcatcctacggatgaagaactcatcgaatattacttgaaaagaaaagtcgaaggtctcgagattgagcttgaagtcattcccgtcatcgatctttatagtttcgatccttgggagttaccaggtaatatattaacttccaaaaatctatttaaagtattaggtaacttttcaaatttttaatatttttgtgttgttacttttagacaagtcgtttctcccaaaccgggacatggaatggtacttcttctgctcaagggacaaaaaatatcctaatggttttcgtacaaatcgaggaacaaaggctggttattggaaagcaaccggaaaagatcgaaaaattacttctcgttcatcttctataattggttatagaaaaactctagttttctacaaaggccgtgccccgttaggcgatagaagcaattggatcatgcatgaatatcgactatgcgatgatgatacatcacaaggatcacaaaatttaaaggtaactttataatttgatcaagttctaaaatggtttcgtttcttttgatattgagagaccattaagaaatgaatgtgtttaactatagggagcttttgtgttatgtcgtgttgctatgaagaatgagatcaaaactaatacgaaaatccgaaaaattccaagcgagcaaacaatcggatcaggagaaagctcgggtttatcaagccgagtaacgtctcctagtcgcgatgaaacaatgccgtttcactcatttgccaatcctgtatctactgaaactgattcttccaacatttggatttcacctgaattcatcctcgattcttcaaaggtaatgtgtacacaattctaaacatactgataactaactaaaccaatgtttgttaatcgtataccggttttataatttttgtaggactatcctcaaatccaagatgtcgcatctcagtgcttccaacaagactttgattttccgatcatcggtaaccaaaacatggagtttccagcgagtacaagcttagatcagaacatggatgagtttatgcaaaacggttattggacaaattatggatacgatcaaaccggtttattcggttactcagatttctcctagacggaagtatttggtctctctttacgacaaaaacaccttttatcgttttaagtattggaagacttttggcattggtctaaatatatgaatgagtttcataattctgtttttttttcttttactttttatgggattattatattttatatgaaaatgtttaccgttagttatatatcttatatatatgaagctgtattttatattccatatggattctcttaaaagtctcaataggattatgcactactgtcatccttcaactatctatctctcattagtcatttctattacaatgattaattggaccagtgtggtcaccacactattataccatctttttgtgacgtcactatatataacctttagaataaacttttgtggaagtgataagttgataacaatgactctgtgtaaaacaatcttttaacaaaaggaatcatggcaccaaaaatactaaacacttatgaagttatgaacaacataatttttctctaatacagaaaaaaataggattgaaaaattgcatctctataataaaaataaaggagcataattgaagttataggatatcaagtttcccaaaaaaaatctcatcgtttgaccacttggatgagctttataaaaaaattattttattttggtattaaaatgtaatgtgattttctagaagtattaagattaataaaattatttgtaggcatataacaaattgggtccatagctcagtggtagagcaattgactgcagatcaataggtcaccggttcgaacccggttgggccctgatatttttctttttttattttttacaactttttgtagtttttgccaaaatttaccaagtaaccaacacaaatcaaaaagtaatctttttttttaccaacgtaactcttcaaattaacacctcgtgttacaaaattccagaaattaaaaacataacaaaatcggtcgcaacagagaatcgaaatcacgtagtagaaaaccgagacaaaaccaaaataagccgtatcgtaacgatacattcaatctacacaaccactagattaaccggttctcaattcgcacctccacagtcttatcgtactccttaaagcaggcgattgttcccaattcctcaacctcatcaatcacagtatcaagcctcgcaaccatttccacaagaagtgacgcaaacgcagcaaatggtaacgcttccgaaaactccaaacttttcataaccgcgattttgctcaattgtttcctcaatctcctcttctctccggtcgccgccgatttcttcaccgatcttaagctagagagtgaaacaacgctgtttaacggaagtggtgatacggtgtcgttctcttctatagtttctcccaaaacgcagccgtttgtgttattatcgttgtgatatgaaacggtgccgtttgagttagtttcgttgtaatatgaaacgtggccgtttaggtgcttgttagtgatgttactatgaaggttagagcctaagaagagcttaggttgtgacttgattgtggagttgagatcttttaatgccgcttcgagactgtcggagagaatctccgacgagcaatgacgtcggttttgaatgctttcggagagttctgataaaactttgcagatttctccggctagtctaacacaaggatctttgaagaggacacggatagaccttggagtcttaaaaaattaacataaaaacattataataaaactatatgctataattttaatttcttctaatgcaaataaaaggttgaataaattacctgaatctcggtttgtaagcaaccgtgaagagcaacaacagtgtaaccaaacttgcgaagaacggatccaactttgatatattgttgggatggaaatttgttgcaacgccttgtgtgtcttggctcccactttgcatacattgcctatataaatatgtgtcaatatgttcaatatagatattgggacgatattcatatacaaaaatatcaaatgaatacatttataaatgttcattagaaaagaaacatttttacacaaagatattcaagatatataatttaactagtcggattcgaaataaagattttgatttaagatgtcttacgagcgcttcgtcggcggatttagaatccaaaacagtattatacccgttgtagattaggtcttcatcatcagattcagaatctgatgtttcgttgtctttcagcttctcctcaaaatactcactcacacatgctaacatgtatatagaataaaaaaccatttatactatgtaactttatattatgcatacacatatatgtatagttataatttgcatgtttaatacattgatgtttatggttttaaggaatatgtaccttcaatacatcgagagaggccttggagcttagtaatagttgatttgtgaaggtcatcaccagaccagatcgggaaaaacagaaggctcatgaagaggcaaatgccaatacccataccaatggtatataatctctcatgcgcgatcttaatcacagtatccactctataacttgatactgtgattagattaaacgtcaaaagaaatacaagcatgccgtaatcgtagtttttctttatgtacggaataaatctcatgtatgttatcatcgatcctgttacacatatgaatgtacaacgtgatattagatatctttaaattatggaaataaagtcatagattggataactatgaaacaaacaaaaatgctacatgacgggaaataaaataacaaaacagaagaaaatgagaggtttagttattgaaatgtggataactctaatacatgggatttgtcatgatgttggtttaaagtttttttgtatattatatcttataaatatttgtcatacataaagtgaacaatttataaggaagtaaaacgtaccgatggtgaaaacagaagtgccaatgaagatacctccgagaattttaccggaatgaatagcaacccactcaataaagaatgccaaagatcctgctattagtgtccctaatcctctatttaatcccttgcgtaatgttgcacctgaaattatatatacccaaccaagttttatgaaaataccactaatgaattaagccactaacaattgaggaccatggctagatatttttcaagatgcaagtaactaatcaataagccacttagtctcaaagaaatacgccaaatgtttttgtccttctgccgttccaattccgctttattaattgtgtattaattaagcaaaaaaatttccatcagaatcataaaatatggtaccatctgaattcgtaatttcgttttttcatataacatagccggtcctggactggagtttcaaactctagaagtgatagtaccatttatggtgtaacgtcactagaggaaacttttactttaacattgctgaaattaaatgtcattattaacggctgtaagccatttggcctgcttggccagctctggataagatcacaactcacaagcaaagaatgtaaattattgatttaagatcgtgtgattggaacaatagatccatgattccaatcacaagatcttttaatacgaacaagagatctttcttgatcaaattctatgtccttgtagaaagataattaagatcacaagcaaaaaatggttaatatacttaccggcagagaactcaagaaccacaacgacggtcatgactgcccaaagagcattttttccaacaccttcgaaaaaaggttccatgagatacaataaagacacaagcgttaaggcaactcctactttcaaagcatgtatcactctcctcggatcttcctttcccacattccatagattccttagaatcttcttcatcttcttcggaagatttagacccttctttctcttctttctagaatcttcatcttccatggaaatctccatgctccgtgcttcgaccttgtaccccatttttttctttgatgtgttcttgttctatgttttgttgtttacttacgatgaaagaatatataaaatcttttatatattaatgtactttagtgaaataatctaaaatatgaaaggggttttcgttttcttgtactctagctttgtgtatctagaatagtgggtgaactaagagagagtcggacaataagtttacttttttatttaaataatggattccagttctatttcaaaattttagtttatagttttcataatatgtgattagccgttaataattgaaatgcgtaaagtattcgttacaataaacaacacaaaaccacactaatatatactaatctctgcttgattctgttgtcatgatcatatatgcaagtttgccaaaaaaaaaaaaagaaaaaaaaaagatcatatatatgcgaaagtaaaaaactttaaaatttcaatatgtttgtacgatcatgtgatttgcaattttgcatacttaccttaaaaggataagaacataatatatatcttgtttgtacggtataaactacaaaatgatgagagattagagtattagacttatgggtttcaaatgacaaagatatttcataaactaaatttatgatcagatttaaaaatccatcaccgacataccataaaaagaacgaaatgacaaagatatttcataaatttattccattgagtcatgttcatttcctttatattatttacaccatttatctttttgtaatcaaacattgtacttgttatgaaacctaaaataattagtttttgaatgataagtccatattacctaacagattatacgagttcaatttattgttccaagtatactttatgtttttgttctagagtggaattcaattcgaaatataattaaaaatcaccattttgagaaagcgtgttagaacaccacattgaaaatgtgatgaaacttactacaatactgaataagcaacatttacaaattcactcattgcccacgaaactttacataatgtccatatttttatccatttatttcattctcatttatctgtttttgttttatctacctgtcgacaaatatcgtgtattgattatttgatttctagataaatcccaaatcttcatatgtttagagcggactatcaatatatcttattatgagagatttttattcttttaagatttggacggtccctttagatgtataattattgatttttaattggatttctcccataaaaatcggtgtttaattgatgaataagcagtggactgaagacaatttaatgaacgtcaatttgtcgcaaaatgaatggacagtattgatgctttcatttctctactacaatgattagttggaaacactattgaaacatattttgacattactatctattacctattaacctattcacgaattatatactttgatacgaatgattttgataagaaaaactatataaaaaattaaacctacaaatttttttttggtgcaaacatatttcattcaaatcaacccatacgtagtacaaaatttaaacaaacatctacatgtatcccatttaaaatctacaactataaatagaagcaatagtttaattttgaaacagtttttttttttttttggtgtgggatcgatgattcacttatacaaagggggaccaatataacatgctatataatttgtcgttctaaatgtaattatttagaaaaggaaaatgtgaagtagctgcttgctaaaaaatatctaagaaacccccaaaaacaaaaaggttacatctttttcattagttggttcagaagctaattatagatctatgatattttatttttccttcaatactacattagtatgtaaatattttgaaatataaagtatttgtaagcgttgagaaaatacattttaggttggtccaaaaaaagcatttgagtggagtacaagatatctctggttttacctctttttcattttattttcaaattccgatattacatatgacttaccaaaaataacgactttcacaatgcagaaatatatacacataattttttcttagcgaacccttgaaaatcaccaccgcactcatgtttacatattccgaaaataagtagtaagtaccccaaaaaaaaaattcccatcattgcataaaagagaatagatcacatcaaaactaaaccaaatcaaatcaaaccaaaaagccaaacctcatcatacctattggttcgatcttaacttcttaaatctaatcatacactatatataatccggaatatgtagttcaattggtatagtaccaaaaatagttttaaagatatcatgatgttgaatactagcgacatggacatggtccaaaccaaaactgtccgcaaccgcattttcactccacgccaaccactaggtctgccggcttctcgactcgaacctccacatccttctgatcaacgttgttatcataatccttaaagcaggcgatcgttcctagctcctccacttcctcaatcacattgtcaagcctagcaaccatttccactagtagtgacgcaaaagccgcaaatggtaacgcctccgagaattcaagactcgtcaacaccacaatcctgctcaattgttgcctcagaatctttctttcgttagtcgctgccgccgatcttcgttctaacgtatcagccctcaatctagaaaacgaaacgtttggtccaaaacgtgacatgcgttcaccacgtggcgttccagtgttttgatacgaagcggcctcgtttgtgtctttattaatgtgttgtgaaactgcaacgttggggttatgtctaccgctatttccttgagacacgttgccgttttggctagagccgaggaagagtttaggttgtgatttaatggctgtgttgagatcttgtaatgccacttggagactgtcggagagaatctccggggaacagtgacgtcggtttctaatgcttgcggcaagttccgataaaaccttgcagatttctccagctagtcgtacgcaaggatccttgaagagtccacggagaggcctcggagtcttgaaaattaacagaaacaacattatatatcaatatacaaaaactgaactatagcttataactaaatataatttctagtttcaaaacaaaagaacattttaaagttacctgaatttcggtttttaagcaaccatgaagagcaacaacagtgtaaccaaactgacgaagaacagatccaactttaacataatgtttccatggaaatctatgacaatgtcgtgtgtgtcttggctcccaacttgcatacattgcctatatacacatgttcatatacattcaagtttttgttttcattcgagttttgaaataaattttcgatagaaattacttacaagtgcttcatcggcggatttggaatccaaaacagtcttatatccgttatagatcgtgtcttctgacaaatctgatgtttcttcgtctttctcctcctcttcaaagtactcattcacacatgctagtaaaaaataccgtatatttaatcagcttaactaattggaacaatataataataaatttttgcacttaaaaacaacaatatcgcaatatcgttacaaaatataaaaatgatcgaaattagcaagatttactaactcaattatgaaaatatatctactttcttatttcttgattccaaacaaaaaaaactctagattgctaaaaatttcacattgaaaataagatgaggccgaaagtataaaaagcaatctatttaatttgaatatataatatttaagtacataccttcgatggaataggagaggccttgaagcttagcgacggtggatttgtgaaggtcctcaccagaccaaataggaaaaaccaaaaggctcatgagcagacaaataccaacacccatggctatagtatagaatctctcatgtgcaattttaatcacggtatcaactctataactcgatactgttattagattgaacgtcaagagaaatataagcatgccgtaatcgtagttctttttaatgtatggaataaatctcagatatgttatcaacgctcctgttacattaacaaaacaagtagttaatacaaaaattgtccaaaacaaatgaaattatagatatcccaagttttggaaactattaatttgttagggtcttatagtaatgtcacattactaatttattttgattatgtgataattaagagttaagtttcgtaaactattcgtttgttacaacgtggattgattgtgtaataattaagaaagtattcataccaatgataaaaactgcggcgccaatgaaaatagctcggaaaatcttgccggaatcattagccacaaattctatgaaaaatgccaaagatccagcaattagtgtccctaatcctctattaagccctttgcacaacgttgcacctgaattattaaacaccattcatttacatcatttaaataacttaagcttatacacaaaatattaacgctctaatcattttagctattgttatgagcaaataatcttttcatgccttcgttttttttatttacaccatcaaaacgacagactaaacccgatataaactagtctatgaactaggaatttctcgcaaatggatcatgagaatattatacaacacatggattcttgattgaatccaaattaaaaaaaaatataaaaaatctacaagttgaattaaatgttataattaccggcagagaactctaggacgacaacaacggtcatgactgcccaaatagcactgtttccaatgcctttgaagagaggctccatgagatacaataaagacacaagtgttaacgaaactcctactttcaaagcatgtttcactctccttggatcatcttttccaactttccatatattctttagaatcttcttgatctttgttggaagttcaagaacctttgtcttcatgtttttagtagagccttcttcctccattcccatgctcctttcatggaccctgtccgacattgttttttgtctttttgggttcaaaattagaattattgaatatgaaagagagtttaggtgttagtgtactatctatatataattgtatgcatatacgtatactatgtgcaacgcatagacacgagactagttagcccgacgaagcaaattataattcaatacgtgtgttttaattgtgtgtctgtctatatattgtctatgtgtatcagtgtatgtgtgtataatttatttagttatcacaatattttttctgaaaacatagcaatagtaatttagatagtaaaaataaatatatttacaaagttacattttgtatttattttttttatttttttttgtgaactcaataattcataacataaagagaacaaatggattttaatagctattttcttgataatgtacaagtgacgagagactggttttcacatgacttgcaataatatgatggtggttaaagaaatttttattttctcttttttgctacataaattggggaaaacaaaaagtcaagatatattaaaactaatttgtggccgttcattaaaaaatactattaatgacgttccatattgaacttgttaaattaaaaaacgaataagttttagattcaccattcatattcatgcatgtgtcactcaattcattcatcaaaataaatcaaaatacattgttgtgcgcagatcttgatcagatatcttattttgctgcattatgtttttttttctctgacagagtaaattaacaaatctacatctaaatgtaggcaagataattgtgatgatgctagagtcatataaaaccaaaatttataagtggtttcaagtatcagacaaatgaaaatgagttggatgtgtttcaaatttcgttgtccttttttaacctaacacatttgaaaagctttattatacacaagtgaaaataaatttgattacgtgggtgagaatttgttatcaacacgactaagacttataatttgtcgtgttaggttgaaatattactatttgtccacaacctggtgacagcagaagaccgaaaaagaaagaaaataatatcaaaatatttaatttaattgatctacctatgactcatcgacgtaataatcatacaattactagtataatataaggtaatcatccaataataaatgtatatttaatgagtaatgacggcgattatgacagacctaatataaaactaagcccactaatgttatagtttcatcgtagatattttatttttcctaagtccttggctttaaactattttattaacattttaatttcaatcacatagatactgttgttaattagcgattgactaacaaaaatattacaagaatatacgaattttttttttcacgccgttcggcaaattatattcttgtagatattagtatttttctacaagtcttgtagttattattttagttattattttagttgatgtatgtttatatattaaaaatccaaaataaatcatcaccaattagattcattgtttgtaagaaagaaaaataaattagattcatagtatttgaactttctctaacatacttttcaactaggtaagcttatcagaaaatcaatactttaaactttctttttgagaaaatgttattttctatttcattttttttcattgcatacaaatatatactctgttacctttatgcaaacaatatagccaaaatctttataagtttcataaccagttacgattttcaaatattatttacttctttaaactgcttagattcagatgcaatatgaatcatatattaataatcattccttgctattcaatttataacaagaatctaaaaacatcatatcgagcgaaaattggaggtcttgtataagaaaaggattcatatgtgtgcaaaacagagaacttggtagtagtagtagaaatacacaattgcacaaatgtgtttagataatcccaaagagaatcactgtctattttcagaaactaaattcacagttaaataacattataagttctcaagaatctaatggattgatatcgaaattaatgaaacacaagttctaacctttctctgattcaatcacacactattcagcaaatctttctccttggttttcattgttcaatgcattaatggctgaagtttcccatcagaagatatcactaaacctctcacttttgcagcttttgttttgcactttcttggtaaagtcttgcagttttggtcttctaagaactcatctgcaacatctccgtcttcatcaatcttaagccgcatcgagtaccaacgtagtccct

SEQ ID NO: 1105 - DNA, 104001 bp, Arabidopsis thaliana
gaattctaaaattggtgaattaggaggattttggtgaaatgagggcaagtagggatggagagatatatagagtgcaagaaagataaaaatattttaaagattaataatagtaatgacttaacaaaaaaaaaaaaaagatggaataatattcgaatttaatgatgggtggttccgagataatactattagctcaactacttatatgggaccttgatattaaattaagtagtcagattatttttcatgttttgttcacacgaaatgcaagttacaaaagtctaacaaaacctagctgaatctcataagtcatatggtagatcataaatttggtttatcttttttttcacacatatatttgggcatcataacattctattttggtgtaacctaattttttttttttttgaagtttttgataaacaacataacttgttaattataccactacaacacaacaaaatatgacatgtttgttatatatttccttataattaaacttaaacgttttagacatccatgatgtttttattagcaagtgtatgtaggttatccaaaattgagtgagggcaagttataaaattatatatcaattgaatattataagcaggttggctgcacgtagtgcaaatgcactgggtcagcgacgggtaagttgatataatatgttgtaaatagtaaatttaaagggagaacgtgttcgagaaacgtacctctcattcatgagaagcgttcactgtccaaattgcaagaacaagggtagacgaaagcgtgtcccaaatattcaaatttgttatttctttgtataaatgtgtatcccacatgcatacaaactccttaatatgggccatggtaaattgatgataatgaattactatgacttcttaatagcagcacatttcgatttgtttctccattatataccatccctattagctgttccagtattgtagtcattgtcatttataaatttgctgtcttcgttaagacgtttgttatataagggaccctttacataatgaatttatttcatattataaatctgataaagaagtaattagttttggagttgcatatctagttagttttcgagtatttttctagttatttcatattgattgtgccaaggtgtccaaaatagacctcggacgggtagttgtagcttgtagctttgtaggtaaataaaatgttcggatttgaggtcccaaagtggacttattgtccctgttttgttttcattgggataaagttgttggtaaaatgtaatgcttttaatagttaaatcatttctaatatcgtgattactgggaaataatagagaaaaagaaaacaaagacaaaaggcagcgacgtcgtttccataatatcgtgattactgcatgaaacacatgtttcaacagtacgcataccaactctcaaacttcaatattggaaagatccagttcatcagatgctaataattcatatatttaggtttatgtacagcataatgaacaatagagagaattaatcaataaacagatcaaagtattaatttgcaagataaatgaaataatgatgataataaatggtagactagtacccatgtgtagacataaaccaacaattaatgttggtcggcttaataccaactaactagaaaccagtccgtcatcaatgtatgaatgtacacactcacatcttgcaataattttaaaaaggactaacaatttaaatggttgctacataaataaacgatatagccttacataaaactagcgaaaaaggttgatattggctgtataacatgcacagtactaccaggctctaacatgcttcaaaataccgaatgattcattaaattgaaacattagagtaaacattttgtcgtggtcttgtatttgaatttcagtatataactgtatataatacaatattattgattttaatggtttttcaaacaatttttttttttaattactcgaattttttcttaatctcgaataagaaagattaatgctaatatatggaattataaatatttggtcacgattaatccgaatccaactacgaattcgatattgaaaatgtcaatatcatcatatcaccagataaataaattctgtcaattgtttctgttgccaaatcgtagtcatttgttttgaataaatctatggattaacaaatagcaacataatagcgacaaatgatcaagtctttttatccgccacaatttcattgctagttttgtcgtagacatggaccatctatatccatattcttggctatatatccagcattatgtattttgtagtaaaatcactacttgattggcaaattattaaccaatcccatttataacaaaacaaaactttatactcagaatatacttggttcgtagatttatagctaacataacttttttgcttctctctattattctatcattgtgtgtttccaaattgttgtcgatattgtgtcactgtaacgctttgccaaccgtagccataaagtgacaactttgtattcaactatactcaaatatcgaacttcccgagtatttttgactaattgaattgtttgaactttgactcataggtctgactaactcaaagtaagccaacccgagttttgaggatgatcgcatatggctattggctaacatatggatctaaatctgtagcaacttctaggtttggctttttgtaaagaatagttctattttgccaactccagcattttttgctattcattatacattcaactttagttaaaaactttgaattgaacaacttgctatttttttttttttttgcttttgttcttcaacggctgcatcagtattccagactacatcctccaatccagatgtttttgtagaactgcaaaagagatttaacttttaagcatagaaaaccgaattacaacaaataaaattagaggtaactgaaccggttggtaaagattaaaccgaaaatataccttgtgaaactcgagggtatcatcgccggttttcctaagctctaccacgtgcaacgatggtgccacttcaaacacctattataaccgataaccaaaccaaaataatcaggtaccggccgtattcatgaaaatctaaaaccgtactaaaccggaatgttatcattcctatctgtttttgttcataactctgtagctacagagtgctgacctttacgagttacgaccacttttgtctgcgaaatttacttaaacaatgtttaacaaagacacaacaacattaattgacacagagaaatcaagaagaagaagaagaagaagaagaacaaaccttgtagttgtcttgttgaaatcatgaatccttgattaaatttctataagaagaaaagtttcagtgagaagaagatcatagcaaagatgagaagagcaagtcaaagaagatattgggcttgttgtcttgtaataagtaattgggctaattgctatgttagtcccatataagtaaagtgttgtttaagtaagtcaagtctaggttagagtagttgttgttagagttccaatacaagtaggagggttgtgtaagagtgcctagaactaggagaagtagtacatgtatgtgttgtgttgtaagaaatcatcaatatcatgaatgtagtcttttattaaagagtaaaaacgagttcttgtgtttgtctctaaacaaaaacaaaacagagtgaaacaaagacagagatagagagaaagtgtagaaacacaacatgtgtttactgatattgaagccattcatcttctagtaactctgcaatacttatactctgcatttcagaaatactgtattactttattttgcttaaatttagaaataattctaagaagaatggttccgttctcacattgtattttcagataacatttttatcgaggatattaacaaaacacgctatcatataacactagtatggactcaaatttgtagttgtatcataagtcataacaaaaaaaaaacagcttaaacgaaaactaacgtcaatagcttttactgtatccaacaatatctcacactaaacctacaaaattctttttttttttttctctccgaagaatcttactcagagatttaagccgtgagttggccaaaacactagtgacatatattcacgttcaaaagtttatcttgcaaatcttggatttcttagtttcattatcagattaaaacagaatttcaataatgaggaaaaagcatacctactactagtctactactttctgcaacaacaaaacaaaaaaactaaaaccaagaaaagccccaaaagattaccacaaattaaggaaacttaaagcccattgatttcaacatctcaacagagctctgactttgattaaccttgttgtcttgttgaaccttgtcaccggagtttccaaggagagcttcaattatttctttaaaaggaataatctcttctttctctttctctttctctttcttgttcttgttctttcttccgtctactttccatttgccaccaccccattcatacgacggatccatccacggcggcaacaccctcctcgcagccacttctccggatgccgacgctgtttccttgtctgaaaccctagattcgatctctttcggttgattcgatctcgcgtaatcagattctggtgaagtgggaacagaaaccattacgattctttcttccggaggaggtgaatcccaatcacccaaaatctctacactctctgaatctgaacgtttctccattcttaaaaactttggaatgcgaaatttgcgactttatgggctttacgggctgtttgatttgaaagattagacaactcacacaacttattgggcaattaacgttggtctgctcaacaccaactcctcactagaaaccactccgtcatcaatgtgtgactgtacatcaaaataaaactttttttttttggttgcaaacgtagatctatgtagctaagataacctctctttaataattctatcattgtgttttccaaattgttatatatgttgtgtcattgtaacgcgttgccataaagcgacaacatcgttgcaactttcaactatactcaaatagccagcttgcagagtattttttgcctaattgaattgtttgaactttgatttataggtttcaaaccgagtttgaggatgatcacatatgtggctattgactaacctatggtgatctacctctatagaccacttctagttctagtttggctcttttgtcagcaatacttgtatattgccaactccagaatgtttactattcattatacatgttcaacattgattaaaaactttgaattgaacaacttgttatttcttattgcttttgttcttcagcggctgcatcagtattccagactacatcctttaatccagatgagaagtttttgtagaactgcaaaagagattcaaacataaaaccaatttaaacactaaactagagatgttaaccggatcaaaaccgaaccggtttttgatgaagatcaaaccgaatcacataccttgtgaaactcgagggtatcaccaccggttttcctaagctctaccacatgcaatgatggcgccacttcaaacacctattaaaccgattaccaaaccataacaattagataacgatattcatcaaaatccaaaaaccgaactgaaccggagtatttttttctttcttacctctgtagctacggagagctgacctttacgaccacttttgtctcctttcatttttatctgcgaagtttacttaaacaatgtttaacgaagctacaaagacattagttgacacaaacaaaatcaagaagaagaagaagaagaagaacagaccttgtagttgtctttacggacattaaagcctaatggctttgcggtttcttccattttcgacattatttcactcgcagatcgttgagaagtaaaccgcgtttctttcttcacaagttgctgcaaacaacaacaaatcagatttagttagataaaacctatgcatgattttagaaaatcaagacaaactgtaagtagaaaaaagttcttaccgcttgcttctcgaacaagttttcaagactgaactcgcttgagctagagataagttcgaaagcgttcatggatacaggtttctccttcttctcagttacaagacattcctagagtagcagcacaaaaagagtgatattagttggtaacaatacattggtttacttaaaccgaactatgatatacacaaccagatggagaatttggaaatggcggtgtttaccttggagttactaaaagcagcatcaacatcatctatggttatgtcctcgtcatcttggtcaaatgatggcggcttgtaccctttcttgaaccattcatcttcgagcaactctgcaatacttattctctgcatttcagaaataagtacatacttaagctcttgcacaatctatggttggcagcatgtcatgttcacattttcacaactattacttcatgtaagaggcacttacggtaatagggttgggttcgagaatacgcttgatgactctcttggcaccttgcgagaaccatggtgggcagctaaactcagccttgcatatctaaagtatatattaaacaccaaagatgagactagaaaagtactgcagaagatcaagaagcagagggagagataatttacacgtacacgtttgtataatgtcatgagattcggctcatcaaaaggcaagtaaccagccataagcacaaagagaatgacaccacaagaccagacatctgctgctgcaccgtcatagcctttgtccgacaaaacctgccagcaaatccaacacaatgcagtagacaacattaaaggcatatctcttatatacatcataaataaagaagattctgcaaatgaagtctatatatacgtatagcatttgttagatttccttcctttttaaaaacgtattagcagttcttgaattccttaaaatcttattttccaaagaggatctacagaacatttcatattctttgcctttttaagtgctgaaagttagtacataatacctcaggggcaacgtagtttggcgttccacaagctgtatgaagcaaaccatcttcctgcattcaaaagaacaatgcttagaacacttcattcaaattgatatcttggttatatatatcagaaattaattgccaagtgaaaaatataatggcattacccgaacttgtcgtgagaaggcgcttaacccaaaatcagagactttcaaaaccccatttgcgtcaaggatcagattttcaggctgcaacaaggaacagatgataacaaaagaaacttgaataagaactaagaagaatgaatatcgtaatcacaggaaacaagaagagtgcacaaaaacaaaagaaagaccttgagatctctgtggtagacacctcgactgtggcagtaatccacagcattgatgagctgctgaaaatatctccgagcttcatcctccttaagcctcccttgttgcgcctatgtatatgatttaaatccaagaattaacataagagtaagaagagagaaagacagagaacatatgtcaatatttgtgaagagaaaagagaggaagattctctaagttaggttacttacgattttatcaaagagttcacctccattgacaagctcaagaacgatatagatcttcgttttgctcgccataacctaccacagagagatgttttacacgctaagattcaaaacttaatttaaaaaatatctaaggaatgataactaattagtttcgtacctcaatgatttcaaccacatttggatgtttaatcagtttcattgtagatatttctcttttaagctgcacaacaacaaaaaaataaaactttatgatcattatatcttcgagatcttgctcataacttccaatcatacatatatagcatacaaaactaaatcttcaacagattcaaatcgaaccaaatcaaaaacaaagctactcgaacttcaaaaccatatccatatcatagttaatagttatcttgatcaatgcgtactaagatcagcatcgtgtagatatatacagaaacaaaaacattcatacaaaattcgatattttaaaatattattgttaacactttaatcaaacattaaccttaataaccgaacaccaacctaggaggacatgtgggtccctaatcacgaaattaaactgttctttatagtacttaaaaacaaacaaatccataatcattttacgtgatcaaaccaaacacaattaacgaacctgttcgaccattttgtgacggaagaccttttctcggtcgaggattttgatagcggcttgatctccggtgacggtgttcttggcgtatttcaccttagcgaagcttccttctccgagagttcgtcccatctcgtaattccctactcgcgtcctactcgccggcgtcgccttccttctgcttccactcattttctttttccgattaagaaaatcaacggctctagatcggcggcgaatctatcaatgtgattcttctccctcaatatctctccttcttctagtggctgcctggttttaaggctgacgagagaaagtggacgagcgagagatttaataggcgcgactgggagtcacgcgcgtattgtgggtcccgtatgccacgtaatgtcaaaaatcattattttgctctgttccgcgtcagtcccgtgttatttgtacttgtgtacgttcgtaacgttcattcttcattcatataaaaaaattccataattttgttcttgtgtggtaactatatacagaaactcctgtttaagtatatggattttatgaaaattttggggttttaaatttatgtggatatggttttatttgtaagggatgtgatttgatgtccttaatctttatgtgtatatgagtatatctttcagtgattcattccattctactgatgttcaaagttgactgttatcatattatttgatatagttgtattcttttcatgtagaaatattctctaaatataacttttttttttgtctttagttagaagttggaaactacctaagaacaataaatacatatatcaaatgttggtagttaaatgatgattgttatatcttggtcaaattttgtttaaatctatgataatattcgcatatacttacttttgtttaaatttgatgtagctgtttatttttgtttgtaacggttctaaatttgattatttaaagtatatgataataaataaatagataattgaaatagttgatctttccatgtgacgatgtgagtaaagggaacggtatgaatatgaaccccacatatccttcctgataaactcagagatttcacagaatgtgataatgtttttatttttcttctttcctttatttgtttctcttattttctttcatatgataatgccaaaatacgcagaaaaattaaaaaagtgtggcagacagtgtgagttgatgatttattgcatgactagtaataatgatacaataattttttagatatgttagtatattacgaacaaaagaaaatgcaaataatgcacaatgaaccactcgttccaataattgagtccggtacaaaaacatcacgtcaccatcatatgaaagcaattcatttggttatcaatttgaacttcttcattccacattttttttattttcctggttatgagttggaacttattggattatatggattaaaatttaaaacctatataaaccaaactattatttggtttgattttgtatttactttcggtttagcttggtttgtagatagttcgagtagaccgaacatccgagtcctacatatataagaaagattggcccattaaccaaatttaggcttgattgtgaattaacattagggcccaactaaaatacttttttttttttttgccatccaataacattattatcgcatatgttccgcatcatcgtttacacaaatgatcaaattgaccaagttaagtttcttttctctttttctacataatatttgttatttaaagcatttgtataaaattatatactgataagtgatggtatattcaataatttgtgtttgtctttttgtgatacaattaattatcctttatggttccatttttttttcgttgacaacgttgaacaaagatggtcaaggggcctaactgtttctcacacagtttcctttcagggtttagtatttgccgttttagtaacgaagttagagattcatacgtataattataaatagtagagtcgggtcagattgtgtttcttatctaattgttatatatataaaatttgataaagcatataatgtcttgaaagattcaatcgtgaaatatgtgtacaaatatgtaaaatctagttgcaccgcacggcacctttttttccttcctctcccacgtttattctcgcctcgtaacagaaattataacttggagtactattataaaatacctcaataattttagttctaaaaacatgtatatctaaatctaaaccattgtgtattttggagttgtaggagttttttttgtagtaatttagtaatacataacataaaatgtgtcttatgtttagatttgcctttcatacattgaccaacctaaatcggagtcggaccagctggaaactggtctaaatgtttaatcgagttttaggtaccctatctaaaacccaaacacaaactcagttttgctcataaataatctctaaaaaccaaacacatttcgttagaaaaacgactaaaaaccgagtttaattgaaatatactttctaaaccgacctacacgaaccggaacccgactgcatatatacttacttactcatacactctaacaatatagaatctattattgtcatccatcttttctttcacttcacctaactcccagtaaattaattaataaaaaggcgaatcataacttgtttagatcctcttgcaaatgaaccacgaaagcagcatgaacacgaatatgaagaagaggacaaggaaggagaagaagagtacgtcgtcaatggtgttcttgtattcgatgattgtgaatatatgtggaggattgtttctaagttattggctttacaaataccatcccacaaattctaatctttggatggttcctgttggactcatcttcttcatcactcctgcgtttctttccctctccattttgatctccgatctctgcgacgacgatgatgatgtcaatctcgacctcaaccaaatcaagataattctataaaagttttgactacttcaagtgttgtcgtttatttggtattaattattattaacctccgtacaaatggaagacttgtggttttattgttaagtttgtagattttttcacctttgtttccgaaacatttggtacttgtgcgacaagttatctccccatagtcttaaaagattaacctatttttaagttcttcaaaattatatccataattcccatatgattctctttttctcaatcctctgttttgtttaaagaagggtacaaaacaaaagactaacagagtgggacggctactacaaaagacacgttatcttctcttaatatcaacataagggatacaaagcgaacatcatctataaggactactgttaccaaaagatctacacggaggaatccgaaactgcgattacaaggaaggactaacatcaaagtcgtcacactactatactgccaattcaaaaggtcactaggatttgtcttaatgtttttgatatcaaatgcgtcatttaatacttctaaggattttatggtgaaaggaatcacatacgcaccatatttctccatttgtccttaagatcggaggaattacgagttgtgtggaatataccttttcccatctccaaaatcttcttccaaggcatgtttttgttgattgtatcagaaaatttctccactccctcctatccaaaataaacatatactataagtttaagctaaaagtgtatttcaagaaaaaagtgtggtggttttaccctcaacatcttctcttcgttgactgtccatagtaccctttttggctgatcattaacaacagcataagcttctccgcaagatttctccatatcaatgaattgatctgttgactcgtctaactgggaatttcgagccttaaggtgcttgaccagttcttgtaattgatgaaggttctcatgtagttgcattggtagtgaattatcagaaccattctctagttgactgttttctctcgtcatgactatatctccactcctcagctcactacatccatattgaacaagggtcttcgcagctgcaacaccccttgttctcaaagccgtggatctagtagcttgctccttaaaccaacaatagggacagtaaaaggttgcaggatcttcacaatcaagctcaacacacttcctgtgaacagcgagagggcattcattcccagaacaaggtactacaccatcgtctgcaatatcgcatacaatacatgcgtgttcgttcaacggctcaaagcttctgaaagtgtcacttgtcccaaggtagtggcgcttcttaagaggcacattatcataagtgaaaatgtttggagcagagttgacgtcctcatcaccaccatcatcacactgaacaatacaatgagcaatgcgcttttctctcacaaagccaatttcttcaacaatttcacctatctaagatagagaagaagataaatccaagtaagagtgtttacacaaaattgaactaaatcgaccaatttaaggttatctaagaccaattaagacataatttgttctaattacacagtaaaaaatatcaaattgttctctaacgtatcacaagcgacatccgagtaaagactaaaattcgagaaaaaataaattaaaggtttcttctaaaaggggtgcttacataaggactcttgaggagagcgatatcatcttcatcaagcgggagatcactcaccattttttttcagattccgagtgaagatttgagaaattcgaagggtttacgtgagatttcttaacgaataagaaaaagaagctactgtatgttaccgtttggtctctctgtaagtgtgtctgaggtttcgaaatttcgaatttaggcgaagaaggaagaaactgactcaatgtagtactttgcaatgtaactttctcgatggtccatgggccttagaaccgtcttaggcccaaatatgtccttttttcccattggcccaaatatatccaaaactttctaatttggttagaggttgctcgttgctgtattaattaatgttttatgttttcgtttagagttttgtaaagacaaattagagagagagagagagagacagaggcatttttggtcataaaatccacacagaggtggttcgacatccaggtgaatccaagtaataaattgcaggattctctctctataatatatatagatatagcttgcaatcatttcctgcgtttggatcggtctgggttttgtcgagggttttttggggaagacgaaattagggtttagttggggcaaagtaagtagtaaagaagaagaagatgcagcagcagcagtctccgcaaatgtttccgatggttccgtcgattccccctgctaacaacatcactaccgaacagatccaaaaggttccttctttctcaccctatatctctccctctctcttaatttgttcaacactacttaggaggctcttagagcttttttgtactgacaaaatcattggcttctgagtgcaagtaatactcttttgactgtaattggtggcaattagggttttcatttgaatctttctcgttaattccacaacacttgagagtctgttgttggtgatgatgagaagagacagtttctaggactaggaaattagtagatgcttggtgggtcaggaaactttgaatccggttttcaagaatggacattgaagttagatgcttgcttgatgttgttgttttgtactttctcttggcttgatgtcttccatggtaagatgataggctgcatcgtcatttccttgtcattctctttcctttgcttaaacgcagtaccttgatgagaacaagaagctgattatggccatcatggaaaaccagaatctcggtaaacttgctgagtgcgcccagtaagtctcaccttttctatccatcttcttatgtctcttagatagtaatggaagcttagaattactattattaatggtgaggtttatatagttattctatcttttgctctgttatattttcaggtaccaagctcttctccagaagaacttgatgtatcttgctgcaattgctgatgctcaacccccaccacctacgccaggaccttcaccatctacagctgtcgctgcccaggttgtttgtgatgataaaactcaattgcgatctatcacagaaatttaatgttgtttgggggtttgcttactgttgggtatgatttctgttagatggcaacaccgcattctgggatgcaaccacctagctacttcatgcaacacccacaagcatcccctgcagggattttcgctccaaggggtcctttacagtttggtagcccactccagtttcaggatccgcaacagcagcagcagatacatcagcaagctatgcaaggacacatggggattagaccaatgggtatgaccaacaacgggatgcagcatgcgatgcaacaaccagaaaccggtcttggaggaaacggtaactctctttacattattaagacaatactcaatctcataaattgtaacttgtatccattacttctttctttgctaacagtggggcttagaggaggaaagcaagatggagcagatggacaaggaaaagatgatggcaagtgaaaaggatccaaagaagctttgttttgttgatatttaggacttgtgagtctcgtaagggctttttgcaatagcttgtttgagttttttaacagaagatagactgtggagtagttccgcaaaccgtgttgtaatgtattgttatttagtacaagctcggatttagaaaacatcgtcatcgttcatcttattctgaaaatcaaagcattgaacttattattttctcattccggacgagtcttgacgatgaaattctgacggctaatgggattcataacaacgggaggaccagcggttcttggccatgcttggaatttctcatccgttgctgcccaccattctttgttagagacagttcctggagtagtccctgaaattttcacaagaagataaccattaagatcgtccctaacttgaaaacacacacaaaactagataaatcttgagcagaacttgcctccaaagatcttattatcagagataactttgtcgaagatgtatgagattccgaaagaaccgatgagagcaccgattatgtacttggctttacctcctgatgccattttcttctaaagctgaaagtgaaccattattacaacttaacactcaactcacaagaggagaagcaacaaagcttatgtaaggatttagtattaaggccaaaaaaacacagatcaaattcaattattgaagctttacttatcaagttatcatataaccaatgaagacggtaattcaaaagaaaaataaaagggtttgtagaataattgatacgtttacctttgccgattcagagacagtgaagcttaaacagtggactccagttccagaagaattcaacggtggaagacggtcgtccaactctatcgtcttatctctttaaaaactttggataaatctctgtgaaattaccaaaatgggcattgttttctgaaacgttaattactagttttattaagagacaaaactacaatcatcacaagggaagatataatagcaaatctactagtttgctgaatttcatcatacgtctagctcgagtaattgttataaccaaaacctgtaatatgctaatttgctagttgatatgaatttatttatttatcagtaaggaaaggtccaagtgtccaacattgttttcggcgtatgacacatactctattataagatgatctcggcgaatgccacatatattaaacactacactttaattcttgcagaattacgattcaaaactctttttttctttattctttcgaatcagtgctgcatttgacatgttcaaaacatgattctacttattattgactattgaggtcgtgtcgtgttataacatatgatttcgttggaaaactgtaaatacactaaagattagagattcgtagtttcatttattaataggtctaggggagttaaataagtttttgttttatatggtttttctaaactcataaaacccgaaatacagaatgaattaagtcaaggattaaagcaaatgattttgattgtaaatgactacatcacatgtagctttctagacacgtaaagtcaaataaatacaaataaattagatcacgacgtgagcaatttccttatccgactgtatttaaacgtctcaacaaactgacccgccaaaataatcataaataaatttccataattcgaattatataaacttaataacaaaaacaattatccttccttaatcctattttgtttttacttgattcttcattctcagaaatcttgaccatgaaggaggatcgtcgtcttcctcacaaacgcgacgccttccaattcttgaaaaccaaggctgcgtacgttatcgtcatagttctaacctacgcctttggttacttctccgcctaccactatcatcaaccgctgcagcagcagctgccaccgtctacgacagccgtggaaacgacaaaacctcaagtttgttcaatcgacaacttccgagttacgactccatgcggcaatcttgttccgccggaattgattcgccagactgttattgaccggatctttaacggaacttctccgtacatcgatttcccaccaccgcacgccaagaagtttctccggccaaaaagaatcaaaggttggggatcatacggggccgttttcgagaatctaatccgccgagtcaaacctaagacgatcgtcgaagtcgggagttttctcggcgcgtcggcgatacacatggcgaatctcacgcgccgacttgggctcgaggagactcagattctatgcgtcgacgacttccgtggctggcccggttttcgagaccggtttaaggacatggctttggttaacggtgacgttctgcttatgtaccagtttatgcaaaacgtggttatctcggatttttccggttcgatattgccggttcctttctcgaccggttcggctttggagaagctgtgtgagtggggagtgacggcggacctggtggagatagacgcgggtcacgattttaattcggcatgggcggatataaaccgggcggttcggatactccgacccggcggtgttatatttggtcacgattatttcacggcggcggataatagaggagtgaggagagccgtgaatctgttcgcagagattaaccggttaaaggtcaaaaccgatggtcaacattgggttattgattcggtcaaagtaacctgattccctttttcccataaggaatgaaaaaattcgatgtataaataataagaaaatgtgtaatattgcatagtcaattcatattttttttccatcttttgaaaattaatggatttgaggtttttgattgtgtaatgagaaaaaatatttgattgatcaggtgaaacaaaaaaaacatcattttttttgtttttacttcaaattgatgaagtgttccatggaagtgtattttcagaatattatttttttctgtgaaaaaggtaattaataaagggacaagatttgcgatctcaaaaactgttgcgaagattaaagaggatgccaatcaatggttctttgctcaagttcttgagaatcaggatttggtgaatgagcaagctgttcacatttcggttaaggttaagtggtctcctcctccccatgattggttaaaatgcaatattagatcgtcatgggatagatttggtgagattggaggtgctgcgcgggtttttgagagatgaacacggtaaggtcctaattcatgctagaagatcttttgcatctgttcatagcaagcttgatgctacttttctttgttggcaatgggccatggagagtatgaaaagtctcagagttgataaaatcatctttgcctctgaagacaatgatctaattggagctgttacgcgactgccgtcttggccttcgtataaatttcagattcactttttgttgggagaattaagtaattttttggattggaattgtgtggtgaagtaagaagctctaatcttggagctcatcttattgccaagagcgtgacaatggaggatcgccgccaatcgtatgtagcaaccgggtttcctttttggctgaaacatctttttgagaaagaaagaagtattgcttagtgtaatactcattgtggttgatctagaatgattgtccttgatcctaactttttgtatatttggttacagtcttgaatataaaatatatctttcagtgaaaaaaaaaaaaaaaagcacaacctctaagcaaagcagaattacaattaaacataattgggcctaatacgagattgtaagacagatgggccattgaagaagtcacattgcaaagtcagtcttatttagaaacgaacgataacggaagcttctctataatcttggggtactttaggaatttcgtctgccatattgatcccatttcatttatttttgtccccgtttccgttacaaagatttccttttatttgtttccattcaatattgtttgtgtctttgtgatacatagtgagacgtgtttataaccccagagagacctaatcgatcgaaattccctcaatttgaagatcgttagtttgttatctctttctcttctaattctttttttacttagatgatcttgatttccactcttcaaatcaagtaatctagtcgagtgtttgtgtgtgtgttcgatttctgaagaaaaacaacaaaattgaattcgttgtttggggggataacgatgatcagaaagctaaaagggaaggctctctgatttcaaaaggtatctttctttctttatttgtttcagttgtaaattacttccaaaagattccgaatctagtttctctcttccttatgtagtagatttgccatcatatcttctccggcttttcgccgttgtcgtgaacacaattacattccgctctcaccgccacaacaagaataaagcccataacgataattatcttacattccgcatacaacacaattatacaatctattggccacgtcattttctatcctatattttcagttattctttttttaatattttttagctctaaacataaatagattttcaaagttttttatcgtttttattttcaaattcctataatcgtttttgttttatttagatttattttatttttaattatatttttatatactactattaaaacgtattataaggttttttataagtgctaaaatttttaatttttttaaactaatcagatacaatatccaaaatactaaaaagtgtctctatctttttctattcaaaatattgagttgtctttgacaatattttaaactagttgtaaatcacagagataaacaccacataaatcaataaataactgtaatctttaccttgaagattttattcatatgaaatatcttatagaaaatacttcgttagcttgaaaatgcatatttagtttaaatacaaataaacgaaacaaaaagcaaaaagcatagacggatccgtaaatctactcttaagaagccatgcaagaaagattcaaagtcatcacaaaaaccaagcttttgtaatttgcgcaagtaattaacaaaaaaaaatgtaacaataaatggtgatcagaggcaataacatgttgggggggatgaagcctggtccgaggatactctctatgatcacttgaatcattaacatacacatgtatatatctataatatcctcgatccagacaacattcccctcaactgaaatagcttaaccctcatgataatcgatcttagcagattcacaaatttttgttgtagagagtgatagaggagagagagagagaggttggtgaatggtgatgatggtgttatgatgagggaatgatgagtggcggagacgaagatgggcttttaataagacacaacagaaacaggtcgtcattcctaaaccctagctttttcaaaaatatattttatttattataatatcaatgacgcagttactgcttatattttcgaatgaggtgacacgtcatacgtttaacttggcaagaaaaaaattgattttgattatgatttgtaactaatccacgaatcggtaagaaaatctacaaaatcttcattaatttgaaacagcttctggtctaattttctattttatttcagcaacttgtggtctaattagactatgaaaccttcacgcataactttctggtgatccaaaaataaaatcaatttgtattttctatataaattatatacgtcaatacgtgcatatatatatatatgagagagtctagtctattattgaattgcgaaataaagaaggcaatagaagttagtcagaagagtggttgggtaaattgaggatgaccatttaggaaacaaatattttcaatttaattttgcatcgctttttaggtatcctaccaacttcattaattataaacatcttttctctcaaattgtaaatttttgatatttatatgaaaccacaggctgccaaaaacataaatacatatgaaaccacgcatacacatatacattcgagtcttcatctttaattatgtctacggatttgtaattatttcaaattcataaacaaaaattttaaatttaataggatggattgatgacattaacaatcatttcttgttcaggcaagtgatttaaattgatgaccgtcaatttttcttttctgcaaagaaaaactgaaaatatcattttttagtagtattagctagtttagtatatatcatatacggcttaaatatatgtcggagataataagtagagataggtttaagcttagctagttggaagttttcggggagttgtttacaacgtgaagccatgttgttgtttctttctggcgtggggaattttttttcacttaaaagattattgtattctccagtttcattagtttattagtactgattaaaccagagttatctatgtactaaacattatgtgccttaagggatcttgtgaaacagatgatttttttttcttaaactcacattcatcgatatcaaggcatgaaacagatgatttaatcaattttatataatgaagcataaatattgtgattactgacaaacggagaagacgatgctccggatttgaaccatgtttgtttcaatctcaaccatgtttttggttcaaaattttatcattaatggtttaaatacttggtcgcccttacattatatgactatcgacaatatttagtagatttgttgttatttacgttctgagacatattatatgagtatttatttatatgaaggatacaggtctggctactacatctacgtagcattgtaattaggaacgtaataaatacaaaggactgtcaagttcttaggcatgtttgtctcgtagctcttcaccataatggcatccatttttaaatgatactactccatgcattgatgcttgataattttcaacattattattttgatgtataattatcaaaagtgtcaatattcgatatagttttatttatttttgggattgattcttgttctcagttatacaattttgttgatagctcgtcctttttaaatataaaattggtccctcgccaaagaacatttaagcaaaacaaaacttaactactgtagttatcttaatacttaattacatcatgtaggtaataaataactaatttttccttcgaatattacattattttccttctttttattttatgtgaatataatgaataatatcaatagcttactatagaaaactatagcatatatatatagactcaccatgacaccatgtatatttcacatcacgggaaattgtattttgatttgacttttcgatacatcttataaatttgactgaaacagtttgaccaacagatgtattatataaaaaagtttttttttggggtataatttgtggtggtatacaaaggttattactgcctgcttcatgattattgatcgactcaatgacaattatgtgaaaagctaaactgattgagcaagatttaaacataaattcatatacatgaatcgatattattcagccatgaatattttatgtacaatgaaatccccacttaaaactatacgcatcacataaagtaacaagagagtacaaatgagactattgcaaatagttatgcattttttctgtttcatgttaataaggtgtaacatatttcactgttatctatttcattttccagcatgccacgtctaaattcggatttttaaaataaaaaatggttaaaattatgatataatatatttcaaatagtacccctcgtagccttacctcatttaaaagtttcactgctatctcacaatttctttgtcctttatgccatacttgcaagtttgttattatcagttgtctatagcctttgtttttccaaacaaacaaaaaaaaaacttatgctcgtttgaatatcgtccttagctttaagctacgaccgcaatcttagtgtttagttgccaccgttgagtttgcaatgttgaacacactaccgattataagccagaggaagatgtggatgccgtcaagtcagtgtttgtaggttggttgtacctgtactattgttatcttcgtgtgctatatgatatcgctttaggattggttcacacttcacatgtaaataacaaatgggcgtaacccatattcatgctttaatatcatatacagcccaattaatattgattcctttcatattttcaaacccagttacaacttgggctcattaccaccaaaaagtttcatatgcatttccatttttatttttccaatttatcgaatgtatatgtaaagaacacttctacttaaaaatatatttaacgttaccataaaacaagattacaagttagtgacgtcatgttattgaacagtcagaaaccagtcagaaacactaaccaagtcgaacactccacgacgagatcgattaatatactacaattatacaaaaagctttaatcaaatacttcattctattatataaaaccgtgatgtcctttgaccgacttctttatgagaaatttcgtagcaaattaaggatgtccaaacaatttggagaagttatcgtcaacacgcaaaatatagtttaattcattttaggtaagtggaatgattcctaggataatagttaaaatcattttaagacaagtagaccttaagtaatcttatttcgaacattttaggacctttctaaacaatttacatcaattaaatttagtaagatagttttcttaattataaaacttatataacatttcccaaaaatatttgttcttagcctatcagaaattaattaaacattcgtccgaaaccatcatttacacaacatgattgaaccccaagctgaaacaaatgacacgattggttttagtcttttagagccgagtcatcgtacgatcaagcacatcatcgcaagctaataatttacaaagttaaatttaatcataaatatttgcttctatgtttttatcttttttgctatggaaccagttttatttttgtaaaacctaaccatttcacttgtgatgatttttacattttagcaaaaaaaaaacatgaaaactaaattcacgtaacaaacgatatatttatttcacacaagacatacattgatacattgatctcctaatgaataaaaggtgggcgaatctacttcgctaggatacattttttttttttccttttttcttgaaggtttatttaacattttttaattgccaacaatatttaaaacatccatgcactgacagtttacattatcttacgccttgagcttacgttaacgatgagtggacaagccatctcacacgagagcctcaaaacctccgagagatctggagggttagcttcgacgctaggaagccactcaaactcatgcaagagcgttgcaacccaaaacgacaccgttgtaagtcccaaattctttccagggcaaaccctcttacccgacccgaacggtgccaacctcagatccgacccgaaaacagagaactcagcttcaccctctttagccacgaacctctcaggcttaaactctaaaggatcctcccacacgtgtgggtcacgtgctatagcccacatgttgaccatcgcggtggtcccagccggcacgtgatatccatctacggaagtgtctgttatagacagtcgtgcccaagaaagcagtggacctggtggatgcagcctcaacacttctttgatcatagccgttagatacgtgagtgatggaaggtctgactcatccacggttcttgatctgccaacgactcggtcaagctcatcgtggaccgttaattgaactttgggatgcatcacaatcctcgctagcacccactcgaccaaaaccgcaacagtgtccgttcccctaaatatcatttcctaaacggaccaaaaaagttaatatcgtaagagaaatttttcttaatcatttccatgatttgatataaaaccaaacaattgttaatctattgtatacttaatacacttacttaattagtaaattttatggattcttcttagatgttatctagttgactaatgttgatattcatgatatacggattgaatagtgattaaaagacaaaacttacccaaagaacagcaaccatgtcggattctgataatttttctgaaccttgaagagaaagtaacatgtcaagaaagttacccgtggcagcacgttgttcatgtatgatacggctcaataacagatttactttcggtacgagctgcgagcacctaaaccggatttgttggaaatctaaaccggctaaccaaggaagatggtcggtccaatttaacgtacctagaagatcgtacccttcttcaaccaaaccctttaagcattcagattccaagttgttatttgactccaattcatactctctcccgaaaaccaaacccatcatgttacacaacgacgctgttttgagcaaatcacgcactgcacacgcggatttagggttacgtgcaaacgcattcaccatctgagtcgctatcacccgtctctgatcctccgattgtttgatttgcttcgggttaaaaagatggttcgagcctaaccgacgcagcgtacgccaataagtaccattgggagcaaatcccatggctcggttaaacatcaaaccgtaagcggtttcgtcaaccggtcggtcagcaaaaaccgaactgtttagtatctcctttgccacggcaggatgacacgtcaccaccaccttagtatcaccgaggctaaacgccatgagccgcttggcgttactcatctcagccacagacgctatgcgctgatgagccacgtggcttgacctaaggctcatgcttcccacaagtggaaaccctctaggaccgggaatgagattcttgtattttcggttgtaatcgagagaaataaaccggcgagtgaagaagtattttccccaagccggtccacccggagtagaccaaaatacgatggttatggtaaaccaagtgatagcaatggcgacgagaagggaagcaaaatgttgttgcatgtaaatattgaattttgatgcaagagcaaatacccacaaactttctatttcggttctcatgttcaaagagaacattatggataggataaatgttcttcttcttctttttttgtttgtgattttgtttttccgtttataggttgtgatttatgtttgggtctttgtgaggctttaaataggcgtacgaactatgaaggtcttagccaattgcaaaacagagaatacttgaaattataaatactttatttcaaagtcatctgttggtgctcatgggtatatgctaataagttatgacatgtttggtacactcaaattactatatcccctacatagaattttaatctaaataaacacaagtattgaagattatacttgcatatgtccgatatatacgtcagttctgaataattgtctgctatcgtcccctttttaatttattttaactatttcttatacattcatgagtattctatttctacaagtttttttctaaggaaacgcatacgtatacaatttacgtataaaatagtacggtttataaatcatgatttttttattatcataatgtgaagtaaaagtgagtatatatgcatcttaataaagtaatttgcgtatctaaacgtagtgcttaattaacaaaaacaatataaaataacatgtatacgtaattactattattttcaaagatgccaattttctgatgagtctcattgcaagttgggaacagtgaacgtacgactattctcctgcttgcttaccatttgactttttctattgttagtcaacgacctttccttttaatcatctacttttttatatactttccaacttacatatgtatgcgctttttcattccaaacaatataaatagattaattagaagaaaatttataacatgtaaatttcgttgtaaataacagatagctactaatctgtaactatcaaggctaaatataatttttatagctatctcctgcaaaaattgtcacctctttagtaaaatatatagatcgtcgaagtgtttaagacaccagcaaaatttatcataacattgtggccctgaatccaaatttcttcttatagtatttgtttaattcagttaatacatatacttatcttaactcgatcctatcgtttattgaaaatatataaaagttcaaaggagtaatttacattgttcttatataagaatctttcttttgctaatatacataaactaattagtaactttacacataatacagaggtatcagcatagaaaactaagtagtcacaaagcacttggtggccgattaatcatatgtgcttagatacaatgtaaatattaatgtgtgatgttttatatatctgattatataatatactctcctttttaggtcataagaggaaaagcgagtttgtgattggagcacttcaaatgattcggttgcatgcaaaaataaatagaatcatatcttccattagatttggattatattccagattctaacgtgacactcacaattgatgtcacgaaatatctacttaatgaacttattgtggttctgatcatttcactatcctaatctttgaaaacaaatctccatcatttcactaccatatagtttagactttttttttaaaaaattccttgctagaaatattgataaaactctagtttttacttaacattttgattgaatagaagaaactccttggaacttgacagaataaaagaattgttttttctttacatatacaagaatgtcaaagagattacgagtgacacatgaatagctttttgattttactataagcaccacctctaattctctaaacatgaaaaacccaaacaaagatccgagtcatatatgggcttaaagaaaggcccaataattggcttttgattttatggcctatcactcaaaatttcaacacgagcacgaagcttgttccttgatattactagtctcaagatccgaaccagagatgacatcaattctcgaaccgtcaagtttcacggtggctccaccgtcggattccatagcttttctcgaaacaacaacgcggctgaaaatctcctcgagtaaacggaaaaaagcttcgtcgacgtttccgccgcttagagccgagacttccgagaaaaaaagccgttgagtctcggcgaattcgactgcatcctccgtaggaacggcacgtttaccaacggagagatcggctttgtttccgacgagcatgatcacggcggaatcatcggcgtgagcacgtaattcctcgacccaacgtgcaacgtggtcgaatgagaggcgtttggtaatgtcgtaaaccaccatcgcacctaacgcacctctgtagtaggcgctagtcaccgctctgtatctgaccgccgaaacagggtaagcaaacaaatattttttaattgaatatattataacaaaatctgacattgcagaccaaatcaagaaagaccaataattattcaaaatcccataaatttaaatatcgtgatcctagataatataacgaaattctactctagtttattttaacatttaatttgtatacaaatctgagattcagctataaagaattatcaatgtaagactgcaatttcttcgctctttaattaatgcaaaacaaaaatatacgcaacatttatacatattttatcaagaaaaataatatgaaaaaacgatattaaaagaaacttttgcatcggtaagaaaaatataaagttttacttatgcaagtatgcaacaaagtattcggtgagttattgcatttgaccttttgatctataagtggttgcaaaaagacaaaaacaaaatatgcagaaaagaaatctgacattgtattaaccaaatcaagaacaccaatggttattcaaatccataccacaattctttacccaacaaaaatattccatattgtattagaaatatatttagttacaaaatcaaatcaaaccatatctaaattaccgtgatccaagtgaaatgaagtgatagtctaaacaaatgatttgaatccaaaagtgagagcttaataaaatatataaagaattatcaatgtgtttttggatatagatgatataacctctcttgaccggcggtgtcccagatctgagctttgacgagtttgccccgaagagtgatggtccgtgtctgaaactcgacaccaatggttgattttgaatcataacagaactcgttgtgtgtaaaacgtgagaggagctgcgttttcccgacagcagaatctccaatgaccaccaccttgaacacgtaatcgatcttttccggcatcgtcggtttctttacgtgtttgttattctccggcgactcaccgctcatctcttcgttcattattgcgctgatgaagaaaacaactataaagtttaagtctcttttgagtaaagtgggagtgagtgaaacagagaaaagagaagaaaggagaagaaatttggttttatatggttcagtacgaatataccgaattaacaaaaattctgaaccacttcagtgagattggttggattcactcataaccattcgcaaccatatttaataaaactaaaactgctacaaaccaaaatttcgtaaatttggtttggtttaagtcgttgaaataacccaaactaaaattaaatattgagtatcctaacctaaaagtgttgatatatgaagacagcaacaatgctctgtgcattattttaattagctcttcttttatatataattttaattagctttttatatatgattcaaaatgaatatacaatgtttaaatatagctgtggcttgtgggcatggaccgacataattgaaaaacgttattattttgctaaatcaatatagtgatacaacatgaaacccacgatttgtctggagaccacctaaaaaagctcttatgctccatcaattgttggttgttgtctacttctacctcatgtatgaatttattgctttttttttggtctatttctttagtttttatatggtgttgctgaaaaattaaatatatggattgtagcataagttgggcctacgtgatattttaggcccaataaaagttggggtgaaacaattaaagtatttcctaactaaaaagagggttcagaatgttgaagaaacagaaacttagggtttatgtggtggatgaatgatttagcagcgaattgaagggtgtggtggaagatggagttttgtccaacatgtgggaatctgttgcgatacgagggaggtggcaattcgagattcttctgttccacatgtccatacgtcgcctacatccaaagacaggttcttttttcaattatataccttttgaaagtttgtgagcaaaccgttaaaattctctcctctgttcctgagtgctttggaattttgacaggtggagataaagaagaagcaacttctggttaagaaatctatagaagctgttgtgactaaagatgatatacccacagctgctgaaactgaaggtattttcagtctcttgtcttctcttcttctaattttaggactgtgatgagttggttcagagttgatctcacttggggaaagagtagagtagacttttgtttcactttctttctcatgttgggattgtttggttttaacagccccatgtccaaggtgtggccacgacaaggcatacttcaaatcaatgcagattcgttcagcagatgagccagaatcaagattttatagatgcttgaagtgcgagttcacttggcgtgaggaatgaactgactgatgatcatcttctccgtctctttgcctctgccaattttgaaagtttctacttttgcaaccttcttagagtttgttttaccattgcaaatttagcagatcctttatgtactctgcttctttctgtctcacagctcaatagtttctgtttcgattaaattttggaatgttgtgcaaagttttaatctttgaggtgaaagagatgaagcaaattgatctgttttgagatttccagggatacttattggcttgagtatatctgtaatgtattaaaaattagttcggtaaagcttaatgattactgattctggacattagccattagtgatgtcgagtttattcccgtcattcgtaaacttgttattgctttaggtcttcccattaacgagcatacactagagaccagtttccttaatttctgttgttgatttggttgttgatgtgttgtgtgcattgctgtagaacagtagaagatatattgctttcttctttagtcgttgccattctttgggaacagtagaagagatggatttatctgagtttgcagagtgattttagaattgattctggttagaatgtagattgccttagccatagaacgtaagcgttatattctttctgtttcaggtaggagatagggaatttcgacgcagcacctgattgattctccagagatcaaaactaagtccacactaaggaccatatggtccaatcagttccagatacttggagcattgccttgtgttgtgagcataaaacggcaaaacccatgagcattgccttgtgttgtgagcataaaacggcaaaacccatgaaagaaggttgatagcattagagaaaacagagcattgcagctcacaccgtccacccatgaactgatgatactttcactattttttccggattgattgcatcttagaatcatagtcctgtttccattggccttaattagctgtttaagtactaagaaaagtcttgttaccttgtgatctagttaattagctgtttaagtactaaggaaagttttgtaaaactaattaagaatcataatcctatttccatcggcctgagggaattactttatacagtctactacaattggccttgaacttgtgatcttaaacttgcattaatggagacttgatggagtttggagagcttcaacaacattttgcggctgagactgatctattaaattttatcctggttcaagcctatatctttttctcgactgtttcatagagcaaatttataacaagttgttttaaaatcctaatgatacattattattgactttgagtatacattattattgactttgagtatacaaaatctatacaaactctttttttttttttttttaaatgtcttttgtgataaatttcttgcggtagttttaaacattcgtctattgttcttgcagtgaactcatcagatctgtcaggacatctatttgtatccttagaacccttgcaactttgtaatgaaattttcaagtggagtagtaacagcaaccactgcatcaatggagattaaaagagtaaaaactatgaaaaggaaaaaaagaaaccacaagcctactacatacatcaaagatggcgaaagtagaaacattagtaggaataacataaaacatttaaatgattcgaaaagcagacattgttgaattaagtaaattcaaactccagcgtttgcagagaaagtttgttttttgatacaatcaaactcctcgacactcaactccttctattctccaaggcccataactttgataatagcaaaagcccaaaggcccaaatatgaaaagctcgcttatcttttattggcgtgaggactgaactgattgatggatcatctcctctgtctctttgcctctgccaattttgaaagtttcttcttttgcaatcttcttagagtttgttttaccattgcaaatttagcagatcctttatgtactctgcttctttctgtctgctcaagagtttctgtattcgatataattttggaatgttgtgcaaagttttaatctttgaggtgaagcaaattgatctggtttaagattcagtattgagacgacgacgtatttattaattgcattggtatttgactttgatctgaacaaaacttacttcttcttctccctcttcctctgttcacctaacctttaggctccagattttaatttctcacatttcttcgtctttgtagcaagaagatgtctaagcagaggaagaaagctgacttagccaccgttttgcgcaagtcatggtaccacttaaggctctcggtgcgccatcccactcgggtcccgacttgggatgcgattgtgctcacagcggctagtcctgaacaagcggagctctacgactggcagctccggcgagcgaaacgtatgggacgaatagctagctccactgtcactttggccgttcctgatccagatggcaaacggatcgggtctggtgctgctactctcaacgccatttatgctctcgctcgtcattatgagaaattgggttttgatcttggtcccgaggtaaacattgtgttgacaggttagactattcataatttgacctcactgtatctcttgcttgagttgatatctgaatcattacggtagttggttttgttgattaactttgttaatttgatgaatctgggatgtgcaataaactacatctgtttatatagcagtgtggtgtgatttgatgttgtatgttaataatcaacagatggaagttgcgaatggtgcttgcaaatgggttagattcatctctgcaaagcatgtattgatgcttcatgctggaggtgactccaaaagggttccatgggcaaatcctatgggcaaagtattcctcccacttccttatcttgcagctgatgaccctgatggtcctgttcctctcctttttgatcatattcttgctatcgcttcatgtgcaagacaagctttccaagaccaaggtgatatcctttttttagctatgtaaaacatacaacggatgctgatttttgaattttatttgtgaaggtggattatttattatgactggagacgtccttccttgttttgatgcttttaaaatgactctccctgaagacgcagcttccatagttactgtgcctattactctcgatattgcctccaaccatggtgttattgtcacatcaaaatctgagtcacttgctgaaagctatacagttagtttagtcaatgatcttctgcagaagcctacagtagaggatcttgtcaagaaagatgcaattttacatgatggacggacactccttgacactgggataatatctgctaggggcagagcatggtcggacctggtcgctcttggatgctcgtgccaacccatgatcttagagcttataggtagtaagaaagaggtaagtttctcatattatgcagcttattcctaaagaatgatattgtacttcttcaacagactttgacctcttatacatgttttgtaattgaatgggtttttgactttgcagatgagtttgtatgaagatttggtggctgcttgggttccttcaaggcatgattggctgcgaaccagacctttgggtgaacttcttgttaacagtctggggaggcaaaagatgtacagctactgcacctgtatgtttgtactgatttcaagactagctaaacttaaaaaaaaagaaatcgagattgctatgcttacttttctaatctctttgtatcatcttgtgtcagatgatttgcagtttttgcattttggaacatcaagtgaggtattggatcatttaagcggggatgcttcaggaattgttggtcggagacacttatgttccatccctgcaactacggtttctgatattgcagcatcttccgttattttgtctagtgaaattgcacctggtgtctccattggtgaagattcacttatatatgattcaacagtttctggtgctgtacaaattggttctcagtccatagttgttggtattcacatcccgagcgaagatcttggaactccagagagtttcaggttcatgcttcctgataggcattgtctttgggaggtcccactagtgggacataagggaagagtgattgtgtattgtggtctccatgacaatccaaagaactcaattcataaagatggaactttttgcggtaaacccttggagaaggtattgtttgatcttggcattgaggaaagcgacctctggagctcgtatgttgcacaagatagatgtttgtggaatgcaaaactgttcccgattcttacgtatagtgaaatgctgaagttagcgtcgtggttgatgggtttagatgatagtagaaacaaggagaagattaagttgtggagaagctcacaacgtgtaagcttagaagagttgcatggatcaatcaactttcctgagatgtgcaatggttccagcaatcatcaagctgatcttgcgggtggaatcgctaaagcatgtatgaactatggtatgcttgggcgtaatttgtctcagctgtgccatgagattttacagaaagagtcattaggattggaaatatgcaagaattttctggatcaatgtcccaaatttcaggagcagaactccaaaattcttccaaagagtcgagcataccaggtagaagttgatcttcttcgagcatgtggggatgaagcaaaagctatagagttggagcataaagtatggggagcagttgcagaagaaactgcttcagctgtgagatatggttttagaggtaaaaatctagccaccaccgtttggtataacacctttcataaacctggatttaactcttttatttgttcttcagaacatctgttggaatcaagtggcaagtctcattctgagaatcatatttctcatccggatcgagtttttcaaccaagaaggacaaaagttgaactaccagttcgggtagattttgtaggaggttggagtgatacacctccatggagcttagagcgtgcaggttacgtcctgaacatggctataaccttagaaggttcacttccaattggcacaatcattgaaacaacaaatcagatgggaatctcaatccaagacgacgctggaaacgagctacacatcgaagatccaataagcattaagacaccatttgaagtcaatgatccattcaggcttgttaaatctgctctattggtaaccggcattgtccaagaaaattttgttgactccacagggttagcaataaagacatgggccaatgttcctcgtggcagtggtctaggaacctcgagcattctagctgcagctgttgtgaaaggacttctccagatatctaatggagatgaaagcaatgaaaacattgcaagacttgtcttggttctggagcaactcatgggtacaggaggtggctggcaagatcagattggtggattatatccaggaatcaaattcacttcaagttttccaggaatccctatgcgtcttcaagttgttcctttactcgcctcgccacagctaatttcagagttggagcaacgcctccttgttgttttcacgggtcaagtaagtagcaaccactgagaggaagaaaagattttttgttagctacagagtctcattcattttatgccttttttatataaacaggtcaggctagctcatcaagtcctacacaaggtcgttacaaggtatttgcaaagagataatctcctaatttcaagcattaagcgattgacggagctggcgaaatccggtagagaagcgttgatgaactgtgaagttgacgaggtaggcgacataatgtcagaagcttggagactgcatcaagagctggatccgtattgcagcaatgagtttgtggataagctttttgagttttcgcaaccttatagctcaggattcaagctggtaggtgcaggtggtggtggattctcacttatattggctaaggacgcagagaaagccaaggagttaagacagagattggaagaacatgcagagtttgatgtcaaagtttacaactggagcatctgtatttgaaagatacatacagtgtcagtgtgtcatcatcttgattcttgtaaattgatatatttttttgggacctttggaaaaaataaaagcagaagaatctttcagatttgcaattaaaaacgatgtcgtgtggtaaacaaaatcctttgcttgaccaagtcgttctcttcttgcttctggttggtttacttcatagttcaacgaccaccaagctgtgaagtgaccgtattacccctgcctggaatcaaggtcaaaaggccccggaaaatcagtacgttggtagcatttggatttggagataacgccgttaaaagactctgtaacgggtttgctcaacagctctctctagttcgtttatcgaattagataatgccactccaaaaaacgttactttaccttacctatctcgctgacgtcagatcccaccgttagagcttacacttgtaacgccgtttcctgcattttccacaagcaaggtaaaaaaaagctttgtgcagagagagagagaagaagaaaaatgggtttgcttacgaacaagattgagagagaagagctaaagccaggagatcacatctatacttacagagcaatcttcgcttattctcaccacggtaactttagattcattcttcccaagtttgctcctttctttctcgttcattcaatcataacatcaaaaagtgaaattatcctcaatgcaagtcttttcttttagtttctactggtcggtttaatcttcttattgaaactgtaaattcacaaagttgacgactttatctagatagatcttgaagacaatggtctatattccaatctttgcatgacctaatttcaccctggctctgtattttgatgttattccatcatatcttctgatctctgatggactttatagatgatttttgtttatttgacatatttttatcccaatttcctctggtgatgaagaattgatactgttgtagacattccttcatgggctttgatttgattgtggatttttgcaggaatctttgtcggtgggtccaaagttgttcatttcagacctgaacacaaccccatggattcatcaacatcatcaatatcatcatcttcctctgaagatatctgttccatatttcctgattgcggtttcagacaaccggacagtggagtagtcctttcttgcttagactgtttcctcaagaacggctcactctactgcttcgaatatggagtcagtccatcggttttcctaaccaaagtccgcggagggacttgcacaaccgcgcaatctgatacaactgattcagtcatccacagggcaatgtaccttctccaaaacggatttggcaactacgacattttcaagaacaactgtgaggatttcgcgctctattgcaagaccggtttgcttataatggataagctcggtgtagggagaagcggtcaagcttcttcaattgttggtgctcctttggctgcactcctctcttctcctttcaaattgcttattccaagtcccattggtgtggcaacagttactgctggtatgtactgtatgagtcgctatgctaccgatattggtgttagaagcgacgtcattaaggtctcagttgaggatttggctctcaaccttgacgtaaagaccattgagcaaggtgaagaagaagaagaagacgaagaagaagattctgataccgactatgttaggtgacaaacagatacctatcacctttgttcacgaatttcgatatacataagaaaacatttcagttagaatcctcatgttggttttatgttccctttattgcatttgttggcctattttctgtctgtacaaaatgaaaacgcagacgttttggtttgggtaatgtcaaaaatatcccaataattaattaatgcccagtgtagatgcaaaaaagcagtcgtcgtctttcacgggcacacaaaattaaaccaaagaaacaaacaatccttgttctcgccgaaatagagaattttgtgaatctgggtttttagttcaggtgttaatataagattttgatcaaaagaagacgagattcgatccgatccgatctgattgaagaagaaatggcgaatctgtatgtgaaagcggttccaccaccggatatgaataggaatacggaatggttcatgtatccaggagtttggacgacttacatgcttattctcttcttcggttggctcgttgttctctctgtctctggttgttcccctggaatggcttggactgttgttaatctcgctcacttcgttgtaagtcttcgattgtgtttatgctttagagatgattttttcacttagggttgtgactttaaattagatgatggattgattccttgttttttttttatttcctgagatctggatgtgaatctggctctagtgtttgaattgatctctttggttattagcaattttttagttggtttagggttcgaatgaagaggcaattaccttctgattgatcagttttagctatcgtatatcgttgagcttggatcaggcttcgaattaggatacagttaccttcttatcaatgaattgatcagttttggtatcagcgattttgaattgatctgtttggatactatcagcagtgttgactgttgagttgatcaggcttttaagtaagatgcaattctcttctaagtttgaattgatcggttttggatcaggcttcgaattaagatgcaccttctcgttaatgaattatcagtttttgatatcagaaactaaaactacctatggcatcaatgcaatttcttaaggtctaactgtttgatataatgcggtgacttgtaaattggcattgcttgattgtcaaaaccaaatttaatctaatttctaattactctttaggaaaatgtgatgtctgagtagaaatttgtggatatttgttgtcaggtaacgtatcacagcttccactggatgaaaggaactccttttgcagatgaccaaggaatctacaatggtttaacttggtgggaacaaatggacaatggtcaacagcttacccgcaaccgcaaatttcttaccctagttcctgttgttctgtaagtcccagcaccttgttcctcaaaatctcaccactcttgtctatttccaatctatattttcttagcaaattattttctttagctgcatatatccttgtgtctcatatggttaataaatatgctaatttctcaatacacatatctaaatccggtgatgtgtaacggactagttctagagaactctgtatacgcgataatgtgtataaacaagagctgcatttatctggatgaacttttaagattgagctctttagcttttgtacttgttttctgactttataacgacacatttaaaacaggtacttgattgcatcgcatacaacagattacagacatccatggctgttcctcaacacactcgctgtgatggttctcgttgttgccaagttccccaacatgcacaaggtacgcatctttggtatcaatggtgataaataagtttcctttacggcaagagaacacctgaaagaaggaaaaggggatataagcgaacatatatatgtgtaaatgttcatatgagttggtttaattctcgagtcatgttttttgttggatatttgtaagtaaactctctaattttgaagctttcatcttttaccttttataatagacacgaaaaagctttcccttcatctccccacttcacttcagataatgggcctaatagcaatatgggcttgaacaataattgaatttaacaatggcccaaagattcctgtcgtggtgactcatgagttatcataacaccagaatgttttcgattgagcgtaatgattcagtgggatctaaagaacacgtggctgcctacaagatctctaacagctggttaatgacacgtgtcatagttaaagtccacctggatggatattatatcatggtgtacgtatacaaaatagttaatccctcttcaaaattgaataaagctaacaaaagtaatcaattaacgtgattaaaaaaaaaaagagaatgctaattggaccccgaaaacatgatatatcctgcaaaattaaagccgacaaaacgaaagaatgactaattaaagttggaataagactaatgatttttttttttttttttcttattgtggtccaatgtaagaaaataaataaaaacatcttatccattaaatcgaaagtagggtccatatcgtaatagccgtcgattctctctttagccaacacgtgttgtcaatccagctgtttcagatgcttaccaagccaaacaagttattgaaactgtgtcgttttgtgtccctaactcggaagcttttacggaagaaactgtaaatttggttccatggggccagagagtgtgagaaacgaaaattaaaaaaaaagagaagaaaagccaaaagcttcggtcgcgcaagatcgcttcatttgtttctagagtgattcatggattctttaaactactaataatggtatctttagttgttacttcgttttctgatctattttacaaatcttactcttttgctctgttttcgtggttttgtttagataaaagtctctgttcttctagtttcttccatcagactgttttctcatggatcagtgatgatttttgtttcctgggtcaacttctgattttggaatttctgaaaattttggtaaatttactcgatcccattgcgaaatcttacgcatgatctttgtagtttgctctgctcaagactttctttttttttggttctgcagtatgtcttaattgctctgaaacttatgtcttgttgtgtttaatttggtggtgaaatatattgtcttctttattcctggatctgttaagattgtttaagatttcatatacgttgaattggttttgattgaatatattttggttcccagacgttgcgtgtattatttaatgtaaattccttaaatcattggcttatctatgaatcaatcatttgcttagaagcaatctcatgagtagcaagaaaaacgaattaatccttcccatgtcttttatgtttatattacaggatctgggtgaaaaaagaacagtcttttgatttggtgtgtttctcttttctcttaattttttaggatttttgttgtgtcttaatgaaataatgggagcagctgaagcaagagcattgtggcaaagaacagctagtcgttgctttgttgttcatgaggatgctaagatggctccgaggttagcttgttgccaacaccaacaatcttcttcgggcaacaccgaaaaaaacagcttttcttccggaagttttggagattcctctgatttctcttgtgataccaaatggtggcttaagggatcaactggttttgatgaggaggttacaaactcctttcttgaagataccaaatgcaagaaattgcatgaatttgtcgacttaatcggaatacgagaagaagaagactacagctttattagcaagaaagctgacgctacaacaccgtggtggagaagcacgacggataaagatgaattagctctcatggtggcgactaaatcggttgatcataatatccagaattgtgatcttcctccacctcaaaaactccacaagagtattcactcctcgagtggagaaaaagggtttaaaacagcggttaaatcgccatggaagcaaggagtttggaaggatcggtttgagagatctttgagttacaatggtagcacagagagcaagaacacgagtccaatgtcttcccctagaagtgatgatctaagcaaaggtcagcttttagaagcactaaggcattctcaaaccagggcaagagaagcagagagagcagcgagagaagcttgcgctgagaaagaccgtgtgataacaatcttgttgaaacaagcgagtcagatgttggcttataagcaatggttaaagcttcttgaaatggaagctctttatctgcagatgaagaaggaagaagaacaagaggaacaggtcaaaggaatgaatctgaagaagagaaaacagagaggggagaagaagaaaaagggtgagactgggagatatatgatggcttttgcattagggtttagtctcattggtgctggtttgctcttaggttggactgttggatggttgcttcccttctagaatcttgaaatgtcttctctttggtcactcatcttttcaagagttttaggttttataacttttcactttacctctaaaattgtgtgtatattttgttaatgtatgtattgtgtgatgtttgtgtaaatttaatcttctgtagaagtttatttggttagggtctctctctctctctctctctctgctacacaaaattgagaagcatcaaacttggaaattcatcagaagcttgagaatgttggaatcaaataaatcttatatttgagctgaaagtttgctacaagtggacctcatttgacccaattttctaattaaggcccatatgtttttcagacccaaacttttttattttataatttctttttaggggttccaaaaaaataatagtatttgcgttttgaacttctaaattctaagcatggtggaataagatttaatgattatggtcttagttgctttaaaatttatcacggatgtttaaaattaaaagtgtgatcacttgaatagtttgtgtttatgcatgcttctgtgaaatatatacaaaactttttgactaaatcccaaaattcaaatctgtataacgaattcctttgataaatgtgactttaaaagataattccaaaacattgaaaacatatgtgttttaacttcttctttttttctttcaaatatcatacaataggcaagtctggatgatgagacgtcaattactagcaccgacgactaaaatacatgttttcatcatcaaatgtctttaaaattcatatctcttttgtttgtttgttcatatctaagatagcaattaatatacctctatctgttggggtcaaatgtgatattatatctccgtatttattatgaataatggttgtaagaagctttattgaatttccagcagaaagatgttttgttcatcattgagtactactactatggttcaaaatgaagcaaaaaatttcccgatttataataaaccataattcgtttttcttggatgctatgatcgattccaaaccactaaatagcactaaattgttgttgcaacaaatccttgtctgaaataataaattcgagtatcgttttagccgttatttttaaaacacgtgttgtattaaatatcttattatgtggtgccaaattgtataatgacgatacaaaggacaaatgttaataatttcaaatttcccacccagacaactcttggttctatgcttgtaccatctccgcgtcctcgtcttgtcgtgtgtcctacacgaacatactattagactattagtgttacagtactacagcttaattaaaatatgcacatgtcaaaatatttaaggactaactggtcaaatagccccaaaacaattcaagattgattaactaacatgttctctaaaagaattgcttcagtaacctataatgtggtattgaattctcgaaaatgcatttaaaacatctttatatgagcttacatataattgacttaaattgtttgacggaaataccgaattgtatgatgctgtgagaaaaacatgaaatacaaatattcatgtatagagtcgagtttaggatttgatcaagtgtcgagcttaattaggactcgaactgataatacaagaggtacatatacggatgcttcttttttggacgaaacatatatatggttcagttcttaaacacgtatattcataccaatcatatatatattctggaaaatgaattgagttcacaatttccatgtgtttccacgtggtcaatttaggtcgaacttcaaatgttttaggaaacaaccgttaagaaaatcgctctacggatgtattcctgtcagttaaaattatcaaattatgtggcttgtttgcgactttgcgttgtgtgttttttggcattcaagaaaaagaatgctggattatactaaataggaaccaaagtagcatgtagtgtcgtgataaacgacgtgacaaattttctcgcccgcccgtttcctcttggtacgaaaagactccgaagccttggtgattcgaactgtcgaagagttaggttaagtccaaaatgtcaaatgaagcatgcagcttgaagagggcacaatcgtcctttcccctgatatttatcccatatttaatacatgacgctaatggttagcttgagtactgagtaactttaagcgacatttataagtatcaatgaagctcgagtactgatattattaacatcttggaattaaatagctcactatcaggggaaaactgaaaagcgaacaaaaattattggaagaagaaattattgccaaccgtacagttacaagtataaatgtcgatatatcgacacaccaaaaaaaaactattgcattcacatttaaaaaaaaaaaaaaaaaaaaaagatgtatactagtataatagtatatctgtcacaaacacatatcaggagaacatctatcacgaaccccatgactcatttaaggagtctttcttttttttgttttctatgaaaaaacaaaacaaattaatatgataaatatcgatagtagttttaaagtaatatttcatattgaatatggatatgggtccgagaagttactattgcatgaacaacgatagaaattggaccaaactaggaattatgctaggtatcgaattatactttccctacataaataataatcagaagttaaaagctccaaatgattaaaaaccattactgtagagtctgtacttataatcagtactcagtagctacataatgttttcaataaataaagaaattccttaaagagtttttgacacttagttagtaaagttgcacaaataaaaaggtttagaataagtagcaatacttatgcaaacaaaaactgtatataagaacatacacttatacgtatttttgtagatgcgtacaaacctgataactaacttgagaaacaggtatctaattattaatcgcgtaaaacaataaactagaaacaaataaatgaaaatatacatgcatatgcattaaattaagtgagccaacacaataacgatacaacgtacacgtataacgaatacgacacaatcgacagcaacactcacagacacgccatgaactgatactgatacaagtctccgtcgacaagccacgtggcatcatctccggcaacaaaaggctccggcgaccacccacctccactcatcataagctcaggcagctcaatgccttcccagaaatcatctccgtcgtctattcctgccacgtcatcatctcccattttgatgatcttcacggcgttggctgctttggccgctgcgacttggatatctctgggagtacacgtggacggtcgaggtagatcctcgatttcttcagggaaattcagctgagcttttctaccttttagacaaaacgctgccacgtcgtaggccttagcagccatctccggcaccggaaaagatccgagccaaatccgagactttttccggggctctctgatctcagaaacccattttccccatcggcgtttgcgaactccgtggtacactggatgcctcgtggtcgatgagctggtttctttacctcctccgccgcaagatttaacggcagaagcggtggcggttggttcgttgttggtaactggtggtgatgatagcttcattctctgtggtgacattaaagagtttgttatgtggttaagtcacactgttatctacatttataatctcatccaatcccattttctaaccaaaagcgttactgtttattatctgaatttacataaatgcccccaacgtacatttaaatcatagactttcgattaccggaatgtaattttccaaatctactgccaaatggatagtagtacgtagtgtgcgtaattctatttcatatgccgtaactaataataatgatatactctttatacaaaaaaataatatacagaaatcagtgggaaggattttccctattttatatctgtagtttgtccatgggttgtaaatttcttacaataaacagctgaatcaaattaaatcagtgatagttttagtaccaaaaagatgatttattaaaataaaaattgcgcgatcttgcataaaaacaaaattgaagaacatgggggctactgataccgccgatgattaattaactttatatgtcaaattaaaccaaaaagtatatatgtcaaatctttgtctccccagcaatcgggagtggtggtggggaaatgctttcaatagctcatgtactggtgacgttgtgtcctatagttttagcacttctttcaacgaattggtaaaaataagtgtcgatggcaagaaagagactaaataaatcttatgtctgaaaagattatgaaactaaagtctaaaagggtattaaaaatatattatgtagtatgtaatgttaatagcttagtacagtagtactagtacacctactcacatcttgacatatcgtagtgaacttgtgtatacacgttgcatattaagattaacactcaagtattttactccaaaatttgagtacaagcttcagccaaagttaaaataagtatctgacagtggaaaattataagtgtgcttacaataatttattattataatgaaatcactttgttaggtgtaattttgtgtgcatgcatgccatgatcgtgaaaatatatctacaaagaaacccttttcctttcctaattattaacttattaatttattttcttttatatatatgatatacttgggcaatgcaggtccacataggttgcttttaaaaattagcattgattattttttgaagggaccatagtctaaactctagtctataccactcataaatctgtactactcaaaaaaaatgtctttcatgattttgcattttgctactataattaccattacaaaagaatataaacttttcccatgatgtagtacgattattacaagaagaaaaaaatgacaactagctaaagttatcattcttaaggaaagaaaaatttaaggtatcacaagaaaattcacgtcttcgtacggtgatttgtaatcccttaagcaaaagggcagttgataaatatcacctgaagtctatggtttccacattttaacccatcacgtcactacatattaacaaggaaccattgaaatttacttcaagtaattaatactaatatcgcaatcaatttttttattgaaaaaattggggaaatagatagcaagaggagttacgaaactcactttcttcttacatcagatgagaccatacacggctttactatcagttttgtctccgggtgctttcgtgtaaacaattttaacacttgttcgtttttaaaacagtaagtaactgaaaatatatatgtatatgtgtgtgacgtatatatgtatatatatatttctttttttattgagcttcgagatttgtttttttgttcatacgatgagctttaagttttggtcggttcttttttccttttcgtgagttgttggtagattaaagtagtcatcttatgatttgtgttttttttggttgttaccaaaaaggtgacgattttgttgacgttaaacacggaattcattgtaacatgaatatatcaactataaacgccaaaatgggattttcttttttttataaggtaacaaaattaaggaaaaactattgttacaacttcaacttgcaagtatgtttctgaagctagagtttacagtcacgtgtgaaaatcaaaccaatttggatcattattgaagataaatgaatacttgatatattgttagtacaaatttaaacaaagcgataggtttagtggcattcagaataagttcaccaagaaccggcactactttatccgggattaaatcaactcttacaatagagttaactggactaataggccgatttgttgtggtaaaacaaaaccaatgaaatatatgataagattgagatttaagaattcaagactgagtccgttgaacagcccattctaattctgattgctagataagggatagatggggggcattattaaggtttgggaaaaaggctgatatcacgtttgacctagcacatatgtggcccaacattacaagaattccatagaaaaccagtattgtaatatcggcccatattatattcttgacgacttggagatattgtaagtcgacgtcgttgtttgacttagatgggaatgggacccaaacgtctcgaataaaggatagtttaaacacgtgaatcacgcggtccccactttttgctgtgtgtttctcaccgccatacatatattatacccactcgtgacttcattttccataattactatatatactaattttttgttttaactttatcgtttgttaaagatttttccaaaataatatagtcattgtatattcattttcgcagagccgtagtttatattttgatgataattttatgacttaaagagtgaaagctataaatatattacaattcaattgtggttgcgagagaataaacaaaaagagaaagagaaaaaaaaaacgttacagaagagaaagtgcagagctgtgcaggcgcatttgaaaatgaaattaaaaagaaaaagagatccaaagaaaattaaatgcatctcacgttcttctcattctggtcatctctcctaaatccacgtgaacttcacgtgcttttcacgccctcctctctatcgacttggcgtttcctttcttctaaaggagttgaattgttttgtcaacatttatcaagttatttagtaatttgtttttttgttttgtttttaaaaaaattatttactcccgttgtagaaccaccatcaataatattaccaaaaataataatcaaggatctaaactaaaataagccttttattttgtataattctgaaagcatttgaaacttaaggaacaactctttagtctttgcaacaaaacaaaacacaacaaaaaccgaatatttaagcctaacttgaatgtgaattgatttggtcaaaattcccggtgcttgaccaccggtcttagttggcatactttgcaattatgtaaacaaaaattttaaaaattgaaagcaaacttctaaatttgggtttggtttcccctttagttatttccatgaacatgagaatctaatctcgagttgtcagatagtatttgtttagatctacaccagttgagatagatctgttgcaaatttttaattaatcaaaacccataattgaaaattatgtcaatcaattattgacaaaaaccatgacataatctaaggggttttcaatcgtcgtgtatcaaagactcgagacaaagactaaatcgaaccagacccggtttaagtttctaaactcaattgtgtagttaagtagctaaccatggttcagatgaaagtctttttgttttgttttttgttttgtttgttggggtttggtcttttaataaaaaagagcacgaagaacatgcgtcggactctctctcttccttgaattcattcaattggccacggcgacaaaacagggagccgatacagcgaaactgatacatctttttttattttctggattcttagggttctttttcggggaatttaggtaatttgtttgtccattttggtggggtttgggagatttaaaatttgtgtttttttttgggtcggattctcaaaaatctgattttgaggagaaaatctcggtggaagagacttgattcaaatcttctttactggtaaaaatatattcttctcaattcctcattttctgttggtggagtttgatttttgtcatttaattgttgttaaagaaaataggggcaagatctgagatctctgggtgttccatgcaaaactgttatactccgccgtatatttgcatctgggtcacacttctaaaccctatcatttgacttaagaatcgatttctgaagatctgggtttcttaaaagtctttcctttttgttgggatccaaacaacaaaagaaaagaaagcagagatgaatattggtcgcctagtgtggaacgaggacgataaagcgattgttgcgtcattactgggcaaacgagctctcgattacttgctttccaactctgtttccaatgctaatctcttgatgactctaggaagcgacgagaatctgcagaacaagctctcggatctcgtcgagagacccaacgcttctaatttctcttggaactacgccattttctggcagatttccaggtcaaaggccggagatttggttctctgttggggcgatggatattgcagagagcctaaagaaggagagaaatcagagatcgttaggattctaagtatgggaagagaagaagaaacgcatcagactatgagaaagagagtattgcaaaagcttcatgatttgtttggtggctcagaagaagagaactgtgctttaggactagatagagttactgacactgagatgtttcttctttcttctatgtatttctcattccctcgaggtgaaggtggtccaggcaagtgttttgcctctgctaaacctgtttggttatccgatgtcgtcaattcgggttctgattattgcgttagatcgtttcttgctaaatctgctggcattcagactgttgttttggttcctactgatcttggtgttgttgagttaggctcaacttcatgtttgcctgaaagtgaagactcaatcttgtctataagatcattgtttaccagtagtttgcctccggttagagctgttgctttacctgttactgtagctgaaaagattgatgataacagaacgaagatattcggcaaggatttgcacaattcagggtttcttcaacatcatcagcatcaccaacaacaacaacaacaaccaccgcaacagcaacagcatagacagtttagagagaaactcacggttagaaaaatggatgatagagctcccaagagattagatgcttatccgaataatgggaacaggtttatgttttcgaacccaggcaccaacaacaacactcttctgagtcctacttgggttcaacctgagaactacacgaggccaatcaacgtgaaggaagttccaagcacggatgagttcaagtttttacctttgcagcaatcatcgcagaggctgcttcctcctgctcaaatgcagatagatttctctgctgcgagttcaagggcttcagagaataattcagatggagaaggaggaggggaatgggcagatgcagtgggtgctgatgaatctggtaacaacagaccaagaaaacgcggaaggagacctgccaacggaagagcggaagctttgaaccatgtagaagcagagaggcagaggcgtgagaagcttaaccagaggttttacgctctgagatccgttgttcccaacatatccaagatggacaaagcgtccttgttgggagacgcggtttcttatataaacgagcttcacgcgaagctaaaggtcatggaagcagagagagagaggttagggtatagctcaaatccacctatcagcttggattcagatataaatgttcaaacctcaggtgaagatgtcacagtgaggataaactgtccgttggagtctcatccggcttccagaatcttccatgcgtttgaagagagtaaagtagaagtgataaactcgaacctggaagtttctcaggacacagtgttgcatacgtttgtagtcaaatctgaagaattaacgaaagagaagctgatatcggccttgtctagagagcaaacaaattcagttcagtcaagaacatcatcaggtagatagccttttgagagacagaagaaggtggaagtaagtttgtaatcaagaaccggttttgaatggttctttttttcttctaggtatcttttgtttttacctttttttggttatatacctgtaagaatcctccaaactaggattttagaagttttattgacaaaagtagacattatcatttactcgttttacagtggacaaagctgggaattaagtaattaacgataatgttgtatctgttaaagtcgtagactagctcatgaatcagtctttattcattctgatatgtcctatgtgttggatttggtgaagtgtttaatcgacaagtcagataagtgttatggattggtcacggaattgctcaagaacaacaaaacacagctgattcattgcttgtgaacaagaggaaacactatgatgttcgtgcacaccatttttagtgttcaaactaacataaaccgttatcgcctggggaaaacaaaagttttaagaagagaaacaggtggaaaatgtaacaaaaataaaaataggttccaccgagacttgaactcgggttactagattcagagtctagtgtcctaaccgctagaccatggaaccgcttgatgtttagattgcagtaaatacgtttttaatatgtttctctattgtgagtcaaagggtaatgcgatgtttctttctagatttcctaagctaactcagtcctaataaaccgattaaaaagaacatgaacaaagcatgcagatcataaaagtgtcacacaaagagagagatacatgttagattgtttttttttcttctcttaaatgataattaatcgttctaacaaaaacttagctactagtcttccatgatttgttatatattgagacaacaaagaccatacggtataatcaaaagacttgttgaatatagaatataagattagatgattttggtgctagcctccctcttcgctgttctcattcttaatgttcttctatggagatggctcaaggcttcagcatgtaaagcccaaaggcttcctccaggtccaccaagattgcctattttgggtaaccttcttcaattggggcctttacctcatcgggacttggcttctctatgtgataagtacggcccacttgtctacctccggcttggaaatgtagatgctatcacaacgaacgatcccgataccatccgtgagattcttttgcggcaggacgatgttttttcatcgagacccaaaacactcgccgcagtccacctagcgtatggatgtggggacgttgcattagcgccaatgggcccgcattggaaaagaatgaggaggatatgcatggaacacctacttacaaccaaaaggcttgaatcttttacaacccaacgggctgaggaagctcggtatctaatacgagatgtcttcaaacggtccgaaaccggaaagccgataaatcttaaggaagtattgggtgctttctctatgaacaatgtgactaggatgctactagggaaacaattctttgggcctggatctctagttagcccaaaagaagcccaagagtttttgcacataactcacaaattgttttggctgttgggtgtaatttacctaggagattacttgccattttggagatgggtggatccgtccggatgcgagaaagaaatgagggacgtggagaagcgtgttgacgagtttcacactaagatcatcgacgagcacagaagggcaaaactggaagatgaagataaaaacggagacatggattttgttgacgttttgttgtctctacctggtgagaacgggaaggcacacatggaagacgttgaaattaaagctctaattcaggtattataaattcgcgttacgttcataataaatgcatcaaaaaatatttgacaaaataatgtattcgttgtaaatttgaataggacatgatagctgctgcgacagatacgtcagcagtcacaaacgaatgggcaatggctgaagcgatcaagcaaccgcgagtgatgcgtaaaattcaagaagaactcgataatgtcgtaggatcaaatcgaatggtcgacgaatcggatctagtccatttaaactatctacgttgtgtggtacgagagacgttccgaatgcatccagccggaccattcttgatccctcacgaatccgtccgagcaacaacgatcaacggctactacatcccggcaaagacacgtgtcttcatcaatacacatggattgggccgaaacactaagatatgggacgacgtggaagacttcaggccagaacgacactggcccgttgaaggtagcggacgcgttgagataagtcatggaccggattttaagatattgccgtttagtgccggcaagaggaaatgtcccggagctccgttaggtgtgacgatggtgctaatggctttggctcggctcttccattgctttgaatggtcttcaccgggaaatattgatacggtggaagtttatggcatgactatgcctaaggctaaaccattacgggcaatcgctaagccacgattggcagctcatttgtacacataactttggtttaaattgaataataaaagcatctacattggacatattaatggggtgtcttctaccataataaaatattaagaaaattaaaatatgacaatgtctttaaactagagacattcaatgaaaatgtctatgagaagacattatagtgaagtagattttctatttaaagacaacctcatattttaataattatattttagtttttttaataatttcttacgtgggaagacatccaatataattgtgcaatgtggatggcctaagaattcttaaagttcggttcgaccggctaagacaaatttcggttattgatttgttagttttcttttaccggtttagcagaaccctacatacttgggttctgttcttgatctcttgtggtgaaataaaatgatttcgacgctccgtcgcgccgtgtttctccgtcgatttccggcggtggtttctccgatcaaaagggctttcagcagtagaattgacgatgaattcgatccccaaatcatgaatataaatgagctgaatcaggtttttctcactctctgtctgttgttttggttttttctttttctcgtcatgttgttttggttttgtgtagctcttagtagattcaatctaattaatggttaaaaagagttcgttgagaaagtagagaaattgatgttaaatcagtgatcttgattctaccaaaaacatttgaattggtgtttcaggagatgcagtcaatctttggacaagaaccttctcccgatggtcctgggacaatggatttctctgagttgaaatcatccaaaatcgaacctttgagatcgaagaatattgattttagacaacaaattgagtatcataaatctacacactcgagcaagaatgattcgcaagctatagaacaatatgcaaaagtggctagtgatatgtctaagctaacacatgttggtatcgcaggggaagctcaaatggtggatgtttcttctaaggacaattccaagagaactgcattggcctgttgtaaagttattcttgggaaacgagtatttgatttggtcttagcgaatcaaatggggaaaggagatgttcttggagtggcgaaaatagctgggatcaacggagcaaaacaaaccagcagcttaataccattgtgtcataacattgctcttacgcatgttcgtgtagacttacgactaaaccctgaggattttagtgttgacattgaaggagaagcttcttgcactggaaaaaccggagttgagatggaagctatgactgctgtatcagttgctggtttgactgtttacgatatgtgtaaggctgcttccaaagatatcagtattacagacgtgaggctcgagcgtaaaactggtggaaagagcgggtcttggtctagactctagaggggactgaacacattcaacatttgcctctgttgctataaaggttagctttctttatcttatttggatgcttgggtgatatctcttatatggaaagatggaaacttttgaatctcgattagtcaattaggcactgtgaaagacactatagttttgctcacaatttgttgcttctgctgttttagtttgggtactctctaagaacaaaggtgaaatattacctattgatgcttaagagcggattgaaactaccaagtttgttctttttagtatttattcttgcaatgggttatgtgtaagaacacacataacatctctcttgaatcttgttataattagatcatcacaacactattaaaagggtcagataacatagtgtttatatgtataggtatataggttatcatgtcgatttgtgaatctttttgtatgcatatggttcatgttacgaccttggaatgatgagtgagcactaaacatatactaaagcagagaaagctagaaagtgtgctaggctgtctctactggccaaagtctctttttttcattctttcttgtagcttttgctttcttgtctcctctaatcaaatactccatttcgagatctctccgtctgatttcttaccaatgtactaatcattaatcaaattggaactacgtgtagcactatggcttgtccgaaccagtaaaaccggctgagaaaagatcctgtcaacgaaccaaccggtcaagtacggatttctttaattgtaaagttgggtacgtgtttatgaagcgaacgtgtttgatagaaaaaaaatgaatgcttgcaactgtgaagactgaaaagtcatgatttagtgttgagacttattcaaattattatgtccacattctttaaacagtgggaagagagagattggtgacagcattaaattggtggtcacacataccaatatcacaaaatttagtacttgtaccccataaagaagagggtcactatattcaattattcatgttttatgatgtaatatactatagtagatgttaacatatcgaagcattgaatatgaaagttccaaatcttgatggtcattatttcgaattcttgtgggcgaataaatgaaaagagcgtttgatgatatcgacattctaacaagatcgtgagatctaaaggtcgtcgtgatgatttagtaataagataaaaaagtcgtagcaacgtttttttggtttaaaatgtaaaaagaagaccgtgatgcattgtttgtaatgtatacatgaataaaataagtacttatttaacaacgtagtgtattagattatctttcgtcatgtatttgcatgtatattttcccccatgtggaatgtttcagtttgtgttatctcaagagcgaaaatgtgccaccaattgtggggaaattattgggcatcattaattaactactagtagtatataaaacgagcttttcacttttcacaaaataattatagttaaaataagcaaattatttcatgacgtaaaaaaagaaagaaaaagaagctaccacaccacttgcatatttcttaagtgtctgttatccaccgaatctaaaatgtcgcttttgcattcccacaatcttattagatatttgtattcccagagtaaaagtataattcaaacatttattattattattataggaattgaaagaaaattaaattttcaaaaagaccgcttacttgtttattatatacacagagaagagaacagtctcactcgccactttcctcgagaaaacgaaaaaaaaagatggtaggaagaagaaaagctttactcttttctctctgtttcttcttcctctctcttccttccttctcttcccttccatccttccaaaccctattccccaattctcattcccttccttgtgcttctcccgtctcattccaacccgactccgactccgagtcactgctagaatccgaatttgaatccggatccgactccgagtcttcttcttccattactctaaacctcgaccacatcgatgctctctcctccaacaaaacacccgacgagctattcagctcccgtctccaacgtgactcccggcgcgtgaaatctatcgccacactcgccgctcaaatccccggaagaaacgtgactcacgcgccacgacccggtggattcagcagctcagtcgtctctggtctctctcaaggaagcggtgaatacttcacgcgcctcggtgtcggcactccggcgagatatgtttacatggtgctcgacaccggcagcgacatcgtctggctacaatgcgctccttgtcggagatgctactctcaatccgacccgatattcgacccgagaaaatccaagacctatgccacaatcccctgttcttcacctcactgccgccgattagactccgccggatgcaacacccgtcgtaagacttgtctctaccaagtctcttacggagatggttctttcaccgtcggcgatttctccaccgaaacgctaactttccggcgaaatcgcgttaaaggcgttgctctcggatgtggccacgacaacgaaggtctcttcgtcggagccgccggtttattaggactcggtaaaggtaaattatcgttccccggtcaaaccggtcaccggtttaatcagaaattctcttactgtttagtcgacagatccgcttcttcgaaaccttcctcggtcgtcttcggaaacgccgccgtatcacgaatcgcgagattcacgccacttttgtcaaacccaaaactcgacactttctactacgtcgggcttctgggaattagcgtcggagggacacgtgtccccggcgtaacggcttctctttttaaacttgaccagatcggtaacggtggagttattatcgattcgggtacgtctgtgacccggttgatccgaccagcttatattgctatgagagacgcgttccgggtcggagctaagacattgaaaagagctccggatttctcactcttcgacacgtgtttcgatctctccaatatgaacgaggttaaagtaccgacggtggttttacatttccgtggagctgacgtatcacttccggcgacgaattacctgatccctgtggataccaacggcaagttctgttttgcgtttgccggtacgatgggcggactatccataattgggaatatccagcaacagggtttccgggttgtatacgacttagcgagttcccgggtcgggtttgctccaggaggatgcgcttaataattagatctgaccggagccggtacggataatgtacttttgttttctcaatttaatgcttagacttgttttttttttttttataaatcggacaagtgaatctttaagcggtggagttgaatacgtgttgataaaatcttcacgtgttgtcggctgtattattagtatcgtctttattttacatctcggaccaaagagagcgtgtatgattttctaaaaaattggcaattttacttttagttatccaacaaatgacaactgcggaaattagttagatcaaagattattcaatataatttccaagtcagacaaatctgattatctgaggatggtagagtacgtctataatagtataaattaagatagattttggtaaattactgtttacgtaatacatagggcagatgaaaaattgtgttggagttgttaatcagacaaaaacgaagattcagcgcgaagatagagacagtgctcctattacatactcctgcatgcactgattacttcatttttttccttgtttattttcaagcactttattggtttaataatctactttatcacctaattacattgaatacgtgttaacttgagcttagagtcttcatatgttacttagttcattcgttatgagtttaaaaccctctcactcaacctgtactatgttttgcatagttggctaaacatgagatatcttagcagaaactgagaacacttgtcaagttcaacatttgcggatatacaagtaacgaaaaacaacacttgaaatttaatgaaaagatgttagaaagtataaaacattaatgaatataacatcttaacgtaacacacctatattttccattactttatataaccctcaataaaatagtttataaatctacacacaaaacctcatcaaaaaccatgggaaagccaagaagcgtgtctccgaccatcttcctcctagtcatcctcttggtgaccgccggagagaagacggaggcgaagccatggtggaagaaagtcggagattccatcgggaatatagccggaggaataagaaatgcggttgggaattataaaccagtggagatgggattgtcgttaaaaggaggattttgtgtgagaaagcttctgtctttgaatacgaatgtgttcagtgaatggtgtatagctcttaatgatccaagagctcctatgtacatgaagattgagaatataccaagtggtgtgtcaatcgagtccattttaaagaagcctattgatttaatcaagaaccattatcccaatttcttgaaagtttggaactttaaccagaaaattaagagaaagcctagacgtgctctttaattttctttattcttcttctttttgagacatgcagattcgctattatttcgattattaataatgataaacttgagctacatgttcttgttatgttgttgtttaaatttgagtatagcatataattcaaatataatttgggttggttttgatttacaatttaagtattgcctaattgtaggtgggtttactacattcttgaattgatttagaatggtgttccgatcttcaatattcaccatgcatttgactttctattaattagtttccactcacaattttgcattttagagttaattacacttttcacctacaattaacgtaattaactctccgattaaacttgatcctttgttttgtttttttgtaatggagcttcgtaaacggaaaatacgagctccattacatatcttcgtcggcataacgttcttcctccttcagctttggtcgggaacggcccaaattaaccatgaagactcttccacaaaaccctccgttaaaaactctccgtcagcgacgagtactcggcttctgttgtcaccaccttcgttcaccggaaaccgattctcgttcaggttcaggtggaggagaatacgacgtcgtaacagagtcaacagagcgagcagagagtttttaatcgcacataacctcgtaagagcgcgcgtgggagaaccaccgtttcaatgggacggaagattagcggcgtacgcgcgcacgtgggcgaatcagcgcgtgggtgattgtaggcttgttcactctaacgggccgtatggagaaaacatattttgggccggaaagaataactggagccccagagatattgttaatgtgtgggccgatgaggataaattctacgacgtgaaaggtaacacgtgtgagccgcaacacatgtgtgggcactacacgcagatcgtgtggagagatagtaccaaggtcggatgcgcaagtgtggattgttcgaacggcggcgtttatgcgatttgtgtttataacccaccgggaaattacgaaggtgaaaatccgtttggaagttatgatgatcagattggtcttgcccgggatgatccaccggcggtgatcggaggaatggcttgagagtggaggacacggcggtgtcacaatccacttttagttactaatttttttttcttctctcaaactttttttggatgaaacttaaccttgggtttttattcagtggaacgatcatctaataactgattcattaaacaagtttataatttcgacattttatatagtgaatcgttagaattgatgtaatcgatgagaaatacgcaagtaaattacgtgaaaactaatgtttaaacatgaagaaccataaaagaaaaaattatgtccaaaatttcctacgttttattggctgaattaaaagaaaaaccccagaaaaatgttatatcacctcacttggtaaacaaaagaatggcttggctttttctcacctctgcacaacctttccggtcaaaatccaaaacattgtaacttcatttcgaggctatcacaagcctcagtttcccatgactgtgaatgaaactacctgccaattagagatcaacaagttaaaataaatacaagtgtatacatgtctttgaagatttagtttaagagtttagagaagctaacctttatattgtccctatgaaacagcaaatatcagagatgtgtgtgtgagtttgcatttcatcgaattagctcaatctttggagagtgtttcaagctacagactttggagcctcgctgtctctgataactctgctatagccaagcttgaacggttgagaatcataaggccggttaagcaaactgattggcattctcagtgtttgtttcctgtttctcctccctcttaacaaaatgctgaaagttttctcaccttcctcagatttccggtttccattctccgtttcactgcgtgcaactgcgttgttcacatggttaacagaatccataacttcatcggcgactgccacatcttgcgtgccttctttggtttcttctacacctgaagtgtcaatatccgttggcagaatcacagttggctctaacacagttgcagctattggctcggtgatcatgtgcggtgggggaaactcaacgggatggcatccaggccaaaccgttcttggtacaaaatccgacacattgagctgccatgggaactgattgggatgaaaaggaccgcttgttacagggtaagtacttgtggggactgattgactgtaaggaggagggtaaacaaaggacattggctgcatcaagtttggagttgtcggaggtgaagggtaaggaggaggaggtccgtgatgaagagtcatgttcactggccacgacggtccaatgttcatgcctattggagtaggacgtataatacttggaggtgatgatgggttgaatggagcagctgacgcagatagcttcttgttaggcaacaatcctcgtgaggcatcgcctgagtccgtagtagaaattgacagttttgccttcagatcttcggaatcagcagctaattgatctatcacttgttgctctctggtcgaatgaatcatatctgttacaccatcgtttatcaattcaacttcgacttgttcttcaacctgaattccacccccagattcgtcgttttcatttatatgacttcctccgagtactccttcagatggttgtaactctactttgatctcttcttcgccttgggttatgttagattctgggtctgcagaaatttccttttttacctcttcctctaaccctgttatcatttgctcatcccttgtaagctccattgatgtaccctgttcagtttttttctccatctcatcatcctcttgcttatctgaaacttccgcttgtggaacccagacttgatacttagcaattgaaccaggtggtgccaatgctacttccttgtaggatggagattttccaagacttacaacagagtttttcgtgtggtaggcttcactttgcacagtactagacagagtaggtggctcaacagaagaagcatctgtcttcaacccatcttcttctgaagtttcaccagcagtcttagcgttaccagaagacggctgcgtcgatttaacccgatacgccaaggttttaactatcttcctgccaaatttggtgccttgagttgttaaaccaggagaatgatgatctgcatagcttgaatatgatgctgttcgcttcttgagaatgtagtatttgtcgttctgctgagtagcattctggaaaagagggttatcgatatcagcttcaacattcttcttctgatatgtatataccttcccgatggatgctcgccgttgcttcatcctgcgaccatatgatccagcagatctcggtctttgcaccggttgccatccatcttcactaccatcagggtgttgtggctcggttgaaacgtcgctagatgtaattggattactgttatccatagtagcgtcctcaattactggaggagaaggtggttcttcaactggtgcaagaattgtctcgtgattctcttcgcttgatttaccttcttctgatccagtttcttccgtatcctcttcagacatctccttttgcttttctctcggaatttccaccaagtgttcagaaacattgctttgcttggatttttcctttagctacacaacataggtccaaccatttaagcacttctaaccattaaagtggagaaatatcaaagaaataaaaatcataccttcagaatatagttcttcctctttgctgccacgctctctttgccttttgcgttatgacttgggttgatatagtcgagtagatcggaaacactgcaaaacattatcaacttaaggatctggccaaggagtacacttaattgacacattcaaacaaaataaaaaacttataaacaacaaataaggagatatcagaaagttgtttgaccttaggtggcctttgctggctatagacgcgtctggcttaggagtaccatttcgcgcagcttcttgttgttcaaaagccttggactcaaagtattctagccaagcagcagcatcctgaaccatataatcaattgtcaaacttaaagaatgcatacagttgtcagaaagatgactaatttggctgataggatatcatgataatatatacctgagtacgtaaatcatctggccccagctttgctcgaaggattcttaaggttgtttgctcatgctgaacacttaaatggtatgcctccatcaaggagagcgcaattgctatggcatggtagcttgcagcagtctgaaatttgacataattagcaaaatcaaatcaagtttcttacatatttatgttcccaaaacaaaaaacgagcatcgggaaaagaacctggatatggtccggaccaagcaacctttgattacacttgagagctttgtgaagatacctcaaggcaacatgcacatttcctagaccttcctccatcatggctacattgatgtatgtagcagcagtatttggatgagatggaccgcatgtgagatgtaagagatacaacgcacgcttaacatacctaacaaaaacaatcatatccaggtttagatgatggaaagagacatcaaacatttaaaccatctaacctcgcgattcttttaaaatcaagagtgctaaacttacttgagagccagctctgtatgctgaagcctataatagaagacagcaagatcaccataactcttcattgtatctggatgatcaagtccaagttccctctcattgatgtctaaagccttttgctgatatattgtagcctgttttaacaaaatcttttagtttcacaattgtcatataaaggaaagatatcacaatctaaccatataatatatacagacctggttaaagtcaccagtgtgatatagaaccacagcaagtaaactgtaagctccggctgtcattctgtgatagggaccgcaaactgctacgagtttagcaagagcctaatggaggaaaaaaagaaagagacaaaacaacaaaacaaaatcatgacgctgtataaaaaacaagtaatatgaagaaatagctgaggagtagacatggaccttcgttccatatgtaactgcatcttcaagctttcctttgtctaaagctgttttagatgactccagaagttgccttccatcagcagatgaacatgctgcttgctgcatagatttaaaatagaaagtctgaataactatggctgactaacatattagaaagaatcctgattcagatagaacatttttcctaatatctattgtcttgtccgttaccttatgcactgggacaagactaaccacatctgttttccggaaaggtgcaggagaatccatgtcaaagtcccttggaatcaactcaataccaacctgacaaataaaatttaaatcacaatttcattagtcaatatagtaattagcaacaactttataactcaatcaaattttcgggttagagcattcataaattaccttatggcataagcctcggagaatggcaaacttccgtagatccttgtaactgaaggcattaagatcataatcataccgtttcttcaagaatttctccaaccatcggaagatcagaggatgtacattccaagggttatgtggtgttgctgcaacattttcaggaatcccaagcatcatgttcaaagcagcagctacttttatagctattttgtcagtgtcagtagcaacagcagaaatcaccgcctggaggatatgcttaagggctcttactatcatctcatgaacacacagcgattgtacatgtgacaatttatctgaaagcttcacctattgtcaccataaaaaagatatggatgatcaaaattcatcttgaatagtttctaagaaacacgaggttaagaaagccaacttacaacatatcctaaagaacgcatccgaagacctcttgtgtgcataaaatcagttagagtccggccatcgactggggagagctccaatgaaccaaaatctgcaacctgcattccgtgataaaagaaaattcgcatgatttgttactattttaatactaccaatagacaacactacaacaaaatttagactcatttaccagtttcggaatagcaacttcagtataataattctgtgccaagtcgacaagttcttgcaaagactggagcaaatattcttagttagcacacaattaagtaaataaacatagagcaacaaattgaagttgtagtgtaaaaccttgtgatgaagtccagtatctgactcttttaggcgagtgaaggctgcatcagacaacaaattcttcaagatgagcacattttcttgagcattcttctcagcatcggattgcaaagatgcagcagtatcagcctctgaagaaaccgcatcgacttgagacgataatgcagtctgcggcgtcttagggctgctcacatctgttttctttttgctgctattgagggacttaagcggtttcccaagcccttcaaccttcaattcattcttagacttttcaccggtttgttttttgtccttttctgtattcttttggtcttgtaaatgctgtatccaacaagctccaagctcccatctcatgatactatccctgtctatctcctctccctcaagcttagcaatgctttcttccagcattttacttacaaattcccgtgaagatgtaagttcatcatcgtgttgctgaggtgttttcttgttctgctcaggagaggatttatggagaaggaatctcaaactgtaaaacaacatcaaaaaaaagttacacagtaattaacaaatacgctaaagagacaaaagatgaatgtcttttcattaagtaagaaattatcacctattgatatttagagcattagcaccaccttcaggctgttcaaggaggtcaacaatttgagaaggtgggcttaactcctcactctccttctctaatttcacaacagcaatgtaaccacagtacttaagacttatagttcctaaagtagcaacgtcctgcacccattgtaaaaccacagttaaaacaatacagatgaggaaacaaaaaattaaacatggaaaaagtggggaaggtttaaaaaacactgacatgagcagcagtattttcatcagctgtaagtcccttgagaaggttccgttccatcagcttctttttatccaaaccagtggcttgaattccatcgatttttgtatccactttactacttgcatttgaagtatcccttgtaaccgtaacagtcaagtctctaactgtctcggaatagagaacttcggagtcttcttcagccagtactggctcagccattactttctgaacagccttgatggctctgaaagtcgcgacatcaacaaagaggttgtgaagaagaaacacttttctgtctctgacttgtctctcctctgctgttttgcaaggcatagatgcgataaaggcgaattcgttggaccatggaaccaagtcgtagctgccatctctcccttgaccaccaccatcccctccccatctctcatcctcaacagggagaggcggaaacgctgctggtgactgcgccgcagtaggcgggatgagccatgtgttagctctaaacccatatggaagatttccaaactgcaaataaatgaaatactcattaactgcacccaattcaaacatccactaaatcctcattcagatagagaaatataccttattgcgctccgaaaatgctttcagaagatcactgtaagcctaagcatgataaaagaataagattaacaatcacgttcaacacaaaatccagtaacaaataagaacatatgacttacattatcgaaggctctactgatttgtctaagcaaatcaacaagattgtgacatattattctttgtttcccaatgctgtaaaatccttttctgcaaccttcaatatgaacgagcttcccattacaaagcttcacctgataaaaaaaacattaaacgatatcaccaaaagccaattgcgcaataaatagaaatatgtgtgattcatcatcataggcttacatcaatggagagaagatgatcttccttggctatatcttcagtttcccgcttagtcgcgagccgaatatctataaaaccctaattactgtaagttgggacaaaatcgatcaaagcaggacatcgaatctagggtttaagggagagacaaatacgagcatacattgaagaggaggagtgagatgagcgagagagaaaaactcgtagaaacttccaagcttagggaaagagtggctagtctctccggcttcatcaaccacagtatccttcgacgcaggagacggcggaggcgacgtatccgactgtttagaattctttccacctcccttaacctgcgcacttttcacggagtctgatttctccggcgacggaccgaagcaagtggtacaggcgacgatgtcaagcagccgtctaacgtgcgccactgctgttccttcattgtaatcctctggcaacaaaaagaaatcacaacggtctcacgaattaaagaaaaggcacaaaagtaaagtgacgtcgtttggcagataaatagaaacggcagcgtttaggttttctaagttatttccgttacggcgcagtaacggcgtcatatttgatgcgcgagagaagtttaccttccgttaacgtgagaacacagggtttaagggccgacacatccactgtgtcttttaaccgcgatcctcttatctgcaaccaatcttgagtcagaacgtgaatttgatttaactattttaccacagtcaatttttttatactctttatgggatgattttgaataaggcaattctggtaaaatatctgttatctaaaaacagaaaaggaaactcaattgtcagactagcaaaattcaatgacactatattcttttctttatttctcagatgaaaaagtcattttcctttacttttttagctcactttatttttaggatcctaagaaattccacaataaacatgaatatttctggaccatcaaacattaacaagtaaccaacaatcgtgaaccagagaaacaagtaactaacatggaacaatttagaaacttccactcactcagattatttttacctcatttttcttttgttaaaatctcaggttatttacctcatgggagagcgaataattggtgacgtggcaggtgtcgaagttaaccgataacagccgccgaacatctatgatcctgtccgttgatatgccctgtttcagacattttctctataaaatccacttttgataattttatttttggaataataaacatatgaaacctatacctaacatacggcaaaaaaaaatcattaatattattaatttcaaacaagaaaacatttgtaacaaatattcgagtaacaaaatacgaatatagataaacatgttttctgacgacaaaagatgatacacatgttttccatataaacatttcactgtctatgtaacgtctacgtaatattattgaccagaattatgagaaactaatgaattatttaacaatcgaaaatttgtgtgttacacacagttttgtatttttctacacgttcaaataatgataaaatttaagaagataattctaagtcaaggaaatgattttttattttttttcaaaaaattaatacaacaagtataagtgtaaacctatcattttgtaggtaacgtgtcttgccttatcccggaaaaacgacatcataaaaataaatcgagtgcacattgggagtttatttatatatatcagaaatgaatttaaaagcactagttctgattaaactaaataaaatctttgaattttaaaaatataaagataaactttcatcaatatgctataagttcaatactgaaactaatgttatataaattagttaattgcataaaagggatataacaaaattcagagaaaatatcggtaccaaaaaaaaaacagttgtaaacacgcaagaaatatgaaaattttacataaattcgaaaatgatgctagaaaataaatcacacacagaccttcaaaatagcctccgtttcatccggaaggtttacaatgacatccacgataaccgggagaactgcacataaaccgtaaggcgtaaaccatcatgattcatatagagaactgagaaattaattattggttaagaagtaattttattgaaattcatattgattaaggttttcgtcgttggttggtacctttctcttccttcttcttcttatctccttttgtctttccacggttgttcttgggagccatttcttctagagctttttttcttttcttttattgaaataaacaaataatatctgaaaacaaattcaacttggttaattgcaataatctcattgtcaaatatgcattcaaatgtataattttgtaggactcaaacctcataaagaacccataaaactaaaactaaagtatacgatataaacgttcaaaatcttatccaaaacaaaatggtttactgaaacatatatataacacgaacttggaaaacagatattcaaatttttttcaataattaccgagtgagaggaatagcgggagctaacagaagaaaaatatatgaaaattctaaaaagagaataagggatgagaaagagtttataagagagtttgtttagtggttcgaagaaaagctgaaactggagaaacggtgtgagagagagacacagagagtgtgttaaaaaaaaggtttgagagagtgataaggaaggaagggcggagattcaatagtcagatggctagaatggctttttatggacgttcatggcagtttcctgtaattatcttctctttacatgggtgttttcgtatttttgtcttgatcgaaatttccttccttgtttcaccttgatttcttaccttttagggcctctaaagtcgttaatgggcctaagtgattgtcttatttataggcttgttgttcgctgctttttggattattctatttgtgcccctttctacttctatcacaaattcatgctctctgcgtcagaaccagttttttaaaaaagtaaatgcagaaatggtaacttaactgcccagttaaaagagtctaagaaatcacgttattaggtattatatggctcaaaaatgtgtattttgtttgaagcacgagcttgttggtccagatatttttgtatgtttccatataaaagcaagctataattagttcaaacaatcacacgttctttgatcattaattttttttaatcacaatgaacattaaggactcttaacatacacgtttttgtaagcaaaatcaaattttatcataataaaataaataaaggttttttttatgtatgaagaaaatgagagcaggcgattttgtcgtccagtaatgttggcaatggcaggggtcacaagtggaaagaagaaacaaagatgcgggaccatttgtcttaaatgggtcccacgtaaaatgggtattccaacgaatcggagccgcacactttcttaacctgactgcaatcagacggtgctagatggaccacgtaaagctgcctcctcccgttatcctattccacaagtaaccaaacgaaatggccaatttgtccatacattctgtaattcttttttcctttccgaagtaatgtatttatcgtttcactcgtaaatttttgtaaatatattattcatatgttgaatattatgtaactttcattctttagaaatgataatctctatacgaaattttagcatgaaactagattataatttggttgaccataaaaatgaacaatgaaatggattaatagatttttccgaaaacaggttaatcttacgatcatgaagagtgataaggtttaacattatcttccactccgatcaatcttacggaagaagagatgaatttggggattagcattctctcaggtggttgttgataaaaaagagatgaaagtactctagggttacttgtagtatatataaacgcaagctcaatatgttggtctgctttatacaggagcgggacttaaaaaaaggaaacactgaaaaccgacatacgaaagagacgttgatattataccgaacaaaaccaaaaggaaacattggttggtttgctttgatttctcaaggaagaagagagaatgagtgagatgttgttggagattagcattctccctcaggttttcattattaggttcttccaaaataaaaaggaaactttcgattgtttccttcttcaagaaaagacataaacgcaaaaaagtttctttaaactcgggagtcaaaacaagtttaagtaaagtcctaaacctgacagaccttctaacactagccattctctcataaccaaccccagttttgctatgcattagcttgaaagctaaatatgcttttcccactttcctcaatgcattgatcatcagatcgagtctctaactatacctccatgtgtgatgctgaactgaagtagccaaagttaagcggcgcataagagccagccattatttcaatttctgttagttgataaacaattttttacattttattggttcaaagttcaaaccattgtttttacactttattccacacactatacacatgcaagagagatctaagggtcagttgtatgattggcggtgaagtcaggctcggtgggtttttgaggtagcaaaggaagagtgtagcgaggaggaaggttggagatattgtgcctcagattgtgaagcgcgtttgatgcgaaacgcgacgcgtaaagagcgcctccaaggctcaaggacgacgacacggttgcagcattgtgttctttatcttgactagcgagcgcttctcggagacgatcttcttcatcgcgtagtgacttggctaacttcctccgacagtatctcctccacgctgcttgtataaaagacacgctccatgttctccattgcactgagtaaaacctgtatatataatcaagatccggttaagaagatccaaaaccgaaaacagagccaaagaagctgatgggagtgaccgaaccgaaaagtatgttggagttgcttgctatggaggcgtctgaattgtgaagcgacagacttgagatcctcagctgtgagagcaaaggcttcgacttcagtgagagcttgaactgttcttgtcgagatgggaaagtgagaagaagattgaggatctaatgcccacgggagaagatcttctccgcagaaatcacttgcctttaggttcacggcattgaagaacccacttcttcctccattagtggtggcacttaccagtcttcctctcataacaaacaacatttccccaacaggatctccttcacggatcacgtaactgttctcggtgtagagcacaggtcttagcctatcgcaaaccgcgtcaagtaactgctcatccattatctcaaacaaaggtacctaccataaacatcatataatttggattctgagggttctttagttcagtttatggaagaaaaagagagaaagcttgttactcactttcttgaggagatcgaggcaaagatggcgtttaatatctcttctgaggtctttagggaggttacgaagaagggtttcttcttcaactcctcttgtctcttgccatctatattgttcatatcttctgatacgtttcctcaggtcttcaggtaacattctatgagacatccactgctctgcatctctctttctcaccctcatttcctcttctcgaactgttgttgactccaaatatttctgcaacagcaaacaaaaattacatgcgtgtcctgagtaacttatatgtagcattatggaacaagtccagaaaatgagaagcgattatttgaggctaatacctgcatattgccgataagtagagcaaataagactagtccagatatgcagattgatatagcaaatatgatttcaccaacgaatttgctagtttggagattctgtcccaatgcactgcaacaacaaaagcaacttgtgagaatgatgacttgtttaaattgtgacagatatatatgcttaagatgcaaatataaacaggtcatttcacggcttaaaatctccaaatatagctagttagttattgtcaacagttttatgtgtgtcttacaaacctcagatttcgaagaccccaccagaagcagtagaagaatttcttccagaaatcatgtgattcaacaacgccactcttaagagcatcagtgaagatgccaaagttgaagatggttgagtttgttatatcaccagggtcgagaaatgggcaagaagtggtcaggaaattgttgctaacgttacgatcgttttcacagtagaggaatttcatattacaaccttttgtcttctcgcatgcctcttgccagcatctgtcttctcgttctactgagattaagtaccataaagctccaaacacctgaataagtaagtttaacatataacctttaatatgcatttacatgtataaagattcagtcatcaaaagatccgaaactcacatgactggctaacatatagagagagaggttccaagcagctccagcccatgctgtttcagtaacaatgccagatgttcttgtcacttcagtgtaaagcggatacatacggagaatccgaggaacatattgagcaattatggaaaatttaaggtagtcttttgttagcaaagagactggctggttgacgcttggaataacggctaaaactactatctgcaaaagttaagaagccagaggattcaaaaagaaatgatcattgacattttgaacaagtaatcaaactagtcatttacctgtgggagaggaaggatagagagtagatcaatgatgaagtaagaagagagatactttaaggctattgccttagcatcatctaccagttcacctcttccaaaaacccgcgaagaaggagcgatgtaagctgtcctgaactgaaacacaatgtgaataatgtaaaaggcatcgatgagcgtacgaagcaaactcgcagctatctccaactttgagtccaaagtaagacagtgccttgcgctatcgacaatgggaatgtagaaaaacaatggatcaatcgccaaagcaaccacacaagcaaataaaaatattttgttccagttctggagaaacgaatcctgcgggtttatgatgttcttccgagtaacactagatgtttccttgtggtcaggatccttatgtgaagggaaactcaatggcttcttgaatccccattttacattcttgaaaactctatctaaagaaggtctagcttttcttccataaccatattcagaggataatggtttgccttcatctttgaacctaaacaaaatcataagaaaatgagatagtagaaaaaatcattcaactatgaactgttttcaagattttctgtaactaccaaccttacacgattatcatggctaaatgccatcagccaaacccttgtatatttcaactgatctttcgcttacagggtgacgagtcctaacattataataagaaccaaaacttaagacatacgaattcttctacatgattacgtacaatgataatccccaataccaattaaaaataagcaagtagacacctaactacaaatacaattgtgttgtgtgtatgtgtttttaaatatttctttcttgaaaaggttaattagagaacctagaatcagtcaatttccacctaacattagattataccaaatcctgtaattcctacccattcctgctcaataaatggaaaccacacgaacaacttaaaaacactgttcatcaaagataagaaatccaaatttcaaaaaaccattgaccataaacgaaagacatatatctaagcgtttcggttctgagaaacagcaaaataaattcagacgaaaaagaacaaaaacggaaatcggaatcaaaattctatcatcaaactaacctgaaacgaagtaggtaacggcgagatagtaagattcggctaataaacggaagtcggtgaacggcgttttcttcaattcaagcaactggtcccgtcgtcgctggaaagagagagagactcatatggcggttacttgtatctctctctgtatattgtttcctggaaaagtagtatatgagaattttattatacgacaaaaagggagggaaagaggaatattatgcaattaaatattataaagtctgttcaattgaaaatcatttcataaaacaatttcattcagatgaatgacttggtcaaagtcagacggcgagaataagcaagttgccaaattttaagtaccgggcccattatgaatattgagcccatttagattcatgacccaaaatgaagtaaccgccccaccatatgttccttatttcttttctcttcacactgatttattttctgtcggaaaatacggacggcgtcgtcgttctttttgacggtgtagctcaccggcgtcgatttttagatttttttttaaggtaacatattcttccttgtgtttaatctccatacttttgatctacttttcgttcttgtttagtctttagtgttgttcgagcttttgtctccaatttcaatcaattcaaagggtttttagattccaaattttgtagcttccgttgacacatcgagttgtcgaactgtgtttcggattgatctgtctggagcttctatttctgcttccttatctactgtgaatgaaattgccaccgatatagatagttagctagggtttattcgtgagctcgcgtagatgaattaggaagaattcaggtgatcatttttatgttgcattgtctattattgtaactgaatctggagaaattttgataaaattgttgtttgactcagtgcaaacaaatttacaagttttcaggaaattgacttaatactaatcttgaattttgcagggaaacactaagcagcaaattacaagtgggtgatttgtgtttgttacatagtcttatatctaactatgtcagattctggtgagcctaaaccttctcagcaagaagaacctctacctcaacctgctgcccaagaaactcagtctcaacaaggttacatatacttccttctatctcaattctagttgtcgtctcattgagattttttcttgttcttcgttgttagctagaaattttcatttacactaatcaaatcattcttctgtttcagtttgcactttcttcaagaagccaacgaaaagtaaaaacataagaaaaagaaccattgacgctgatgaagaagacggagattcgaaaagcgaaagctctattctacaaaatctaaagaaagttgcaaaacccgatagcaagttatacttttcttctggaccatctaagagttctactacaacgagtggagctcctgagaggtccgtctttcactacgattcatccaaggaaatccaggttcagaacgacagtggagcaacagcaacccttgaaactgagaccgacttcaatcaagacgcacgagctatccgtgagagagttcttaaaaaagcagacgaagcattgaaagggaataagaaaaaggcttctgatgagaagctgtacaaaggaattcatggatatacagatcacaaagctgggtttagaagagaacaaacaatctcgagcgagaaagctggaggctcacacgggccattaagagcttctgctcacataagagtgtcggctagattcgattaccagccagacatttgcaaggattacaaagaaaccggatactgtggatatggagattcgtgtaagttcttgcatgaccgtggggattacaaaccaggatggcagatagagaaagagtgggaagaagcagagaaagttaggaagagaaataaagctatgggagttgaggatgaagatgatgaggctgacaaggatagcgacgaagacgaaaatgcattgccctttgcttgcttcatttgcagggagccttttgttgatccagttgtcaccaaatgcaagcattacttctgtgagcattgtgctttaaaggtatgatcatcacaattacgagtctgttttttttttagttgtgaagaaatgtgtgaaactagcgagttttgtttaatgtaatgatgcagcatcacacgaagaacaagaagtgctttgtgtgtaaccaaccaacaatggggattttcaatgcagcacatgagatcaagaagagaatggctgaagaacggagtaaagctgaacaaggattgtgaagtccttgtttcactggacaaaaaggcaaaaactatatttggttatttacttgaggaaagctttttgttttgttgtactcactggcctatatatattcattcggatgacgacgatagttgtttcaaactgattaacttttaaatttaaacaaactgaaaattgaatcagagttttggagtcaacttcctagtaaatcatcgtcagaataatagtcgtcaaactcgatatcctgattcacatattttgatatagaaatttgcttcccaaattgaaaacgcggtcgtttaataaacaggccaaaagtaaagttccttaccaaactttttaatctaatgggcccgtgcgctaagatacagttaatgggcaacgcgaatcggcccataaataaaccacaccacaagtagcggtaacaaggtagttctatggggtagaaaacgcatctgaacaggtaattatttgtcctacaaggttcgatcgaatgttctcatctctttttttctctctggctttccgatcttctagattttccaagtcttgaatgatgaggaaggcgaaggctgtggcctgtgggtgaggtcgtgccaaagtctaaggctgtaacacgcgtctggtgggacatcaacaggtgtccggttccggctgacgttgatgttcgcagggtcggtccgtgtataaaacgggctttggagaaattaggctactctggtcctctcaccatcactgccgttgggatactaacagacgtccctcatgacttcctcagacaagtccattcctctggaatcgctcttcatcacgttcccaccggtttatatcttctcatccttcattttctaaaattagggttttgcttctatttgccctttttgtttttgtttttaagtcttatagtttccgaaacagctctctcagggattgggtgggctgtggttaagtggacctggtataatcaacctccggctaatttaatgctcatatcgtacgagcatatctacttgaccactcttgacatgctaggtaggatcggatacaacactgttcggtctattcttccagatgatcctcaacaagccgcatcctccgcctccccttctacagggtctttcctctgggaaagcttactggcaagcttaccagcagcaggtccttgtcctctctctctctctctcacactcagtacagtgttgaaatagttaagctgtgtctgacctagttatctccacggacgcagatgatatggattcaggggcacctcaggaggacaagtgcggcgagatgggtgaacctgccttgctttgtgagcaatgcagatttactgtccaaggctttgaaaacttctccacgcatctcaagagtgaagaacatgcacatgaagtaagcatcctagccaaaaacgcagacttgttgtgtccatttgagtcaacaacctcttaccgcgagtttccctttctcacttaattcttccagttatgttttgcctaaatttgaccccatattttgttttgtcaatgagcagtctcaatactaccgtaacgaagatgatgaaaccgatggagacgactacgtacgagactctgaagacgacgaagaagagtagtaagagttgtgtgtgtgttaatgttatcttaagctatctaatcctttttatgttcaacatcttctaaatcctcgtaaactctggttttctttgtgtgttaactgataataatggtgttatcttaagctatgagtagtagtaagagttgtgtgagttaatgttactgatttctccaacgaatttgcttttttggagattttgtcccaatgaactgcaacaacaaaagcaactggtgagaaaatgatgacttgtttgaattgtgttagagttccagatacatatgctagagatgcaactagaaactggtcatatctcagcttaaaataactacaaagagcataacaagctggctaatacttaaaaatgtaaaatcagattcaacagaacccaatggttttgtgtgtgttttcagacctttagatttcgcaaagcccaccagaaacaatggttgcaaatactttcttctttctcagttctagtaaactataagccgaagctgtttttgcttgtattcgtttgcccatattgtgatggtctttaaagattgggccttctttggttcatctaaatttgaagctttttccttttgttaaatttgttgaaacagtcaaagttagattaaaccaggacaaatgaatgaaacgataaattcataactttttactgccagcattatcagaagaatgtcgttaatgttgtctttttttctttcacttccgtctgttttttttgtggtattggttaattcgaaaagattcggaacctattggccggcaaaaaagttatccaaatgaacaaaaagaagaattacacgtgtcaagttcacgagaaacgacataatacgtgaacatgaaaatgacagacaataaaccaatgaaaatatgacacgtatattggtttcctattatttaaccgtatttagctcattgtcgctgtcactaaaaaggctccttgtttttatcttgaagcagttaataatttacgccaaagtcgtcttttgcgtttaagttcgcatgcctagctagtgccaaaggtgatcctatccgataagctttgttttgggtaaatttttatctgataaggttactgtaattatcgtcaattaccgctcttttaagtactatattatcacttaacattttttaaaaaatatgattgcagaaaatgttatatataaactaaatccctattttatcataacgtcaatttcagacaattaatgagatatgtaagcataaaccatattcatattgaacaagaaaacctccggttacaattatatgtgttgtttaaaatggttacaaaatcggaagattgttcgttatgaaaaccttaaaccataattaatacatatgttagaagataattagataagtaatcatttaactagatttatctaaaaagtgattatgttgtttttgtttgagaaaaccaagtaaaggtgagtcttttctcctttgggaaaaacaaaagtagaattcaaaaaagaaagaaatagaattcactaattatatagtaatccattaatattactggttagaaagcgtaattagcggcggtggttatcaaaagtgacttccaccatatgtttcgaaagcttgagtttcacgaagaagatggaggaggggcaactttagactagtggagatgaatcgaatgatgatttattgtagattctttgtggtatctcatctttccttcgtatgaggtgtgattcacaacaaatacaatttaacaaaaactagtttgtctacattcggtatgatataattaaggactttgtctcaaacagattaaagttcttgtttcatgattttagattgtggatgccttgtaccaatcttcttgtagaaatgccttctcctcctagaagagaaattacaccttacgtgtcgtacatgactacatggaacagtcactttgcagataggatatggtgttagacatttagcttgatacaattaattaatgtttaacaacaaggtttaaaggcaacgagagctatatctaataagatgtggtctaagacatatgagacctgatacatggagaatcactcatttataaatttctggtatattaacgacattttgtgtctaaaaaattagctattataatgaatatggtctaaaattgaatttaaattaacaaaactatctataaagtttgaaacgatcttacctaatcaaaacaaataattatctaagcaatctgttttgttttgttcggattatataggtccccaaaacgtcatacaataaaacttgcttaaatattttgtttttttgttacattaaaaaattagtatcttgttgtgtttttgtttggtttgaaaagctgaaaatgtgtgaaggagaagaaggaagctataaaaaagagtttaggtacaaaagtaaaaagttattatgtcggtgggttcattaaaagaaaccaaaaaacataaacaagtaattttgttttggcataacgaagcatcttcttcttcttccttgtatttattatccatttccagagattctcccttgtgagataacaacgaagaacgaaagagagagagagagagagagatatgatggacggcgttgaaggcggcacggcgatgtacggtggtctcgagacggtgcaatacgtacggacgcatcatcaacatctgtgcagagaaaaccagtgtacctctgctcttgtcaaacacatcaaagctcctcttcatctcgtaagcttctccaatctaccactaatttcacccttttcgtaccattttctccatgatccgtcaattttgatcccaaccatcgatttagggttttttcccccaaatctctgtttaacgattgattataattgattttttttaggtttggtcacttgtacggagatttgatcagccgcagaaatacaaaccgtttgtgagcagatgtacagtaatcggtgatcctgaaatcggcagtcttagagaagtcaatgttaaatctggtcttcctgcaacaacatctactgagagattagaacttcttgatgatgaagaacacatcctcggtatcaaaatcatcggtggtgatcacagacttaaggtacagcgagagaaatcaaatctcattgatgtttgtttatatgcagattctcattgattgtttgtttgcagaattactcgtcgattttgacggttcatccggagataatcgagggaagagcaggaacgatggtgattgaatcgtttgtagttgatgttcctcaaggtaacacaaaggatgagacttgctactttgttgaagcacttatcagatgtaatctcaagtcactagcagatgtttctgaaagattggcttctcaggacattactcagtgaactacataatcaatgaacaagggcattgaagtgaagtatcaattccagtttgtgatataatcaatattcttcaggatttttttggtttggcctagatatatatatagatatctatcctcggtaatgaccagtctaaaaagatgtacatattgtcccaatggtgaagttttgatgtaagatatctcctggtggtttgttatttgtagatatttttgtaaacaatgtaaatgtgaatggtttatgatgtataatatatagttcacaaaagatgtttctgtagacttcagattccacttctctattgaacagaacctatgattggatgctgagaacttgtaaagaatctgaggcagaaagttgaaaaactgtgtcaatttcattaacttgaaaagatgagcataaattgggagagagagagagagacaaagattttgaattgaggtttaacggtaaaacacacaaaacctattcccctctgtttccaattttcatctaaacaaacaggtacatatttgaatgtaatattgtatacagaccaggggtaaaacaggaactaaagaaggctaacaatcgagtcgaaccctctatgtgaagccacaggtttagtgcaaattgtaataagttgttcagagagactcttgactgaaacaaattgtgaagcagattcgattttaaaatcaaaatttgagtgtcgagcgggaaagtaaaagttccgctccaatcttctaatcttttcgtatctagcgggaaatttctcagcaggtgactttcataatcgcagttttcgtcgattctcttttccgattttacgattcctctctctctctcatggtgcgatttctccagcagtaaaaatcaatggcgagaaccaagcatcgcgttaccaggtcacaacctcggaatcaaactggtatcttaaatctgctttctctttcaatttttacttctgattttacccagaattttaggttttttatttcgattttgttaaccctagatttcgaatctgaaatttgtagatgccgccggtgcttcatcttctcaggcggcaggtccaactacggtacggcatctttttccgtcttagggtttccaatgtttcttccttttatcgttatgatcaaatttgtttatctatcgaaattgaagaccccgacaaggagaggcggtgaaggtggagataatactcaacaaagtgagttttttatatttgaagtcttttttttccctcttttcatctcttttgtttgtgaagttattcttttgtaacatctgcagcaaatcctacaacttcaccagctactggtacaagggtaagatttttgtgaccattgcttatgaactgcttcaactttgatttcgttattaagctgacaaaattctcgttttggtttgtcaagagaggggctaagagatccagacaggctatgccacgaggtttgttttaaaaaaaaaaccaatctcttgtgatatccctgagaatacaggacacttagtgtgtttaaaactaatcttcggtgttgtccttgtaggctcacagaagaagtcttatcgatacaggccaggaaccgttgctctaaaagagattcgccatttccagaagcagacaaaccttcttattccggctgccagtttcataagagaagttagttactctttttcttaccagccataataagtttcacagcttaacaatattcatatatactaacagaggcacaagccttttggtgtttaatgtggctagttttaggatttgcacaccccacacatatctgagcatcaatgcagtgtacatagtgagtgatatagcaatttaactaaaattcagagtaatcgtgaggccaaccctccttgtttaaggagtgtgtaatctagtttgtctttgaggttatgagctcatagattcagaaccatatgattcctgtagctacaaaactcaacatgaatcgtcagtgatgtggaaatgctgatttgtgttacaaacaaactattttacattgtttttccaggtgagaagtataacccatatgttggcccctccccaaatcaatcgttggacagctgaagctcttgttgctcttcaagaggtaccaatccttcaactttttctttatacgaatgtatgaatatagatatagagatagtcacacatttcaactaatgtcattccccttgatgaccaatcaacctaatcacacaaattctttgtggtaggcggcagaagattacttggttggtttgttctcagattcaatgctctgtgctatccatgcaagacgtgttactctaagtaagtactctaaaagaagacatttttcagtctcaacttaggaatcacaagcatacattttatatccctttgaatcattagttacttgaatatcatatataaaatgcttatctatatctgttttttgttcatatcagtgagaaaagactttgaacttgcacgccggcttggaggaaaaggcagaccatggtgatagaaaactcactcactattcacatctcttacattgtaagtgaggatcgaatagttaacaacaagtgtgtcgtaggttgtataaggttattctctccttgtctcttggtgatgcatgtccttttattttactaaatgatctgaccaaaaccttcttttgaaacataactggaaacccgaatttggtttgattccaatatctaggctgtaaaacttctttctctatgtgtgtttctatctgcttttcgttggatctgattgttttccattgagattccacttgacaaaaacgtttctttcgttaagttctaacttccaaaggttcatgtatatataatttgaagcctcagttagaaagggttgtgattgaaagaagaaaaaaaaagtaagaggaagatttgaaagaacatgtgttttgggagggctttagtagaaatatctctcagacgagtgacgagtggattcccaattacaacttgtcaaggcatattaaaaaggttgagatatccttagcacttcaaatttaaataattcatattgatttttagtgataattcgcataaaacatttgtgatatcatagtgttgtcactaaaaaaaacactataaattttcgaaaagctcgaatttcgaatttggtgatatttatttcattgtcaactcttttaagttgcctctttttcttgggttctctatagtctcttttgttttgttttttacatcctttatgatctctctctgtacattcgtaaaaattgaatgcagaccgaaaaaactaaacagaaacgaggatggcaaaagttggatgcgcccatgaatcatgcaacacaatggtcccaagttcccaacagattcattcgcaaaaattcagagtagaccgaaagaaaaaacaaattgtagtattataaaaaaaaagaaagaaagaggatgggtcaagtgaaggcgtcatgaatcatgcgatggtcccaacaaattaaatgaaatataaaatccacgtgtcatgttcagttgcaactgcatagtttgttcagtacgttgctgatcaaccttttcttttttaaagttgatagataaatataataataaaccgaacaaaatttaaaagaagctttgaataaaatttgcgatgtgaattaatggaggaataaagggtatatcctcgacgttaaattaattttatattcatccctaacaaactttcaactcaacttttgatagttctaacaatatatttcattaaattgacaaaatttaattcgatttgtaatagattggacttcataaatgataatcaagtgattctcctaatgctttttttcttcttgggaaaaatgaatacatatattgactcttttttttcatacatatttgtactcaacatagttgatttatatcgacttaattatgatttattcatctgcgtgtaaatataaaacatcaagtagtatcattttaaaaaaagcaattagacaagaacatgacggagcaaatgatgtaatgcaacatgtcttatgattctcattggtccttaaacgaaatcactcgagcattgcacacatactgacatatattggctgccacccataagttgctaaattaattaataagaataatattagttaaatccgatttaaggaaaacaaagtacgatatacatcatacacgattccttaatgtggaaaccgaccaaaccggtcgttaaactttgcccttataaatacagaatacacttcatgttcttcccttaaaaatccatcattctctcttcctctctgctctctctttaccttaaaccgtaccaaaccgtattgattgataatattgcacggtgcgatcgtaaatctttgtgtactaaggtgtcttttgagatgaatacgcagcgtaagtcgaagcatcttaagaccaatccaaccattgttgcctcttcttctgaaggtaacaactttctccgctatctcatgatctccatccactatacggtgtcgtttgattttactcttttttttttttgaaataataataaatgtgaaatttggatgatgacgtgggacagaagtgagcagtcttgagtgggaagaaatagcaatggctcaggaagaagaggatttgatttgcaggatgtataagcttgtcggtgaaaggtttttcatgttttctcttattccttaacattttttttggttaaatctttcaatatatgtgattttaataagggaattgaagattagtttgtttgtttgtaaaggtgggatttaatagctgggaggattccaggaagaacagcagaagagattgagaggttttgggtgatgaagaatcatcgaagatctcaattacgttgatggccaactcttatatcatttttataataatgagagagaaaagaatgaaaaatatacatatatattcgttggtaattctgcagttttgttcctgagttttgaagtagttgtgtgttcgggattttatgaatcacgaatggaacctttaataaattgaaggtaaagttttaatcaatcataaaaaataatttgtggatatgtattggcttgtagcactgagcctgaggcataagaaaaagattgctgggcctaaattaggcatgtgataaaaccgtttcacatacacaacaaaatccaaaatatatatacattgattacaagtgcataaaaacatttattatcatattaaataaactatataaagataacacaatctagtaatcagatgaaagtatgttaccttttaaattttatgttgtacaaaggtcattttgattttgaccaaggtcaaaattacagtttattaatatgttggtgactccttgcaacacaatgcataatattgaagcattttttatcttgagcatggtcgcatacctaatgtgcataacatagctcaaagcctcaaactcacatatttagtgggacgtctcttggttgatatctcgctggtgcgttttccactttaacaaaacttcaccaaatgacttgctggacaatccatcgtcacccaagactctaacaactccttctttcaactccttcactttatttcctatggcttttccctcttcaccttccatcagtgccttcaccactctcaccacttcttccctccgtacaatcccatcttcacccgcatggattcttagagccgctccaacatcctccacgagtagcaatgtattcatcttttgctccgcgaataaaggccacgctatgagtggtacaccgtttacaatgctttctaaggtcgaattccatccacagtgtgttaaaaacccgcatgtggatggatgagccaggatttgaacctgtggagcccatgatggaaccaccaaacctttctctttggttcggtctaagaacccaattggtaaaaacgaaaaggggtctgtctcgctgtgtggattgaaatacgacgaactaactatctcgcttggacttcgtatgacccaaataaaccgttttccgctctccgcaagaccaatagcaagctcattaaactgctcacatgtaagtgttccgccgcttccaaatgatatgtatagaaccgagccgaatggttggttgtctagccaacttaaacatccgaacttgtcttccaagttaacattagatgaacttgtgttaaccagcggcccaatcgggtataccgttggtttatcaggagccggttcttgtaaggcctttattgcattcgactctaaatcaacgaaggaattcactagaatccctttagcttctttgtacctcttggtgttatggagaagcaatttgtatgcgtcgtcgtttcggtcttgaaccgtatcaagaaagtccttaccggttatcgggacacagccgggaatcttaagcggttcggttaagtacctaaactcacacgacaccgttttgtctagtttcggcaagtgaagaaaaaacgacaagacgtttgcattggatgcatagaaaatgtatggtgacacgtggaagtcaacggccacgtcgaacgcatccgcaccaaacatatcgacgacgagaaccgccgggagacttttcttcgttgataaagagccaaaaagctcccggagcgccggattggaacgagtcatggtgagcatggcccgagtttcgattcgcgctgtggagggaacatcggaaagatcggcgggagggagaaatacggaggctatggaggaagggagagagttgagaacggatctttgtgccttagacggcgaagtttcaccggagatgatcattgtgacggtgaaacagtcgtgctgaacgagtcgctttgctaactcgacgaatgggataaggtgacccataccgggactcggcatgattgctatgtgtggagtgtttgcttccgccattaagagtagaattttctttattcttatttcttgaaaaatatctatgctcatttattttatttatggtacgttgtagtagctttatagatcatgctcgtggttatagttctgtgggaaatgggaatttccttttttttggttctttttttgtttggttcgttttgtgtggactctatttgggtggcgacgaatgggatgaggtgacccataccgggactaaagataagtatgtggtaaaatcaattggtttattattgtggaaccgctttggtccagtaggaatctttcatcttgctgagtggcaagctgttagatttgatctcaagagagacttgtgcaagagcatgtgatatacttgatgcaaatgtgcctgattagccggtgacctgcttaagtgatcactttcacaacaatattctcatgattctaaccctgagcaaatgccttatgagaagaagggcttggttttgaccagagttgtgtccgttgattattatgaccatagttctgcggagaagatctgacttggtgagagtcttctccacatctggtagtggaatcaacataatgatttgtggttgaggcccaatagaaaattttcacaaagtttccctcaaatagatccatcaatttttctaactaacacacagcaacagtgagtgcacccatacgacggataatcttgtgcacgcttaaaattttcccaaattgtgatcaacttcgtatagaaagtattgacaaccctgtttatgataccatacaatctctgctcaatctgatacaactttgaaacagtattattctctgctttaatcgtttcaacaatctttccactagctaatttcacaaagagaaacctcttgcctattgtctctctctccgtagatatttgattgggtgtagtcttatgttgcctacgtctgcttttttctcaagatatttttttatagttgcttgcttagcaagaaactttattaaaaaggtaataagaaagcagaatggaaagaatttgaaattgggaaagattggatttagatcattatcgtatactttgtggatattttcatggttttgctgctttatatataaactagctcaaaattttatggaaccgaatattttcaatgaaaacaatatgaaataacctaatctacacacatgggttttctaaccaatacatgattcatattgttggtctgcaattcattttacatagcattgcaaatatcacgatgggttaaccaacaaatgtaggtttcttatagaagcaaaaatcacggaattcagaaaaagcaaagcaaagcaaagcaaagcaaacctaaatgaagtttttatggaaacaaatgacccttggcgactttactgaagattttcatccaaagcagagtgatcctgatcatgtcctggagccatggatggttgtggtagtagtgttggtgagagtggctgtgggagttttgaggtgagcattcctcagctcctttttgctttgtatatctctgcttggtaaaggataagctaattcataggcgcgacgctgcaggatgattacacaaagagtaaatcttattgttgtgagttgttggttttcgaaacaaaaaggtccatcatacaaggaacgttgtacttacatcatcgtgactgtttgctgacatggttcctattccagatgaagaaggcaagtctggttcttgcggtccataccatggaaacaccgcacccgagcaaacctcatcgaaaactggtagtcttttatgtcttgggaaggcagagcccggtgaccggtctttctcaatcgtcctaatttgaagtccagcagaaggtgacggttcttgcgtcgctgttgtattagaaaatgaagacaagtctggctttggagtcacattgacagaaggcgacgaagcatgggtggttgtggaattgctgagatgcgattcttgtgattgaagatgtagtactgatctcggaccctgcagatgaacaaacacaaaacaagcggctggttatatttgactctggaacaaacacaaaacattttcgaagctggaagattcttgtgattgaacaattggtgattcaagattctacatatgatgaacaaatacaaagaagtcgttgtacgattcttcatgatcacttaagagaataccaacagagaaggaaaccttaccgtttggttgatttgggtactctgatttagcgtttcctcagacctacggggagatgatgcagaggcggattctgcacgatgaacaaacacaaagaagaagtgcttttggttatatatgattcctcagaaatatagaaaaagaaaagaaccttaccatctggtttcgttggcgtttcgtgatccacctcgttcctcgcaattggctcctctctctccatcgaaacaagtccaagtctcgctgtattcaacgtcgtctgatcaagaagaaataaaagattccgataactgatcaagaaaagaaaacaagttcaagtctctgtacgtgtatttatagtctcagtgtattaatattttctttttcccctgaacgtttatatgtataattttaataattacacttggatgaaaccagagatgataattaaataaattaaggaactttttgagaaaatagttttatttggtatacgtgtgagagcctaataaacctgatccggttcagggggaatggttaaatgttaagtacacgagaattctaaccaattaatgatttcgtctgagcagttttcatttgtctttgatcatggctctgttttttatttattttctgacttggtctgtatcgacttttatttaattcagtatttttatagtttgatgacaaaaaataaaaaataaatatatagaacttcttttattattttctttttatttttctttttcaattggatattgtttttatataagaaattatgaacaaaatatttagaaaatcttaacgagaaaatcaatccaacttatatatacaaattaggaatacaaaacccctcactctataaataccaatccaacattcatggttcatctccatacacaattgactaattaattccttaaaattatggagagcatcaatgacaaaactcagccacataccaggcgcttgcagagactaatgactagttccgaagaaactgacatggacgattttcttttgatcctcggtaggtcagatgaagtccctaagtttgcgaatatactagcgttagatttggatctcttcgtcataatcattagagactaagtaggcttacgtcgcttcatgaagatattcggaatatcagacgatatcaacacaatccttctctaccctatatatcatgatgagattctaggagattatgactcatgaacgcggctatgatttggcgtcacaagtactaaacatttgcaacgtacatcacaagaaactgttttgccatatcacgtaccgtcacttgttggtcttgtcgagtgacgataacggttgcgtcatactcaagaaagttataacaatagctgatgatttcttgaaagatgaattccttgacctaatcgcacagcacgctcactcgctaagcatgcacgacttaggaatctccctaatccagcacgtgcttgagcttgattttacaaagaaaaccacacaagacgacaagcgcttgcacgagctaatggctgagtttgatgaggttctctcgacatcagtaacagcagatgttgataagctccataagcttgcctcgaagctaatgttagattctgatctctttttcgagtttgtcataacaagacgaggctcgctcatgattcaaattatcctaggaaaatccgaagaagtcgaccaagttattttggcgggagtgaagcaaaggttcatcgatgttacaacaaacttttacgggtatcgcatcatgatacaaaccataaaagttttcaagaaaagaggtgatttgaaagtgtacgaccaaatcctacgcctaatcggagtccacgctctctacctaacaaaggaccctgatatgggaaacaagacgtttcaacacgctattaatctacaccaccaggattgtacgacattcatcgcgtgtgggcttcaaagccactacattgagctttcgtttctgaaacatggaagcaaaattgtggagatgcttatcgatgaccgtatttcgatggtgcctttggttctactcatgatggagattgtcaagtgtgatgaagatacgttggtgagattggctactgatgaatatgggaataacattttgaaaaagtttctggcacttgccaaagagcataaggaagatttctttggtgatcttgttgacaagttgaatcctttactcgatagtttgcgcgggactctcggagaaaacattgtagcaatcatcgactcagaaacagagatggttaaggatcgaattgtttcacaaggaaataattagggcttttattttgggaatagctttagatgcttaaccaggtttttattttcgattttgtgttgtggattttttctataaaactatgccatcttaaagttgggatgtgaacctagtaggctttttatagttacatatgagtttttatttttttttgaatataatgttaaattagattcaagaaaaaataacgttttgtacatcaaatgctaatgtttcttaaaattctgaactttgttacatatgagttttactattaaagaattgtttaaaggtaaacgaatgaaagtaggttaccttctgaaactttttttttgatgtgtttcattttatgtcaactaacagtttatatataagacaaacagaaaattcatagaaatgattcctgttcttggtcgatctttcgttggtgggctttccacttcaacgaaacttcattaagcgatttggtagagaatccatcgtcccttaagactctaacagatccttctttcaactctttcatttttttccttaccgcattcccttcttctccttctatcaatccttttaccactctcgccacttcttcccttcctacgaccccgtcttcacccagtcgtgctcttagagccgcaccaacatccacgagtagcaatgcgttcatcttttgctccgcgtataacggccatgctatgagcggtacaccgtttacaatactttctagactcgaattccatccacaatgagttaaaaatccacctatagatgtatgagtcagaatttgagcctgtggagcccatgacccaaccactagacctttttctttggttcggtctaagaagccttgtggtaaaaacgaaaatggatcatttcggctttgtggattgaaatacgatgaactagctatcccactcggacttcgtatgacccaaagaaaccgttttccactctccgctaggccaagagccagctcaatgaactgctcaaacgtgagtgttccgccgcttccaaaggatacgtatagaaccgacccgaatggttggttgtctagccaatttaaacatttgtactcatcgttcacgtcagcatcgtgtgaacccgagttaaccaacggcccaatcaggtaaaccggtggtttatcaggagccggttcttgtacaatctttatagtgtttggctctaaatcgacgaaggaattcactagaatcccttcagcttctttgaatctcttgacgttgtgtagaagccatttgtatgattcatcttttcggtcttgacacggatcgacgaaatccttaccggttatggggacacaaccgggaataataaccggttcggttaattccctaaactcacacgacaccgtttcgtctagcttcggcaagtgaagcagaaacgtgaggacgttggcatttgatgcatagaaaatgtatggcgacacgtggaactcagcagccacgtcgaacgcatccgtaccaaatagatcgacgacgagaaccgccgggagacgtttctccgccgataacgagccaaaaagctcccggagcgccgggttggaacgagtcacggtgagcgatatccgagtttcgattcgagctgtcgaaggaacgtcggaaagatcggcgggagggaggaagacggaggctatggaggaagggagagagttgagaacggatctttgagccttagacggaggagaatcgccggggatgatgaaagtgacggtgaaaccgtgattgtcaaggagtcgctttgctaactcgacgagtgggatgaggtgacctataccgggacttggtatgattgctacatgtggagtgtttccatctgccattttttgcatgagttgatagaaaaaaaatcttctatctttaacttgtttttttttctttttttttatcttgactgactaatagttgttatatagtccctttggctttttttttttttttaagttaattttacaaagaacttttttaacattgctttagtgattaaaatagtattctttgggattatttattttgttttgtttcattcattgatccgtttggttttgtgtggactgtggagtgtatgggtttgtcggcaatactttgattggagctagataaatgaaataagaaaatagacaagcaatatattgtttttagtatatcgcagatcgtgaggttgaattaagatgatcgaatgacgacaagaaaagaaaaagggcaaatcatatctatatttgtttattttttccttttataagtgatagataaaaatgtcattgttgatgaagctgaattaatatgatgtatactgatagttgacttttgccagaagaaatagacgaataataagctataactataagtgtcattcaattaccgaagatggagaggaggaagtaacgctcactgtgaaatggtaggtaccaccaaattgaaataccaatacgtgttgaatgtgatagtaacaactaaatggcctacgtcatgagaggcggctcaataattttataggccattgttatgcagatctgaatgatggccgatttacaagttttggaaacttttgcatcgttattaatgtttaaacatttggttccgtggcccatttttcctgaatgttaacgttggctgaggaagtaaaacgacacggcgtttcattcccacatcaaaaaacgacagtgcttgtatttggacccacggaaggtccaataataaatgggcttttttacgagcaaacaaacaaactaattagaaaacaacagcacgtgaagtcgagaggctattctcgtctttgccgttcccggttaagcatcacctcgaccattagatcattccatgaatcaatcggaccgggtaagcaccaatgaagacaatcgttctgaacctgattcagctccttgttcttcagcccagcgaaaggatttggataccggtacggtcccggatgtccatctggtcggagaagcgacattgaagttgtgtcaagtaatacaatgtttgaattggaaccttcttgttgtgtagtagtagtcttatagaactcttcaagctcgatatcacgcatcgatacatcctcgctcttcatctctccttcgctgccttccgtaaacggcattgttcggttacagaaaccaccagagtcccactctccattctcgaaatgatcaggtgttgttgttctgaagagaacctgagctttatggttcggttcagcgacaaagtctaaaaccaaatgaagaacctttcggtacgagtatagataaccgagttcggtcatattgttcttcccttggcagtaatggcatccggttacggtgttgttttcatggaagattgttgttttgaggaaccattttccaccggagatgacaacgtagtcgaaattgatgtactgatcagtccatttctggtctagcttgtcgaggtgtactcgaatgtctgagaaaggaactccgttctcaaaggtttcagcttttacaaggaaaggagaccaaatgacagagagtgtgaagttgtaagaagggaatctccagatccttgatttgtattccttgtcatggaagatatcttctacttcttctacctaaaacaagggcaagtagatttaaggctgctgctatacagagaaatgaaattagagaaactgttgttgtacctgagagagaatgcagaggagggattggacatggttacgagagatggaatcaccgataaaagccaaccatttgttcctcatattgtcaaggaattgctcagggttaaacctcgggagatcgcaatcgcgaggttgccatctccatcgaaggtaattcacatctggccttccgtttttcaagcaattttggtaatcttggatatgacggcaagagacattggtgtagattggccctgatgggtctggtacccaattcccgataaagatatcacacttggttgaaactacaattgttcaaacacttggtgagcacaaatccaaaataagaatttcttctcaaaacccaatttcctcacgttgcttgggtcttactctattgaatttgagactaaagtagtgatgatcggaaaaagatgatctcttaccattctgtgaagcaatggttgtgatgtttgctggggaatcgacagaggctgaagtttgagtgatggcagtgagacctgaaggatccggcgggagagattccggcgaggatcgaacggtgggaaccggagagacggtggaattagtgatgagaaaacggtaagcgagaccgatcaaaaggaagaaagcgacggatttgaggaaaatttgattgcgttggtgagaggaaccaaatggggttccttcaatcttgatgctcttagatattaatctcaatgaatccattgcaattagagagaagagcagatcactgagttttttcaaatgtttccctaattagctttctggaggtttttggttggcgttgaaagcgaggaacttcatcattataaaaaagacacagcggatcctgtttttttctttttttctcagaagtactaaaacatgttagtaataattaactcgagtttttttgtttgcatgtgtttgaattactgtaattgtttccactttgtttatgtcggtcgtggcttcatttaatttgtggagagatattcagaagaagaaaataatctaatgattaggcatccataattgtttttaaagttacaattatacaactgtaaagcgcgaatcgtgtacttgttgtctctttaaacatgattaagccattgctattacgggtgacatggtaccattaattatttccaacgtagacaggattacagtaatctctacatttatggaaattaggtgattagtttgtatttgtagtgtctatcaaacgaaactcgataaggatggtcctacagtatttattgattaattatcacttatcaggagcaaagatagagacttgttctctctctcttttttcaactaaagacagagacctcgcacttagatttaatggttgaaacttgtaactaaaactacttgtgagtatataaattagtatctagtttatgctttacacatctaattagacgaaaaaatatattttgtcttctgataaccgtggtaattttcatgctaattttgttttaaacgttctatctagagaaaaaaaaaaaatcgttctatctagacggtagaattagttctcggtgatttaaaacataaactaatctttagacatgaattagtcgttttagacagactagattatcgactctgtttttttatatggagtagggtacaccacgaccacgaggcccattgtgaataaattattccatgggctttaaatatttgctacgtggacccatcttacttgaagttgattttggatctaccataccagtgtgttttctttcttgaaaacgatttaacaagtacacacagcctggacagatctataaatatatacatttatcttttgtcacaaaatcaaacaaatattattttatttcccaacaggcaacaggttatccacaataaaaaatgatcaatttacataaaccagatcacaagatataaaaccatacggtttatctcttagacaaaaaaaaaaaaagtaagagaaagaatggaacattgtaagagaacccccaaaaaagaaactaaacccaaaaacagaatagcaaataagttttgggtcagaatataagcaaagatgtgttatatatcaatcacaaagaataatttacaaatcagagaggtcaaaacaaagctgacgaagcttcacgagactaatgatcttggaaccctcatgccaaatccatgcttcaccttgtcaaccctgattcaattttcaaccataaaatttcagaatcaactaaatgattgatgtaaaaatttgattacatggaattgtgttgtgcttacgttggagctaatctgccaagactcttaagttcttcaccagagtctccatcaagaactcttcctgctatatcaatgatgtaagaacggttcttgcctcgaggaagacctctacttgatagtaactctaggtctctctcgtgaagctctcttccgtttacaaacacactcgtgtttcctgcaccgcagttatccggcattggtcgactaaactcctctataaatggctgcatcaaccaacaattgtttcccatttcctcatcaagtaccaatcaatacaaagaattatgaaacagtgtactggaattcaaagcaatatagaagagatgtgaaagttcttactggtattataccgagacaagggtttcccatcactccccagaatccagcacggtaatcatacctggtcagaatcataacataaagatggtttcttgaacgactgatcaattcttttgacgtagatttatcaaaacgtaaccccaaacataccagtatttgccagcttgaactggcccagcttgtttctcagcgctaataaccagatcttctggtatcagatacccattcacccaaacctctagctgctcgttgttttggtcgttagaactgatattatttgtgacctctgcgaaactgtgctcactactctgctttcggtttcttggtcgtctcccttctttgctggcttttgagatccttgaatcttcagactcctcggtgttagtatagtactcattataagaaacatctgtctcagtagctactgattctgatttcagggagtcttgtttcgtgtatgattcttgcttatagtaccctaactgcgccattccgtaagtgattgcagctcggtttacattagaatactcaaagagctcaagaagattggacttttccggaggaggaggaggaggaaccttcgcgccttgggctctgctgcgaacagacttgacgacctgtttccgcggctcactagaaatgcttgacctgtcttcatcgtttgagtgatcactaggcgatacagcatggacaattttcgtttcctggtgtattcttggttcttcatcattgagtggataatcatctaccacagggattggtgagcttctatcttcaacctctacagaaacccggttcgtagtttcccccagggcagaagatgagaaaacaagcttcttatcaacaactctgaacgtgataacctcagaacaagcaccacattgcatcttttgttgcctttcctgaccaagaagcttcttcttaggcacatatagcagctcaaagcaactgtgacaagcaataaaaggcgcaccgcctgctagaggatggcaacgacgtgaatcagtatcagacacagcttgttgaacatacccacgagcaaaagcaccacccatttcagaatcaatttcactaggccacctcgtgtgaacaccaccatgtggactaaagggtccaactttctcaccgtggtgcaaagccgggctaaatgggacatcaccatacctacttggcgtacccggaaagaatctagggtcctgtaactgtgactcaagtatatcagagccaatgtctacatactgtccttgaggatagggtggacgaggcggcatctgattagggtaatgacttggtccttgataaaagttttgaggtatcctatgcactgggaatccataagggtctctataagctggaacatgaggttggttactcgcggtaggatacattccataaggaaatggctcagggtatggattgtaataagaaggaggaggtccatgatgggcatggaaacccattggtggctgatcaacaacagtagcattattacctccaccacggagaagatgatctttaatagaatcaagctttctcaaaagctcggcttgttgtttatcagtgtactgaattgggttgtttctggtggttgtgttcttagaagaagaagaatctgaatcagtctcttcctcctttctcgagctcttgacgaatctctgagaaccaggtcgtgaattcgaatcgtctaggcgatttctcatcgggctagtagcggattcattgagatcctccttaaagcctctgtcttcatcacttcttgaggaaccagtatctgctccataaacgtcaccgcttgtcctcatcggaaaaaaaaaacaaaaattctccgacgaagaccagcttctagggttttgcttgtttaaactgcaacagaaataataatccttgaattcaaacaaaatccgaaattatcaacaaattctctaatcgaatcttctccaatccgcgaatagtaacatggtagagcaaatcttaaaattttcctagagactagttcaagagtttccatgattgcacagcatccaaaacgggaaagacaagacagagagatataggaaaatcaaacgcacctcgaagaagagtgattccggcgtcagtattatgaatattttttgggcaatttcttcgtctccggtgagaatcaagcttttagtctctttgacgcagccattttttaatattaaaggagttttgtgaaaatttcagaggaatttatttaaataatcaaaagacttcgaacaatagctctacttttcttgcttcgttttcccgggaatctaccaactaggaacaattagatcgacaatggagtttaagaattttgacatatctagaaactatgagtcttaccaggtcaagttgaccaagagataacgtgacgaccaaaaataatgcaacaaaataaaaatagtagtaactaatgaattggttggatcgattcgaatttaactgcatttgaaaggtgaaagttaaagtaccaaattaggtctttgatatatttgtgtctcgctgctccaaaaccaacaataccttgaactacacacactattcatcatggccatggtgggtttagtttataacgatgaatgtgtacgtattttatacatgtattgtataatattatcttgtcaaaatagatggtgtgccatgttcccagacgtgctcataacttgaatt

SEQ ID NO: 1106 - DNA, 66131 bp, Arabidopsis thaliana
ccaaattaggtctttgatatatttgtgtctcgctgctccaaaaccaacaataccttgaactacacacactattcatcatggccatggtgggtttagtttataacgatgaatgtgtacgtattttatacatgtattgtataatattatcttgtcaaaatagatggtgtgccatgttcccagacgtgctcataacttgaattcttttcatcatcatcatctttaaaaagtttagagatgtattttagttgttggaattgtattttatattagggtgacaatgacaaatgttatagctgtaaagtattttttgtacaaatcagctgcttagtttgtttactccacttgcttataatgttatatttgacaaatctgttggtattaaaatcataataacgtacttatcaccaaaaaaaaaaaagaaatcatagcttcattcatctaaaactagagtggggactttttggtcatatcacaatcaatgacataataaaagcgtcggaggatggatgtgacggagtcggcggtggcggagatattgaaattgacgagagacagagccaaagctccgaaccacgccatgtctctagtccccggcggaatcgctgttccccttttttgttaaggtaattttcaggcagattagtcaaggttccttatttttgatgtttttatccacattcgaagcccaaaatttgattagtgtaatttgatggtgtttgatagattgtagaaatagtggagcaggcctagtttacttcacttcagcgttgagcctctacagtctaggcacataattttgcctcatatgatttgtttcctttaagataatattgtagctagtagctactgaatcaatcagtcactagcctgaacaatatacgagcctagtagtatctgtaggaaactttgaataaagaagaattttatcgttttcgatagatatgtagtggagtgtgtgtcaccacatacgagttagtatgtcttttgacttgtacagcattttgaacttgctattatgaacctattctttttccctgcagactaggaaagctcagagtcagaggcatgtccagagtttgatcgtcgtatccttgggcttatcaatatcagctgactctcagagtttgctctcatgctttgcccaccacaagggcttagtggcggatgccttgatcgtcctctcggagttgtccctgaacagaatccaaaggctagtgacacaaaacaaaaaaattagtacaagtaaccaagttcatatttgttagggagcctatatatatatatatatattggctgatgataatctcacctggtttttgaattggtttcaggctagaagctcttttcagaagatttgaaacctgcttcttgctcataccaacatcatttgaggagcatgacaatcttctttccttggcatatgacaactgctcatctgatcctgccccaccctcatcctcgctacacgaagcccattcacttcctgattccgatggttcccggagattatccttttcacacgtttttgcccgttccacaaccctatatgcaaacatttgaaaaggaacctgtgaaactttggttagctctgtagattcccaagaaagcttctgcaatagctttgtctcgatctcgcagtaatccacagtaggcgcaatggacgggtcttgttggctactactgtaacattccgggttcaaagctagaaaccgtttgatataccggagaattctgcttatcgatgagaaagttggacgctgattgggatcagcatgccagcatcgttttgtcaggtttgttatgaactttggtgaattaaatggaaaaagcggtctctccccggccctaatgtttctactcatcttatctccttgcaggtggctatcttcaaatggtactttacctgtcagaagctcaaagctaaccatcccaaagctatacacgtcagatttatcactatacttaaggcttcctgcagttccactctgttcttgctcctctagaacttctggagaataccatatgaatggaaaattctcattctgactcgtcaaagaagcacttttactagagaatcccttgacagaattcaacccgaacccaaaaatcttcccaagcagatacccatctccggattggttacttcttggtttgacaagaatgtttgatggattcaactctccgtggtatattctcttcgagtgaagatattccatacccaaagctatctgaagcatcagatcaaccgcgaccgggagggagagagtgttcttcttcctaggaccacatacctctttgatgtgcattccaagggttttcctcatcagttccatgaccaagaaacactctttcttctcctcatccgtgaatccgcagaggtaatatacaatgtttgggtgtgaaagagatagcaatggagtaatctgaggaagcaaagcatcaatatccccaaagaaatgcctaagcgcaaagctctcgcctaaccaggtaatctccttgtactgacttccattccctaatctttttttcacttggtaatcttttgtgttatccagaagagaagaaggaaatagcttggggctctcatttccatctcccaaatgcttcaaaaggaaatcagccatcttccgttcatgtttgctcgaaccggactgctttttctcctgaagctccttgatcagaatccaacggtcctctgtccaagcactctcgaaccggttgcagaaatcctcggtcaccaaatactctctcccaaacttccaggtaaacatctgagagtcattccattgcttcatatacttgttagaatgcaccaacctcttcttgctcatctcttcttcatcccaccctgaaacctcactcgctgtctcaatagcctcgacgatgatcggtagacaagagagcaagttatgtatgtgaagctctgtgcaatctctattgctatgcaacacaatagccttagcccaaaacccaagtttaggctctaaagacattctaacataagcctctccttctctaaccacccatagaagctcccttaagggctgttctagtatcttccatttagtgttcttctctttgaagcgtagattggatcgcatcgacacagaaattgactcgtaggctgcggtgaagaggtcgagtaatagagagcattgacgctggttgatttgaatgctgtccttgaacaccattaacgctcttatgcttcctaatacctctcctatctctcgaaattgatccatttcacacctcttcaattgtacacaaggccttcggaatttgtattataaattattgtactcataagaaatcgtatcacaggaatggatttgtgaaagaaattctctacttgagatgtacggacacatcatacggataataagttatatttggcaattgtagcctttgtttgttttatttactgaagtttgttttttataacaaacgcgcatgatagcgttctcatctccgagacaaatcacaaacgacgcaacgtccaaagtagcattaatatcgtacatgaaacaaatgctgttgcgtttaacgctactggtttcgataccgcttctcccacctacaaagatcatataatatggtcttgttaaagtagctgaattaacaacttttgttatttgattaatttgataattctgctatcttttggaaatttctgtgagcactagacattgaagtacagtttggaactttatccttgaagaaaaaggcaaaaacgaattgtatattttaaatgccaaagacacataacacaaaaccatctaacaatgatcacacgcatgtatgtgtaacatataggagtatataatgtgtggatgaaaactagaacaatggctgcattaatatctgatcccaagttaaataaaaaaggtacaaattcctcgtgtacgtagctcttagctctatatggttttggtttgtctttgaacctttgaggcgcatcatgaccgcaatttgatcctgcaatcaaatcaaatggcttcgttaatattttgctaattacacgacggttacgctttatataaatacctttttgtaatatgatttatttagtttactatcgaccaaatcatctaatttcgaccaggtagtttctacgtaccatttgagcattttgatggtgcattgggccatttttgagtcaagcgtctgtaatataacgcctccgcatctgagactaacgcccacagtaacaatcttacgactgcccacagccaatcctaccttcgtcttagctgtcactgtcaccaacagcttcttactcttcagctctacctgtagcctctttgccgtcggatcatccacctgtcgtttcctcaccgtcgtcgggacaatcacagccgtccgattccctggcttctcaataaagcctttgactttcgttgactctaggttggtctcaaagtctttctctccgagaatcacagccacgtcagtatctccgtaataaaacgttagctttccgttagggtttctaaaatcgagcaccgacgttgtatccgccgacaaaaaagaccatccgtcgtcggattttccgtcggaaaagttgaagttgctgattttgaacgaggctaggcggacgacgggtagtttcgggctgtaccaaaggaagaaaacagcgacggcgatgaggatgaggaggagaatcacggcgaataagatacaaacgcagcagcagaaaacgcggcagaaactacaccgccttttcttatcggccggatggataggcctcggacggcgacgtggaagcgttgccgtcccagaaggcggagctgatggttgattctgttgatcacggaaaccaggtggtttttggagtgccggttgtaacggtttctcggccgccatttcttcatcgccggcgatggttggccgcttttgatccatgtttagccctaactaaaacactttagggttttcagaattagaactttttgagaagtttccaaaaatgacagatttatatgtgtggggttttagattctttcaccaaaatataacttgattcttctacgtaacagcaacaaagacagaatcgatatgattcattcgaaactgggcccacgtcgttactacaacatgcgtgccgtttggatttatggaatgcaaactgctcagcgttttacatccccgtttgctttcttgtgctgtacgtaagtgtctttgtgatgacaatatatggatcgggacttagtttaagatagtgaccaccatgtatatatgaaagtatacagctcgtatgtttgacctctactttttttttatctaacgatatctatctaaatgaaaaagatcatctcgtcgctagtcggtaaatgatgcatgtcatcgccgtcacgtttaaatacgtgagggaagcacgtcctacacttctcccagagccggctctgactattattgggccacaagccaagttttttttggggccgatcaataacttaacttcaggggaaaataaataaatgggaaaattgtagccagtctgtaggttgcataacttctcaataagcattgttgaatcatggtcaagatttggctaagttgaacttaaagacatgattgggtagtttttgtttatgggccttgtcttaagctatgggccttgtgagtaatataataataactaaaacgagtaacggaaatgaatgaaacagaagacgcgggaattggtttttcccgtctttgaaaacagaggaaaatgagttggatcgagcggcgaacttcgacggccaaatttggcaaaacaattgtttttctcaacacaaacaaataaagaaacaaaacagaattcttcttcttcttcatttttaaaatttcttgtttcttttaaaattcaacgcactcttcttcttctcctcctcctctctcgtttacccagctcctggaacaggtaacaacctcttcctctcattttttgtttaccggatcttatgcgaatttgatcatgatatatttgtgttggtatgatcaattattgtgttcgatttctagggttttgagccgaacaatttttagggttctccgttttcatgttgtccctcaattccataaattttggatctatatctgcagatttatgtcaatttcttattgaaaaatgtgggattatttcttctaatgtataggagtatacaaattaaaagatgtgggcatagatgagatttgatatcaggagaagttgagagagagagggtaatttggaaatgtttacgcgggagataacagcaaaggacgtgaaagccactgagaaaaacaggattcgatactcttccaaacacataaaacatcttcctcctggaaccattactgagttcgaatggaaggattattgtcccttgggattcaggttcttttccctctctctctctctgtatgtctttgaggatttctcattgtctcatttttctttacttttggttggttcttttcttgcagacttatacaggaacttgaggatatcaatcatgatgagtacatgaagtctatctgtaatgatgagaccttaaggaagctttctactagcaaagttggtaacatgtttcttctttccaaagatgaccgttttctcattaagattctacgcaaatccgaaatcaaggtacctttttactaatttgctaaaatatatgtttaatattctcatctctcgtttcatgtttttatgtatcaatctttttcaatattgtaggttatactagagatgttgcctggttacttccgtcatatccataaatacaggtcaaccttgttgtccaagaattatggagctcactctgtgaagcctattggaggtgttaaggtaaactagtaataattatgtaatggaacttatctttgatctgatgtttcgctgagaaactattaaaacaaaaaagttttttttggtgtgagcagacatattttgtcgtcatgtcaaacatactgcagtcggatgtttttatgaacaaggtctatgatctaaagggttcatctcaaggtcggactaacaagaagatcaaagtgagagataaaaccatattgaaggatatcgaccttgatttttgtttctatgtggattctttggccagacaccgtctcattaagtcagtctttttctctctcttcttatattgattcttgtcgtagagaatgatttagatgtgaactttcaattgtgcaggcaaacgaagctagattgtgaacttttggaagatgaaggcatcatggattacagcttaatgcttggtttacaagtgaaaggctcgtgtcatggtgagtttaagcatctcatgtctcactattcttattagtgataataatcaagttcatagcttataaatcaaacccctcaattaatttctcaactgccctgcaggttcaattgatgaattaatcccggtatacgacagcttcacatcacgaggtaaacctctccctaccaattcttcttctctttactgtagtccaccaccaagaaagaatatatggaatgctacatacactttctggtcaatcttgcaggctctgttgacagcaatagctctaagtttatgaagacagcttcaaactctccagatagatcatcttctacaatgtattcatgcactcccagcagaagtaattttttgaatccttccctaaatgatcttcaatttctaatctaaaatactataaagagaaaactcctgtcgtgccctaacataagaatcttcttcattttcattcttatagattcagttgatagtgagaactcagtgaatatacaatcagtagcaagtataagccctagtccagcacaaaccaacgcttctgattctccatatgaaagccttgtttccaaaacaaatctcaccaacatcttccaaaacaggtaaccaattttaagaattccatgtccttgtgttcacatctaaactgccaacacacaactagggtttataaaaaatgggatttcgtgcagctcaagcactaacttcggtatgaagataccaggacgagcacgacgggttgggagaggagaatcagggagtgtggtgggaaaacagagcagagaaggaggagaagaatggtacgatgtgattttgtatcttgggattatagacattttccaagactacggtgtgagaaaacgccttgaacattgttacaagtcaattcaacacagctctaagacaatctcagccgtccatcccaagatgtattcttctcgtttccaagactttgtctctcagatcttcttaccagacgaagatccttctcactgatacataacttccatgtcttaacatttctacttatatccactatttatttagtttagcgaaagtttatttgtttgtgaagcaaaagcaacctccaaatttctctttcttttcttaactctttggccttggtcgtccaagcctccaaggctcaaatttcctttatcaacttatttacatatactgactgacattgcaaattttagataaaccggagttaattccaaccaaccagactgaaattagaaattccatacgaacgggagcgaatccagtaaaccaatttgaatatctcacccgaaccaagttttgatttatccaaccggatattctaatttcttccaaaaagttttaagcaagcgaataagtgggggacaagtggaagcatcgcagagaaagggggacacgtggaggaggaatggatcatcatcttttgttctcactgatccttgttacttaatttcagaacatctccgctgattacggattttgcaacttcaaaacgctcattctcgatatcgctccggatgagtattaccaaacgtatcatcagattgacaaacgcaggttacttaattatacttctgatttcgattcttgttttcttttgttggttgtcaagagtagagtcatttttctaagtcttttttatggttacttgttgtagctcccaagctggcagagggaatgaccggaggaacgtttccaaattagaatcaaatcacaaaaccaaaaattaaaaaaaaatcttattttgtcggcaatgttttttagatatttcatcttatgacaactatgtattcggaaatcttgcaaaactggatgatttagatgtgaaaatattcagcgcttaatgaattaaatccggttaaccagaccaagcagaattaaaatggaaaccgataaatcagaacaaaacagaacatatcttttggttttcatatcaaaccaaattgaattataagattttgccttggattttggtttggtttcttatgcaacttcccaaaagaactgatctgtccaaacttatgatatggcaaaataacattttattagttatagcaaacccaacttattacattacgatcatcaccattcaccatcataacgatgtgtggtcttatatataggttttgtcgatcagaagaaatctttaaaagtaggaagtttgatttctcccttactagagatagggatagtaaattcccctacaacaggaaggtcgatggttagaccgatttggagctcgtagtcaatgtcccagtccacaccaacgtctcgagccaggttaaacagtatactatacggcaccaccacgggaatatcaagagccgtcatgtccttagctttcagagaacccgggtccggtatcttcccctttccaatctccctgtttacaaataattagatctctgttgtttacaaaatctaacaaagaaccaaacgacggagttagtaggttttacctgccggcgctgtggaaagtgaaactgatctcacagatcggaatcgaatgactgtaaggattggtgacagagactttggccaagtactcaactgagtcacggttcacgtctttgaggtcaacgtccgtaactgaaccctccggtttagggatcgcggtgagtttatccgccacgaagtccttggctttatctagcaagctcgccataataactcttcttgtttaaatctctttgtttttgtttcggtgttttaggtttgtgtgtatgatatgaagtttaacttggaatatatatataaacggatgggattacgatgttcttatgaagtcggtcgatgtaaatggattaaattttataatggtttgtgtacgtgtgagggttttccacgagtgagagtgaaagcgtgggttatacgtgtcttctgcttgatttttgattttttcgttacatgacaacaatattttatttcaaaaatatatcattcatgaaaatagatattttgtttgcagttatagctaaactagataattaaatacctttttagatagtcacacgataaatttaataccaaaaaaatggaaagtattatacaaaactaaaagagggaaaagtattcgcgtaaggaataagatgcgcaagggattaatggaccgaccatgtccccccatatgcacgtcggtggaatgtagtagtactcccatgcattgcggtacactatatggacaatgcacttatgacccgtattggtatgggtttctgatggatattaaggtcaaacttaaatgggccacaggccataagcccattcaaatttgtaactggactatgatcactgtgaagtcgtgaatcttcttctcttaaaaacaaaactttgacatgatcactgtgaagtcgtgcactgtaggcatgtcacgtgttgatggatgattagtggaaagggattggaagaagcgtgtccaattagtcgacagctgcggaatggaaaaactgagtcagcatttatgttaagaagtcaaacctacgcctcgcatggtttgttagttaatttgacttattgaccagtcaaagcatgctttgacattttagtgatacacaaattttataatataaatccgcaaacactagattatattcacacttctctttaattagtgtttggttccacgattttcaacggccgattgtactttttggttgcaaaattttacaaaacggtaccttttgttttgtacattttaaaaatcaacttattatttattggcatctatagttagggaaaacgtttcaattgaacatgtacgtgtgcataaatcaaaattttatttaaaatatacagattcgcttaaggagtataataacactccacgaacgaaattgttatgtatatattacatatataatttgtaatcagtgaattaagacattcaaataattgaaattaattaaacttttaccaagaaaataaatttgataaataataattgaaattttggaatgatatcaaaactgccgaaagcacatatgtcggtgttggtagttggcgggccaattagtatacgaatacgaactccttgttcggtgtttcttttacaaattattttcttttattcataatctatttctaattcattagatgtttcttacctgcatttcatgagaaacacatccaaaaaaaaaaactatttacaaacaaaaagttcttcttagacaaaataatatattcacaaagctacaatgtttccaaacttgataagagaatattagtttaggactgtctttaattattgtttacacaagggattcgtaggatcccaaaaaacaatgggttcgttggttttgtttgaaagtgtagatgtaacgactccaaatagccaaaagttgatatcttcagtctatattattgagatcttatgtcccccctgtaattaatttttccagcaatgcgtgcttaaagaatattgtttgagactttagttattgtaatacgacattagtataagtagagccaaaatcagattttaatatctttagtcttaagacatgaaacaagattaagaaaataccttgttttcaaagaaaacggttataaaaaggaggatttgagtttttgacattcagacgataaaaattatgaactaggtctagtcacgtggtcgacgcgtgagagtttccggcgtgaactgcaagtaaaatcacgtagagcatgtgattgacttgaccaaagagtccaaacccaccaactacaaaaaaaaatcaagatataaataactaactctcactagtcactaatataatttttcattacaattcatatatgatctactaacaattgttgtggttatacaaacaaaaaatttatttttcgtaagacggaaattttgaaatcaaattcctcaacactcaaatgaatattcagtagtagtttatcaatgactagattagatatttcttaacgccagtcaaattttggaattatgtggaggacgtacgtttatacatgtgcagactacaacataccaaatgttttattaaaccaaattacaatgttgcaaattggtctattcttttgaataatctgatacattttatctcataactttcttcctttttatttgaattcaatcaaataatattctccacatccccaaccttctttttttttttgcatgactaagtagtttaaggtcaacatttttcataagaagttgcttagaaatagccttgggttcaaataaaatacacatgattttcccgtttccaccaataaatcccaatggattttaatactgaaacggaaatcaatgcgaaactattggagtaagaccaatttattcatcttaatctaccaaattcggatacgatatgtttaatacaagggagattgatgctagcaaaacacaaccatcttaattttttttttttttttttaattagaaattcccttcccaaatggtaattcaatcgtaacaaaagtacgttttgaaatattgttttggatggagattttttccttggttcgcttgttacttttcacttgtttcatcaaatcctaactccttttattttggaccccacatcaactttatttggtctcctcaaggtttctgtttcaactcctatataaaagcaaataactcatacgttaattagtacacaccacaaaaacttgtcataagatcaatatcgatacccccaaaaaaaaaaaaaaacagctacaaagaagtgagaattgacacagcaaatgggtcttccgggaaaaaataaaggtgcagttttgtcgaagatagcgactaacaatcaacacggagagaactcagagtactttgatggatggaaagcttacgacaaagatccttttcatctttcccgtaacccccatgggatcatccaaatgggtcttgcagagaatcaggtacagattatatataatccaataaatcatgttatatgttgttgtcgttgtgcatgaacttccatctattagctattatatatgaacacgtatacacatcaagctaatacctttttttcttcttttcaagtcaagttaaatacttaataacacatttttctaaacttcttacagctttgcttagatttgatcaaagattgggtcaaagagaacccagaagcttctatttgcacccttgaaggtattcatcagtttagcgacatcgctaatttccaagactaccatggtcttaagaagtttagacaggtactataaatcattcattattcagatatcttgtaatcagctacggacatattagaaaaacaatttttacatggaaagttaataacacctctaaacaatcagttgatatgatctgcataagaaaaacaaattcagtcgtggtttttttttttttttttttttttttttttttttttttgttaaagattcgtgttgcatttaattagtaacttattttataaacttatccctaatataaattttggaattgaaggcaattgcacatttcatgggaaaagctagaggtggaagagtgacttttgatccggagagggtggttatgagcggaggagccaccggagccaatgaaacaatcatgttctgccttgcggatcccggcgacgttttcctcattccctccccgtactatgccgcgtaagcattgttaaaaacattaatcacatttttaagagaaaatagtactagtatatgataatggataatggttaggacagatttcattaatgttactttcacatacttttttggggttaacaaattctaaatcgaaatgagttattagtatcaagttttgactcttttgccaaactttatcacacgtgtacgatatatccattcaatagcggttttaattgaacgacaagctctcatacgtgtgataattaatgatttaatcctttccgcagatttgatagagacttgaggtggcggacaggtgtcgagataatcccggttccttgttcaagctccgacaatttcaaattaaccgttgacgccgcggaatgggcttataaaaaagcccaagagtccaataaaaaagtcaaaggtctgattttgaccaacccatcaaatccactcggtacaatgttggataaggacacactcacgaacttggtccggtttgtcacgaggaagaacattcacctagtcgtcgacgagatctacgccgccacagtcttcgccggaggagatttcgtgagcgttgctgaggtggtcaatgatgtggacatctccgaagtcaacgttgacttgattcacattgtctatagtctttctaaagatatgggacttcctggttttagagtcgggatagtctattctttcaatgactcggtcgtgtcttgcgcaagaaaaatgtcaagtttcggacttgtttcgtctcagacacaactcatgcttgcttcgatgttgtccgatgatcagtttgtggataattttctaatggaaagctcgagaaggttggggataaggcataaagtttttaccacggggatcaagaaagcagatattgcttgtttgacaagcaacgctggtttatttgcgtggatggatttgagacatctactgagagatcgtaactcgtttgaatctgagatcgagctttggcatataatcatcgatagagttaagctcaatgtgtctcctggctcttccttccgttgcacggaacctggatggtttaggatttgctttgccaacatggacgatgatactctccatgtggcgcttggacggatccaagatttcgtgtctaagaacaagaacaagatcgtcgagaaagcatctgaaaatgatcaggtaatccagaacaagagtgctaaaaagctgaaatggacgcagaccaatcttcgactaagtttccgacgactttacgaggatggtctctcgtctccagggataatgtcaccacactcacctcttctccgagcatgaaaatcttaaggcataacgtctgagagattggattaactcgtccgcgtttcactccgtgttaattaatcttaaattagtaagtgattaagtaaatgttttttctttcattgtaagattggaataattcaatttcgacattagggttgtttttgacggccagcttttttcctggggtcaaatggtaacttttaagattttatgtgtttgattctgtttcttttttccgcttaggattttaatcgatggattgtcctagtggtgctggtgtgtagcatatatgcttttcttatatgtttttgtgtgtaataaatgaaacattgtcttttgataaggatcaccagagtttattagttggggaggttgataatgttttgtgagtaatggaggatttgttaacctaatttattcgattttttctagaaccgcattttcttgttcgcccaatacgtcacacgagcatgccaacatgcctatcctttttctaaaataatcattatatgtactaaattgaacatccgattatacagagatataatcaataaatgcatgttaagttttatatcttggaatttgccttagcctatcatattgtgggtgatgaaagattcatcagcatttcagctgcaccaaatatgattaaattcaacttattattttgttacaaagtgacaaatttgcttagaataatcagctatcaaacatgatgacgtctccatcaattattcaataatcgtcagctttctttcccctttttctttgttaatgataaaccgtcagcttgaatgttatagtatttatttttggtcctcttttggtaaaccattagctattatttgataaaatttacagatctcagattgataaatttgttacatatattatatgctactacgactttgttaggtaattaagtgctgatggtaaggcgtgctttgggccgcctcttagctgatattgatactacacacacgaacaaaaatatatatatataagacaaaaatcaaatttgatacttggaaacaacggtttgatccttttcacacagaataatatgtatctggataatatatagatatctctgtctaattataatcatcgacattatcgtcgtcatcatcagtcacaagtcacaaccaattcatgatcatcaacagtaggttacgaaacatgatcaagttatatatttattttgtttggtagaaaaaatgacatgggcaagtttttttttatatatatatagtgaatcctctttttaatattcaagggaacttttttctgtcttggattttgttttgactctaaataattcaatacggcataaattgaaaatgatgaaataccaaattaagttttcacatgctccttttaggtggctacctaccaaaatgtttttgacatttgcatttggtttgagccacaacttgatctatgacatttacaatgcacttggttacgtgaagactatttttagtaatatatcttttaacaaaaaaaaagatatattttcaataatcttttggtgtcgaaaaagaaagaagtttgtatgtggccgagatacgggcatttttattcttaagtggtttctagattttttattttttttgtttagaataaatttagaacttcactttatgctattatcccctgaaatacaggtacatttgtgaagaaactaaataaaaattagaacaattaaaaacgctttaccttctcctcttacaaaatttctaaaagtgactcatcagatgatcatgaaggccatgccctttcgcttcgcgcaaaacagaagtaaagataaattatcaagtttacagctgaaatgttaataagccgcccaacaacatttattcacctaagctagcacccacatacatttaaaaatatatatattgaccagattatgaaaaaactttgacaataacatagttatgaaatatacataaccttaagaagaagatgaccaggttatgaaatagcaaaatcgaataaaaacattgcagaactattgttcgcaaaactattttgcaatttcgccattccattggcttccgaagaagtatcaagctttaaaaagttacacgaccaacgcatatatataacaccattatttacagaaagttaccttcaaagtgaaaaaataaaattctagtactatcgacgatatatacacaaaacatatcatcgaaatcgatttaaggaaataaaacttccccgcattatcgaggagacaaaaacatatccgatcccatccgaagtctaagatatatcctttgtttcttattcttcatcctcatgactatatatagatcggtccatcttttccccaaaatatatcacattataaatatttcaacatataacgcaagcattagggttttcttcgatgctttgggcgtagtaatacgttgttaggtgaggattatatgctttatacgcctttacaagttccaacacatgatcaggtggcggcacaactggttgcggctgcgcttgtggttgatctttcttctctccttccttcttatcgccaccttctttcttctcttcttccttcttcggtgcttctccttcctttttcccttcttcttttggagcttctccttctttctttggcggctcgccaccaccttccttcttcggctcctccttcttctccttttccggctctttcgcaggtcccactagtacgatatccgtcatcggccaatactttcttagcttacttactacatttaccggatccacggttccaataaccgtcaatttcttctccttcatgtccattgcaatggaatcgattcctaaaaaaaattaagatgcaacttgtaattcaccaataaggaaagtaaaacgctttgtttgaatcaaacaaaaaaaacaatctttgacttatttgcttgttgattttgttgacaccatatgatttatcaactgatgggcacgtatttcaaagaagcaatagtggcctagatttgattttattctaagaaataaaacaatgaatttcacaaataaacaataattgaaatatttggagcaatattttttaccgtactgtcactattgaaaaagagagacacttctgtcagaacagctcgtgattgttcatcaacattaaagaaatttttcacatttttttccctctgtttacacctacctaccaaatcggagactaaatcggaccggaaaccatttatatagaggtgaggtttagaagtgagaactaagcaagagatctgcgacttgtttctgatgaccaacattgtatataacaggagcatggaaaaatgattacctgggagagtagaaaccgttttaagggccttttgttttgccctatcgtcatgcaaatccagctttaacacaattttctgcaaaattattacaaaagatcaacaagttagaatcatcaagagatgtgaacaccaagatgacataatctttgatttttgagtttttttctatccggaagaggagcaagaaaaacagagatttgcagattttaaagaagataccaaaaagttaatgatatgtgtacataccacacacagagtgacgtgcatgtgtatttgtgtgaacatatatagtagagaaacagagttttgcaaaagcagaggcatactcatcattcaatttatgattcttgatttgattttgttaataattcactggtaaccttaaaacggtatttcagccacacacaaaaaaatcattaaaaataaaaagaagagtttcgttgcaattaggatcagaataagttaaaaagtgagattctttaagaagaaaaaactccaaaagaagcaaatcacatgtaataaacactcgcacatgaagtaatgcaaaaaggaataaattcagagaggttcattaataacgaataaacacagaaaaaggctttttactttcggattcaagaatcaaaatctattttttcttatagaaattctctaatccgaggaatcaaatcttgcatacgtgtaaagaaagagagagagagagagagatcgaccttcattgctctcagctttttatgtaacttgaatgaattctcaagaatttgcaaagagatgtgaaaaagatttgtctgtgagtaaaaagagagagagagagaaatgagaataaagaagaagaagaatgaaataataggaaacttatgaagacgataagagagattggacactgatcgttattaaaaaaatacccaaatcctgacaaatactggagagattaatagagagaaagatgcatgcagagagagagagatcagtagtctctcaataatgaatgaatgaatgaatgaatggtacgaaagagagagagagagagcgacgagaagagatctctttgttttcgtctttgcttgtatgcgcgtgagataaggcgcgtggtgttgtggctcagcgtcattactttcggtcctttggtttgtgtttgtttccttttttctgaccctttgaaatttctttctcaccttatccacgtcatctcttcttttattatctaaatcgaattcctactttttgataaaatacgtttttcgtttttgtattttaagggaccagaatatagtagtatgagtttgttgtattatactacaccactcgggagtatcaacgaattttgtcattttcatacaatggtgtccagagacttattacaacaccttaattaggtatgcttatctaaacttaattcgaatcattcaaatcataatactttatattttaactgttatgtttatcagtctatgcatctaattggctctatatatatatatatatatcatttattttacttggcacatgataatattatgtttggcttcagccgaataaaaacatgctgtagaaaaaatctattaaagaatttatcaaaaataaaactcaaatttttaatagttttgtaaatgatttttgcttttgatcaccaatccatcgattaatacgaaataaatatctttagttataatataaatgttggttgttttttgttggtaaaaacatactgtaggaaataaataatgtatacaatcattaagaaaatattgaaacactcaaattgtcaatatttcttattgcatttttatatataaacttccattctatgattgatttattttctcaagttatatgtatacgaagtacgttgtctaataattgagtcctcgctcccaccatcggtttgccaatcctacacgaatttgattctctaaataaagacaaataatattctccaagccacacacaaaaaaaaaaaaaacatacattagtagtgggaaacagctgcatattccacgtgtttgcccacgtagattaattattatttctctttaatatttgacgtccacgaaatatatatacaagtggattgtgtttttggctagcgcgtgagaacacgcagcaaactgcgagtagaggaaacgagacgtgatgagatttgtgtaaatctgggccacttagagtgggatgtgggacctattactctgatgtacaaattctatgtattttgttattataaaaaaaggcggcttaatagtcaattcttacccttacgttgatcgtaccatcctcatcttctgatctggaccgtcgattctaagccttcagaggacttgcattgcatgtagtaatttggcgatgaatcaaagagtaaacacaatttgacctaagtactcatttattattttctggtaaactttgacaaaaaaaaaaaaaaaaaaagagaattctataaaaacttttgctttatagtttgaccaaaattgaaaatgctctataaaaacatttgaagctgctactaatggagttgcttgtttttgacaattaaagtctatttttgttaactttcagtttattatctaaaatatttttttaatcttatcttaaaattaaagtgatgatgttgctacaatgctacttaagaatatatcagacagtgtttttatatgtggaaacacgtacaattggggacaatatagttatcttaactattttaattagttcactatcataattgcacactatataatctaaggcaaaataaagcgtgttatcagttaattaacctctaaatagtaaaaaagtccatcgtcagcgtaaaatatgattatgaattaaatgttaactaaaaattacgaaatgtattaaaaaagtaaaaccaatcttacaattggaggatctaaaatacgatcaatatcatgctacgtggtgcaattaagtgacataaaatcaactaagtaaacctccgacacggatcttgagttgcggacatacacatgaattgcaaaatctttatttcagctaaacgttaattaaatattgatgtcagattaatcttatatatgaatgttactttatgattatattcgcctacctaattaagtaattagaaagtgaaatgacaagccccaatcttttcggtgttaacaaaaagaggatgaagaagaaaacattatagccggcctataaatatatatccaaagttagtccaatttctccgacaagatctaaaatcgaacggtgaggaatcctccaaggataaaagttcaacagctgataaattttctcttaaaccattgagaaaaagaacatctactaaagaatgtaatagctatgattaaaattaataatttccgtacggtcaatgacccgaatgagtaaaatgatgttgctttctgaatcattatttactaagatctaaatgtggtctgctttttacaattatacaaaactatatatatccataacttttttgcaaagaaccatatgtagttgacgaaaaaaaaaagtggtctaacatgatttgtagcaattgagctgagtccatatgatttaagcccatttaacggactgtgtggaattgatggcccagttattaaaccttttttgtttgtgtggaaaaagccaaaaaaaactgtcacacgtgcgaatctcacaggtgaggagggtattttatcctgtcggtttcttcttctttgacccctccgtaattacctcgtcttcaatcaaattataattttttgacctttttttaccttcgaaaatatctgaaaccctcaaaaacctaaacacaacaaacaaacaaacaaacaaaaaagttcctgttcgattcctcctctcattcattctctgcttgttcctcaaatccttcaattttctcatcaaatccagatttgcgaatttaggttttcttgaatctaatcgttctcgatgatttcgaaagatcaccttcatcatctggatcctctgggtacaaccaaatcgtaccacatgaatacctccaccgtatcgccgccgtctccggcatcatcaatttcgttgtcgcaatcggcgtggctggaggttcgtttgttctacgtccgtatcgctccttgcgtcgttgagaacgtccctgacttcctcaccctccgtcaccctcgtcgcgaaaccggtgcttctcttgaggttaacggcgttcgcgttccttcgtcgcagacggcgtcgcttaaactccgccgtgacagagtcgaccgggaatcgtcggaggtgacttacgtgagcactgagaccgttcgcgttaccggatgcgttgatttcgaggtttatgataacgaggatatggtcttgtgtgggaacctagatagaatcgaaggtgcttggaacaatggaactgtgagtgatcccaagactggatggggcatggattgttacattgctatgggaaacggacacgtgtcaggtccttctgcctctgtgtttttccagccaaagtttggagtctcgtctccgtccgtcgaggtttatatagctggttgttgtggtggtgtcccggtgatattgaccaagacgattcaggcgagtccgaggaggaaggtggctaggcacgtgacactcgacgctatccctgaggatgaggaagttggcaaagagcaagacattggtaccattggtgatgaattggcccgtcaaagcaaagtacaggtatgattctgatttcacaattctctgtttggtgattgtccaagcccttaagttacgattcttaataacttgggattgagatttgaaaaggttgcttctttcgtctagttttgtgagttatgaatgctgtagcagatatttagttattaagatcactcgcaagtttctggtgaatttagctcctgcttgaatgttttctttgactctacagctgaatttgaaaattgtagaattgttgactgatcagaaattgagatatggatataggtcaatagactctctttgcactttttttggtgctttatcttgtttgtcgtttcgtttatgcagatgatggaatcagaagttgatgaatacgatgactcagatatgaaaatggcacagagatattaccctgaaggaatgtacgttgatgaggatggtcagctctcatggttcaatgcaggagtcagagtcggagttgggataggccttgggatgtgtcttggtgtaggcattggagttggattactcatgcgttcgtatcaagcaacaactagtaaccttcgtaggaggtttctctgatcatcacctaccataaactaaaaacccacttagacatttcgagatctactaagaatgtcggtaacgtagtgggttataaaagagatagaattttggtagatagatgtatagagcttttggttttcacctgtttgtgtccttttgaatatatatatatattcggctctgttcatatactttagtagcacaaaagagagttcccatcttgctccagtcatgttcttttgttctttcttttctcaagtctgtctatgtcgttgctcttgtgtagaaagagatttcgtgttattgttgttgttgtcaaacgctggagtttgtctttcggtttctggtcaggaaataatgtggaatagggaatgtacatgtttcacctgtattcagtatctgtttgcaattagtaaattaaattattacaacaagccaagtggaagacggcgtcgtttatcataaatgtcaaaccgatgacgtcttatcgggggagcatgagcattggactaaaaaattattgtcaatttgtttaaattgtattttgggccctgaaaattattataaatgaaatttagccccttaattttgtaagagtttacaacattgaaccctaaatcattatgttcccaaaatcaaaatttcactcctcgagagtagcgagaagaaggaggagatgagcaagatccgttcgtctgcgacaatgccacatcgcgaccagccgtcaccggcgtcgcctcacgtcgttacactcaactgtatagaggattgtgcgctcgagcaagactccctcgccggcgttgctggtgtcgaatacgtcccgctcagccgcatcgccgatggtaagatcgagtccgccaccgccgttctcctccattccctcgcgtatcttccacgagcagctcaacgccgactccgtcctcaccagctcattctctgccttggctctgctgatcgcgctgtcgattcgactctcgccgccgacctaggtctccgacttgtccatgtagatacttcacgagccgaggaaatcgcggataccgtcatggcgctcatccttggactccttcgacggacgcatttactctcgcgacacgctctatcggcgtctggttggctcggatcgcttcagcctctttgccggggaatgagacggtgccgtggtatggttttgggtatcgttggcagatctgtatcggctcggtatttagctagtagaagcttggctttcaagatgagtgtgctctacttcgatgtcccagaggtatgtttgttggcaatgtctcgctaagcttttaatatcttagtgtaaactgactctttagggaccaaaaaaagtgctgagttcttagctactacattcctaaactgcttactatgatggctctctttcaagttcctctcccttggatgttatatttgttgtcaatagttgcgtttgcgtctgttcagggagatgaagaacgaatcaggccctcgagattcccacgtgctgctcgaagaatggatacattgaatgatcttctagcagcaagtgatgtcatttcgctacattgtgcattaacaaatgacacggttcagatactcaatgcagagtgtttgcagcatataaaacctggtatgagttttcttgtcaaatgaaatttgattctccatgaatgtgaattgaagatgaacttctgctttctcgcattcccttcaattctggttgattttatgtattaggggcttttcttgtaaatactggaagctgccagctgttggatgattgtgctgtgaaacaacttctaattgatggcactatagctggctgcgcccttgacggtgctgaaggtccacaatggatggaagcatgggtatgactttcttttccagtgactaaacttcacatttgcgcctgcctattctcttgtttcatcatcttcttctgttgtttatcctgcatccattatatcttgttttcattgcaggtgaaggaaatgccaaatgtgttaattctacctcgcagtgcagattacagtgaggaagtatggatggagataagggagaaggctatctctatcttgcattcatttttcttagatggtgtaattccaagtaacactgtttctgatgaggaagttgaggaaagtgaagcaagtgaagaagaagaacaatcacctagcaaacacgagaaattagcaatagtggaatccaccagtaggcaacagggagaaagtactctcaccagcactgagatcgtacgtagagaggctagtgagttaaaagaatctctgagccctggtcagcaacacgtttctcaaaatactgccgtaaaacctgaaggaagacgtagcagatccggtaagaaagccaaaaagagacattcacagcaaaaatacatgcaaaaaacggatggttcctcagggttaaatgaagaaagtacttcacgaagagatgatattgctatgagtgacacagaagaagtattaagttccagttctagatgtgcttctcctgaagattccagaagtaggaaaacacctcttgaagtaatgcaagagtcttccccaaatcagcttgtaatgtcaagtaagaagttcattggaaagtcaagtgagctactgaaagatggatatgtagtagccttgtatgcgaaagacctctcgggcctccacgtttccaggcaaagaacgaaaaacggtggctggttcctcgatactttgtccaatgtatccaaacgagatcctgctgcacaattcattatcgcatacagaaacaaggtaaacctttttctctctcttacttttcatttatcttgcttacaatgccagatagaccattataaattggttttggtgcatgaacttgttttccaggacactgttggtctgagatcatttgctgctggtgggaagttactgcaggtagctcttacattagagagtgttacttccattggtaactcaatgttgctcttatggaatctaaaagtggttgtgtcatgggtgtgtgtgtgtgcagatcaatagaagaatggagtttgtgtttgctagccatagttttgacgtgtgggagagttggagtctagaaggttctctggacgaatgtcggcttgttaactgcaggaattcctctgtaagtctctgtccttacagaaaatggcccgaaattgaaaaaccctacttcttggaaaacagaaataatttgtgtaatgaatgttgcaggcggtgttggacgttcgtgtggagatattggcaatggtaggagacgatggtatcacacgttggatcgattaaaaagaaaaacagagtctctccatttgtgagtttctctcttttaattacttttgttactttaacatccttaggattcacagacgaaaaacagagacacccaatttttgtgtttcgagactgtgtcgtgtgttgtgtagttggtatcaaccaacttatatctgtaatcattgtttctttttatttattctcggtttgcagaaacatccgatgagcttgtcttagagggacgtttgttgttgttttctgggtctggtcgtgatgaactcgaaagcattgtgtgtttggttagtagtttgaaataggtgtgtgtattgtatttgtatatgctgcgtttgtgttttagagatcatcgtacataaaacacatcatcgtacataactaaaatttgagctaaactacaaaagaaagtaaccttcatttttagtcgaaccaggccccagctaggcagctatctcgtaaataagattgctggcttacgatcgtattccacgtggcaatttatgtgccgtggatttaaatttgtacgtggcatgagtgttaggagaatgtccacatggcttgtagttgttagtcccacgctctgaaccagagcaaccggctccttacacgtgttcggcttaaatccatttttcgaatgagattacacttctaaccttgtctccctctcccgcttataccaccaccactctcacacaagtctctcaagtcacaaactctgtttcaaaccaaaagggaactttgtgtgtgttgtcgagttttatggtgactgtaaaccctagccaagctcattgtttgcctatgaaaatgagtctaccgggtttcaatactcttccccacacggcaacaacgataccggtttccatacggagcaataggacgatgtcgttttttgaggatccaacaaagaaggttagaaagccttacactatcaccaaatctagagagaactggacggagcaagaacacgacaagttccttgaagcccttcatctgtatgttgacacggatttcacttctctgccttcatttatctgattaatgatatatagaatctttgagatttgttcttcttcttctgatatgatcatgtctatttgattgcagatttgaccgggattggaagaaaataaaggcctttgttggatcaaaaacagtgatacaggtaatcaatcaaacatatgcattccatacttttgtctgaagttacatataagtaattttatgaactctgttctttggggtggaattggagatataagttctatgtatgttggatagtaactagaatattggttttgtagatacgaagccacgcacagaagtactttctcaaagttcagaagaatgggactaaagaacatctcccacctcctcgaccaaagaggaaagccaatcacccatatccacaaaaagctcctaaatgtggcaaccttaaaccttttatctttctacttccgcttttgttactttatctcattttctcatggttatgtttttgatgcagttactctttcttcttcaaacgcattatttcaacatgactacttatacaacactaattcacatccggtgattagcaccacccgtaagcatggattagtgcattgcgatgttagtataccaagttctgttatcaaaggtaaaatatgtgcttaagtttgctgtgtggactaatgtaataatctgaagatattgcttgtttgagttgttaataatgtggggtaatgaatttgtgattgtagaggaatttggtgtctcagagaactgttgcagcactagtagtagtagagataagcagaggactagaatcgttacagagacaaatgaccaagaaagttgtggaaagccacatagaggtaacaattttgcttgagattcctgactttgtgatattcatatactgattatgagtttgtttgtttgatgttggtttttcaattcagtggcgccaaatttcgctgaagtttacaattttataggaagtgtgtttgatcctaaaacaacaggtcatgtcaagagattaaaggaaatggatccaataaatcttgagacggtatgaaaaccaataactctgcacatgaacatgtcttgatttgaaaactaacgtttacacggttttttgttcaacaggttctcttactgatgaaaaatttatctgtaaacctgacgagtcccgagtttgatgaacaagtaagagctagtcgactctttgttacattttgactcttgagaatattgaagagtaaacaaattttctctgtttattacagcggaagttgatatcatcttacaacgccagttagaactaaacgatagagagaagtctctaatggtagtctcatgggatatgaatgaatgaaccggttgtacatataagtctcaatagtttagaacgtcttagaagacagataaagcctgtgtagaaagtcactagcttttttgtaatattcagttgttgcttaggtttttatacggaatggactaatgacataactagttttgaaaattacttcagataaagcctgtgtagaaagtcactagcttttttgtaatattcagttgttgcttaggtttttatacggaatggactaatgacataatatgaaacttcatatagcttactcatattccacaagaaaatgatataaagctacaagacaaagtataacgaaaagaaacaagaaactagttgactcgagacttaattaaaagcccgacaacaacaacaacaacaaacaaaaacaaaacaaaaagcagaacaaactattggagacttaaaaagtcacacaacgagagagatagactaatagtaacgagcccaatactgaggatggacttgtttaacctcctggttttggagttggtaactgttgtacccagctggtgtgcgattcataacattaaatccaaacggcagtgttggagcagaagtagagtttccgttttgatcaaagaaaccatggtttgtggagatattaccaccactaacagctgctggagcagcaacattgctagaacttccaacatagaagtttaggtttctatgatgaagttgagcgactttttcatcaacttccttcttcaaagcttcaagatcacatttcatggaagttgattgagctaagttgagttctgttggagagttcctccaccacttctcagcgtccttgttctctctttcattttggactattgactgcttggtctcttgttctttttctttttcagccatcacctaagataaaattgtattttaaacaattaatttcatgaataatgaatgtgtaaagaaaatccgtgaatccatgactatgacttaaacaaaaattgaacccaccaaaattttcattcttaatttactttgttgaggaaataaatatgcaaaggaggtttaccatttcttttacaaatcaaaaacaaattgtgaaacacttatataataattttttatctaaattgaaaaataaaagagagaagaaataaagattagataatgccaaaacttaaaacttacctcagttaaagactcattgagcatttgaatacggagctttgtgcggctttcagcaaagtttgtgttgttgtgtcttataacacgccctaaagagtggtcaagtaacttgttaacatttggatgaccaaaagagtatgcttttcccgagggtgaaaacacgattatcgcaatttccgcgtcacataaggtgcaaagttcactgccttttttgaaaagaccagatcttctttttgaaaacgtaacttgaaggtttgattcgttggtcatttttaccaactctatttttctacgaccaagattctttctcgccattttcgagatgttttgaacagaaaaagaaaagcgagttgattatattagagataataggtatttgtatttatagactaaattttacaaaatatgttttgagcattgaaagaaaatatttttttctatagtgatttataagaaacaaaattatgaattaccactctaggagtatatattggtttacaaatttcgtcaataaaaggtatacaatattctattttatctccaacattatcattttttaaagtttacagcctgtcaattttttaaaatatgggaaggatatccacaattttcttaaaaaatattttccatgtgtttattttccactatttttctataatcaatatcctttttgatcttttatatttattttaagtgttcaaattttttatataaaattcatatagtgtatatatgaaatattatgtccaacttacttttgtttttatagagcaaattgacaaaataatatgattgaaagttgataaatgacatgattgaaattttatgtccgactttccaagattttatttaagtaaatagttgttttgatattttaattgatcgctgacttttcaaaaaaaaagttgtgataattaaattagatttaatatgtgatacacaatttgttatatcatctctgaatatagtatacttttacacaatttgttttgggccgtgattaatatagcccatgatcgttacctaatgggctatgtttctctgcctctaattgcttgttatacatgatgatgatatattgataatctataacctatatacctctcctgaaaaacgaatttttaaaaatgtatacacttctcatgtttcttgttatatctttttccttcttgttacaatttatcggtgggaatcaaatctgattgggttcctttttttggtcggtaatggtattcaatagtcaagtatgtaaaagattctagcatatagattacaagtcttaagcccaacaaggaaccaaactaaaactgattagggaaaactaagtaagattctataagctagagtttgtacaaaaacaaattctagcccaggtaatgaaatatccaaatgcaaaagacaacatttattagctcagaatctacttttaaaaaagcccaaataccacatatcataagcttgcacttccaaacgactctaaagtctaaagtctaaaccaaccatcgccgctgatcattgacttattggcatactacaaaatttacttgtttggagcaataatgggttttctcttttagccccacctaaaccctttttaggaggaaacctagattatacgtggccacactaaatattattctctcattaattgctctacttttaagagccaaccaaactttttgaagacacaaatattatgaaatagtaatacatttgacctccgaagtttcaacgaatgatctacacaatccatcgtgtcaaagatacaatttttttatccaccattaaaactgtaacaatacaacattactcataacattgactttcaggataatcaggctcttcatcaccttgacttgcagtttcagtctttttatctacttactgcatatatgatatgagaaatccgatttgtgtgttaatgtgacataaacaaaaaaaaatgttcttcctatatatataacaaatattttttatgaacaaaccaataataatgtgtatcagaagcaaacaaatgattttttggtgcactcatgttcccataacaaaagtgattagtttctcataaagtaaactcaataattattccatgagtatgtttatatccatataaaatttgcaattaaataatcaaacgtcaaggttcaattatagtcaaaacaagaacgaaaaactaaccaatgtgtaatccacagattggttaattgcactgaaccgtaccttatcataccaccccaacggctatcgacatcgatttattaccaaaaaactcctcaaaactatataaaagactctactatcttccactttccataaaagggtaaaatagacatttcgggtaaccttctctcaccgtcaccacacatgcaattacactcagacaggaactcaaaaagacagctcattcaattacatcaacacagatcactccaaagcctttctctttaaattcgttatcgttttttttattttatcaatttaatctttttatttgttttgttcttcctcgattcaacactcgatgctgtgacaaagcccagattttggccggaaagttttgtgtgtttccggcgaagaatgcgaagaaaccggaagaatctgtaacggaatctaagctaaaagttaaagtacgatgtcggtgtacgacgctgctttccttaatacagagctttcgaaaccgacatcgatttttggtctccggctatgggtcgtgatcggaatcttacttggatctctaattgtcatcgcactctttcttctctccctctgcttaacttctcgccggaaaaatcgaaagccgagagccgatttcgcctccgccgccatcgctacaccgccgatttcaaaggagattaaagagatcgttccggcgcagaatcagtctgttccggcggagatccaggtcgatatcgggaagatcgagcatcgagtggtgttttcagatcgagtgtcgagtggtgagagtagaggaacagcgagtgcaagtgaaacggcgtcgtattccggtagcgggaattgtgggccggaggtgtcgcatcttggatggggccgatggtatactctgagagagcttgaagcggccacgaatgggctttgtgaagagaatgtaatcggagaaggtggttacgggattgtgtatcgtggcattttaactgatggaaccaaagtcgccgtcaagaacttgcttaacaataggtacttccaaatcttcaattttgattctaaagattggtccttttactctgtttctcaatttgagttttaggtattctttgattttgtattggtttcattctaaatattcatcctttactcaacttctagataagggatttaggtattctcaaatttccgatttgattcctttactcgtttctagattggggttttaggaattaccagttgggggttttgcaatttgcgtaatcaaagaattttatttgttgtattgcttggtattgaagtttgtctctgtttctctacctcgtcatgtaatgtgcttagatccattaagtaaatgcttgtggatatttatgtagatggttaagagtgatcgtgatcagagtccttctcttatttaactgcattgcctgtgagttgtggtcctgaaggttgttgttattattgaattctatgtatgtatagattatgtcattggtctcatgtggtttttatgggtaacgtctttactaataatagcactatgcttctggattttgatctatgtgatctgtaacatttctagttggtgtgtctttgattgccaggggtcaagcagagaaggaattcaaagtagaagtggaagtcattgggcgagtacgacacaagaatcttgttaggcttttagggtattgcgtggaaggtgcatacaggtatatataccgctgctcgtatctcttttccggtgttacaaaagcgatgtcgtgacctaatgctgggttcgttactataggatgctcgtgtatgactttgtcgacaatggtaatttggagcaatggattcacggtgatgttggcgatgtcagcccgctaacttgggatatacgtatgaatattatactggggatggccaaagggtaagtctggaatagcttttgagttgtcctctatgtttataagctattgttgtgtgtaaacctttgttatatctgtagattggcgtatctacacgagggtcttgagccaaaagttgttcatcgggatattaaatcaagcaatatcttacttgatcgccaatggaatgctaaggtttcggattttggacttgctaagctcttggggtctgagagcagttatgtgactactcgtgtgatgggaactttcgggtaaactattaaactcattaactctctcctgcaatctgcaaggcagtctttaggaatgtgaatattaggaaataacttttactttgtgggttgatttgtttagttatgtagcaccagaatacgcttgcaccggaatgttaaacgagaagagtgatatctatagcttcggaatactaatcatggagataatcactggaagaaacccggttgattatagtcggcctcaaggagaggtatttgataagcatattcaatcctctctatgtttttgtaaatggtcttactatgtgtcgtggctgtagacaaatctagtggattggcttaaatcaatggtgggaaaccgaagatcagaagaagttgttgatccgaaaatacccgaaccaccatcctcaaaggctcttaaacgagtgttgcttgtagctttgcgttgtgtggatcctgatgcgaacaagagacctaaaatgggtcatatcatacatatgcttgaagccgaagatctactctatcgcgatgtatacaaaacaatttgcctttacgtttttacatttctttaagagtttgaaacatgtctaaagctgggataatatttttgcaggaacgccgaacaacaagggaccatggaagccgcgagagacaagagacagctgtggttgctgccggtagtgaaagtggtgagagcggttcacggcatcatcagcaaaagcaaagatgaaaaaagagagtcacttgggttaagtgatttccacacgaccattatatttcatttttttttccggtatattattgtctcacttacataatattttcattctttggctcttcgagtcttggccttacgaaattaacattcttcttctttgtaaccttttgtcaacgatcacattcacatgtcacttattagatattgtaatatgtaatgtttggaccgacgtcgaagcataagcaggtgattggtcgatggatcaaacttatcgctttggacgaaatggaccacaatgattcttttttagctcacgtgatcgtgtttccaaacaattttttatcataaatcatctcgattatggatggacctagttgttggttatcatcttgaaaatttccaagttgcaagaatttaataaaccagtcgagtattaaaattataatcaaacatgggtaacttgcttgtctcgttaacacaagataagtgcacacttgtctcaaccgacgaccggaatctatattcacgtgtaggaggaaaacttagactcaaggacaacaattttgcctaaataaaaactgtagaaagtaagattatgaatacatatacacttgtacaagtcattccgttttatgatacattgctatatcttaaagaaaaattaaaccattttgtgtacgaggagaaagagtaaaatatgtgtgtttgtattgcgtacacaaacgtcaatatgtatacatacatgcatctttttgatgtagttaacaaaataaattataccaaggaaaatttctatcactaacaaaaacaaattgtttgtaaagcatataaattgttgcactaaataaaatcataaaacgctagttaatatgtcaacatgcggtttaatcgaccatcagagatattttcattcatttaagataatatcacatttttccaatggccacttagctaaattactctttgaaaagtcattatagaaaatcattaacaaatacgaaaaaaaaaaataccactaaaatggttaatcattaacaaatacgaaagatctgaaaattaggagccgtaggatccgctggctataattgactttttcatcagatgtacaagtaggcctgagttgaacaaacacatcgtaaccgtacacgcattgatctgtcatctaagttgttccgtcacagctccgtaactgaaacataatctccacctgtcactatcgtctaccaaatccacgacaaaacctaaataccacttattagttttctttagtggtttattaatctgcagaaatacggcaacttttgtggttagtcatataagaacaaccgcgttacaaacttctctcgtctttcctggaaatttctgtccacaaatattagtctttaattttcggtatgaacactgacccttccttgatctattgatctttgtcgcagtatttattaagattttatctctatcagacggctcttttgattaatatttttccgactcttatttcttatcttctttgctcagaaacttctctcaggcgaattcaagtttcatagttttggtctagtttttgtccaccgatctatctctttaggtgagttttgtttatttttttcggctttatagtttgtctacgcttcatgttgttgttgttattataatcttgtgtttgaattgaggtctttgatctcgtttctttctgaatttagatatgtgttattcggatttcagatcttttaagatctgggtttggctttttatacagaagaaaatggttttgacttaaaaaattagagatagctcttacctcttacgcttgagtcttggatctgttgattttaaagctttatagatcttaccacagttagagaattgttgttgacttttgtatgatgagttcaaatttgtgaattgaagaacagatctgatgttgtttgtgtttttctttatatgagaggtttcattacctttgtttttaagatctgttgagaaaagatccatactttagaaaaaaatccaaacatttgatcttttgtattggatatctaatatggatctagaatataatcaaagttataatgtttttgtattatggtttgtgacaattgatgtgttatctttcttcttctttcttgtttttttcagttgaaacttatcagaatggctcgtccacaagaccctccacgtggtttcttcccttttggaaaccccttcaaaaatctatcttcgaagaactcggtactctcctcaaagcttctcccactcctgaacaattttgagaccaacttagcatcttctattagtaagcttgtccctaaggaaaagagcgatatcctgactgtctcatggatgaaacaagctatggaatctctttgcgagacacataatggtatcaagacccttataaccgatcttgagcttcctgtatcagattgggaggataaatgggttgatgtctatcttgacattagtgtgaagcttcttgatctctgcaatgcctttagctctgagcttacccgtctcaaccaaggtcatctcttactccagtttgctctgcataacttggaggccaactctcctcagaatctgtcgaaagctcagtcatcactagacagttggaagcaacacattgtctccaagaacccgagaatagaaaattgccgtgcaatcttgagcagccttgttcagaccttgaatctccccaaggtgaaaaactcggccaaagggaaagtcttgatgagagctctatatggtgtaaaggttaagaccttatacatctctggtgtttttgctgcagcgttctcaggttcatcgcagaatctgatgtaccttacagtctcaaacgagcttccatgggcacaatcattcatggaagtgcagaacaccatgaacgcagaaatcaagaacatatttttgtcagacgggttaacggttctgaaagagctagaggcagttgcttcaggtgtcaagaaactctaccctgcgatccaacaaggatcaatagatcccatatcgctgcagccactgaaggactcggtcacagaattatcgaatgggatagatcttgtttcgaaagaagtggattgtttcttcaagattctgttatcggggagagacacattactagagaacctaaggtcgatgggtgcatcaaccctacaggcaacatcgccaaaaaaggctgccggaaaaaattacagaggattctgataaactataaatgtttgtacagatggttttacttcaagtgttccatcttcttggtattgaatgtattattaggtttttgtgcaatcgtagtcgtttgtatgagatgctttgaaagtagtagttgtataagtaaaggttttaccaacttatctatatatattatgaatatctttgaagctatcaagatcccaacatttatcaactgctgctagatccgtattatcgacagttagatcgaaaattcacagagaaaagagatcaaagacttcaaatcaaacagaagattatcaactgctgatatgattttcaatatacagttacattcgactaaaagattttaaaatatattaccggtttgattttcttgttagctagattattacatttcagttacggtttattctcggttgtgcaaaaatgaagttgaattagttcggttcggttcggttgatattgggattgagtttgttccggttacattgacttgtagaccaatatgaagtcgtcgtactcagagaaaagacgaagaaaaaagcaatgtcgtgtgttgattttcactcacgggtcgtccgagaagacgaagactcttcttcttctgatttgcccttcaaaagatccaaactttcacacgttattcttttccctctttttataaaccccaacaaccaaacaagtctccaacacgccaaaatctcctctgtttcatctcaagttagttcaattcagaatctttgagtttgaacttttttttgttgggagaaagagagaaatgtcaatagagaaaccattcttcggtgatgacagcaacagaggagtaagtatcaatggtggtcgttatgtgcagtataatgtctatggaaatctctttgaagtttctaaaaagtatgttcctcctcttcgtcctatcggcagaggcgcttctggcatcgtctggttagcatctaaaactgttgtcttttttttttgagtttttagctttagagatgagacattttgttaaaggctaagtttgtgctcaaaacttgtgatttctcattactagtgaaaattttaaatattttctatgtgataaatatgttttggttgaccaaaagaaagaattatttttcggtgggtttttgtaactttgctacttatctcatagttgattaagagatcattgtggtgaatagaagttttgaaggatcatttatttatctgatttagtgctgcatggaattcggagacgggtgaggaagtagcgatcaagaagattggtaatgcatttggcaacattatcgacgctaagagaactttgagagagattaagcttcttaagcatatggatcatgacaatgtaagcttttgtcttattttatttattattctccacatgttttctagtaattatcctgattctggagtttatctcacaggtcattgccattatagacataataagaccacctcagccagacaacttcaatgatgttcacattgtctatgagttaatggacactgatcttcaccacattatccgctctaaccaaccgttaactgatgatcattcacgggtacgcattaacctctcctgtgcttcttatagctcaagtatcttctgtttaggtcaaagtttataatcagaatctttttggttcgaaggctatgaagttggggtttgatgtataaccataaattttatgtttttgcagttcttcctgtatcagttgttgcgaggcctcaagtatgtgcattcagccaatgtactgcatcgtgatttaaaaccgagtaacttgctcctgaatgcaaactgtgacctcaagattggggattttgggcttgcgaggactaaatcagagacagacttcatgacagaatatgttgttacacgttggtaccgagctccagagttgctccttaattgctcagaatacactgcagctatcgacatttggtctgtcggttgtatactcggtgaaataatgacgcgggagccgttatttccgggcagagattatgttcagcagcttagactcatcactgaggtaaacttttcactttttcacttgactatattatttcgtttcaatttgaagaaagaacattgaactatcctgttgctacgtttgttctgttttggttctgtttttgttgtttgtagtttaatgaacaaactcatgtatggtttatctttttcatacacagcttataggctcaccagatgattcaagcctaggattcttaagaagcgacaacgctagaagatacgtaagacagcttccacagtatccaagacaaaactttgccgctagattcccaaacatgtcggtcaatgctgttgatttgctgcagaaaatgctcgtctttgacccaaacagacgcattacaggtaaagcagacgaaaacctatatatgttgcattctcttttgattttttctttttataatacttttgagcttgttttgagttgcagtcgatgaagccttgtgccacccttacttagcaccgctacacgaatataacgaggaacctgtgtgtgtgagaccgttccattttgatttcgagcaaccttcattgacggaagagaacatcaaggagcttatatatcgtgaatcagtcaagtttaacccttaagattcttagtgtgtgagattttaagagaatcttgaaaagaaactcgaaataagcttttttctttctctgtttgttcattgatttttttattttatttttgttgttgtgtgttcattgaatttctgatatagtaaagtttgtaatgtaaaaacaaaaaaaaaagtctataaatatgaaacaaatacaaattctgagtaaagaagtaacatgtcaaataaatttcggcccaacactagtcttatctgattggcccaacactagactgaactgaaaaaagtaatttaatgccttaaacctatttttgagatttaatttcagctcttattgacttctttttatcacgactgaaaaagaaaaaacatatcacgaatatgaagtaggttatggtatggctaaaaacaagagagtaggttatgggtatatcacctaaatatttctatcttttctttttaaaataaactcgtgaactttttacctaacttatcggtttattatgaaaagtgatattgatattcacacaaaatcaaataaattataatcaaacatactgaaattatattaccaaaaataagcattgatcattcgaaaatggtagatttgaccggtgctaatagatacagtcaaatattttcatgccgtttctttgtttgtaaataaataaataagtacatcctcttaattaaaaataaattaatagttgactaaaatattcctttttccataggataaatactaatataaaaatcttttcatctgctcctttgaagagcttttaatctcttctctgaaaccctcccccagtgactcaccaccacgacaaaaaaataaaaaaacggcgtagtttcggttacttcgtcgtcgtcttcctcatttcgccggaagaattatccgccatgggagacgataagaaagatcagaagcagctttcttcatacttgaaagctaaaaacttttcatgtgattcacatttttcattttattggctaatgtcgaggctaatcttcttaattctcgccattctcttctctcttcaattcgttttctaccctttaaatttcatctcctcttcttctcaacctctgatcaaattctctgtttcacccgtcgtatccggatccgggtcggttcatgaaccggaccaaaccgaactcaagcacgtcgttttcggaatcgccgcctctgcgaaattctggaaacaccgtaaagactacgtgaagctctggtggaaaccaaacggtgaaatgaacggcgtcgtttggttagaccaacacattaaccaaaacgacaacgtttcgaaaacattacctccgatcagaatctcctccgacacgtctaggtttcagtacagatacccaaagggtctccgatcggcgatcagaatcacgagaatcgtctcggagacggtgaggctgttgaacggaacagagttggagaaaaacgtgaggtggattgtgatgggagacgacgacactgtgtttttcccggagaatcttgtcaaggttttgagaaagtacgatcacaatcagttttattacatcggaagctcgtcggagagtcatatacagaatctcaagttctcttacgggatggcttatggaggaggagggttcgcgattagctatccgttggctaaagcattagagaaaatgcaagatcgttgtattcagagatattcggaattgtacggctccgatgatcggattcatgcttgtatgtcggaactcggtgttcctttgactaaggaagttggcttccatcaggttagtcctctgtttttattttattttccttcaattaaatttaatttccatttgaagatttttcctacattgtcctttttttgggtgaaaacttaagttttatttcagttttcatagagtgtttttattttaatgtttgaagggtcaagatcttagctaggttttgtttaggaaacagaataacttaaaaatgcatttattattattttaggcaaagtctttaatcaaacttccatatttttcattaactcactcatatcttctagtagataccaaatgcaaaagccattacaaatcatttattttattagtgcattctgattttttgtttttttttgttttattaagacttatgtatataacacatcataataaaactgaaaacatttatgtaattttagtaaaatgtatattttgtatggcgataatctcggcactcacatagatcttaggttcacataagtcattgggattgtacactcaagtcaaatatgtcgttagtagttttcgtacgtgttactcttacattcctccgtgcattcacattattcagtttgttattcctatgatagatctaggaacacatcctaaccgaaatctaaacataaatcaaactattaagtatccaatatacatcgatttttgaaatctgtgtcccccactattttctcgatctatacctatcgcttattagaaaatcatcctcgacaattattgttttgattttgtgttgttgtatcagattgatttatacgggaaacttctgggcctattatcggcccatccactggctcctctagtatcgatccaccatttagacttagtggatccagtattcccaaacatgggccgagtcaacgccatgagacgtttcatggtccccgcaaaactcgactcaccgagcctcgcgcagcaatcaatctgctacgacgcggaccaccgatggaccgtgtctgtctcgtggggatacacagtccagatcatacgtggcgtgttgtcagctagagagatggtgatccccacgcgcacgttcatcgattggtacaaacaggcagacgaaagaagctatgcttttaacacgcgtcctatcgccaaaagcgcgtgtcagcgtccgcgagtgtattacctgtccaacgcgcttcctgacttggctttgcgtagaactgctagtgaatacgtgagatggtacgacatgtgggagcctgaatgtgactgggatatgtcggatccttcggaatttgaacgggtcattgtttataagaaacccgacccggatagatggaataaacatagggtaagtaaacaatgttatcatttttaagttttgtttctctataagttttattgattcataattttgtggtgataatttcaggctccgagaagagattgttgtagagtattgcccacgacgaagaatgggactatggtaatcgatgtaggagcttgtaaagatgatgaatttgctgaattccttgtcaaatagaattatttatcttttatagcgttttcttgttaccaatcgtatttttgaaatttcgagcttatgttttaacagcaatttcgagcttgtaaattatttcttaaaactttttttaatctttattgacctctaggaggactattattaatgagtttattatagccgaaagatgttttggggtagtgggcttagcccattaatatattgacgatttaaaatgtaaatatattcgatgctaaaaggaccgaatgtacattatcgaataaaacaaaaaaaaaaatataaacatgtaaagtcaaaacttaagtgtgatgaatgtaatgatgatgaggaagaaagaagatgaatgggaatgggcctgattcatcttttcctcgttggctttaaaattgacatattttgttgacacgcgtgagatttcgtagacggaggcgacactgacacacataagccgacatctgacacgtgtattttacacacgtacgtaatacggtcacgaaccggcgaacctaccaaaaccgaacacgaaccagattccttacaaccatccaatttgggaggtctcatatcttcttcaacccgtacgtcgtcgctttttctttgtcttagagcaagcgttttaattattattgcgtcattaataggaatatattttgtatgactcttgttgctaatgttagggaattttattggcttgaatttgatattgaataatgattttattttatttatataaaacaatatgttgtttgtttaatgatatctaaatttaatatgttagcgttactcaatattttatttaattttatatggttttttacacggattttaattcatctttgattgaaattttaacaaatgtcaatcagttttcaaactaataatgcaaaagcttaaatgtgaaagtaattttttttttggacaaatgctttaaatattataggtaaattctatatgtttgattttaaagttaataaattctatattcaaaaaaaaaatccttataaattataaagtacaccaccaataacctctttaagttaactattatagtattatgtttagaatgtagttggacatgttttatccgattaataccaattagaatagttaattatcaagtacacgctatgagcctatgagcaagagaaggcagcatggtccttggcctctttctcaagtcaaaatgtattttaataatcatacatgctgtaaacttcaaattcctactttttcagagtaaacaaaaaaaaatcagaaatcgtaaacatatccccatccctgaatacttaaccgtttgacattgagagtacacgtacaggaatatctagattgattaggtatatataatattttgtattaataatttaaaaaaaaaagtaattatcattaccagaactagctagttgacatctcactacttatgagtattttctaaacgcaaaagattatgttaggtgagttacgtgagtagtgcgcagtaatgcaatttggttaacgctgttcaatacaaatttgaaactagttgaatccagcaaaaaaaaaaaaaaaattggcttccaaaatattgttaccataaattcataaactttcgttaaacttaaagtgatttatacacatagtatattcaaatatcgataaatgtattttgctaatcaaatcgtatattcttttataccagttttttaacgtcatctcgccaaaacaacaacaaatagatgtaaaataatgaaagaaaacaaaaaacaagatccatggggaagagtcacatgcatggagcatgcaactagcttacttcatccaattcccactcaaaattctctctttatatatacactttctctaccactacttccctcaaaacaagctaactcgatccttctcactaaagcgatcgtaccgatcttaatatctttagcgagcgagagagagagagatagaaatcctgagaggaaagagaggatggagatcgaaaaaagcaataacggtggttcgaacccatctgcaggagaagaatttaaggatatgattaagggagtgactaagttcttgatgatggtgattttccttggaaccatcatgctttggatcatgatgccaacactaacctatcgaaccaagtggttgccacatctgcgtatcaagtttggaacatccacttattttggtgccacaggtaactgaatgatcaataattcccattttttaactgaatcataaatcatgttgacgcaatagtttccaaattttaacgcatctttttttcatcagcccacgcaatttgatttaaaataaaatactaaaattcatttttcttggtttgcacggcagggacgacgcttttcatgtatatgttcccaatgatggtcgtagcttgtttgggatgtgtctatcttcacttcaagaatcgaaagtcgccacaccatatcgataggtacaaattaatcagtcaacttttaggtatataaactgcatcactttctttgattacaacttgttgctcttaatcggaaaaagggagacgaagggaggagtgtggagtaaactaagaaagccaatgttagtgaaggggccattaggaatagtctcagtgactgagatcaccttcttggcgatgtttgtggctcttcttctctggtgctttatcacttatttgcgcaatagcttcgccactatcactcctaaatcagctgccgcacatgacgaatctttgtaagcttttctttttcttctttcgccgtctaaaatatataattagtccactaatttcgctttgttagtcgaaattatggatcaggttcatatacttcaagattaattaatcagtccatcaacagtagattctgtgcttgatttctttttaaaatctcctgacaaattattaataaaaaggaacaattttctttgtaaaatacttaacatagttaatcggttgatcacatatgaattaaggtggcaagcgaagctggaatcagcggcgctaaggttaggactgatcggaaacatatgtttggcgttcttgttcttaccggtggctcgtgggtcatcgttgctaccggcaatgggattaacctcggagtcaagcatcaaataccatatatggctcggccacatggtcatggcccttttcaccgttcatggtctttgttacataatttactgggcctcaatgcatgaaatctcccaggtattatttttgttttttgttttatcgaagattttaaagcggtacgtatattatatgtggcctaaaatagtccactagtgggccctatgaaaaagtcaacgactttaaagtagtcactctgaatggagcagcttccataccaaggaatgcggtcaaatttatcattttgggtcttcgtatggcatacaagtgtagtgtagatatcgctattaattttgttgcaccgaaaagaaaattatcgaatcacgcattttaaggtggtaattatttggataaatgttccttttctcttttaaaaaatcgtgtactccaaaattgacgactcgtactccaataaattatttaatgtgatagcttcatactaggggtacaagaatcgtaatttaaacggtatagtatattataatctgacgtggaataaattaatggcagatgatcatgtgggatacgaaaggtgtctcaaatttggccggagagatagctctggcggccggacttgtgatgtgggccaccacatatccgaagataaggagaagattcttcgaagtcttcttctacactcactatctctacatcgtcttcatgctcttctttgtcctccacgtcggcataagtttctccttcatcgctctccctggtttctacatcttcttagtcgatcgtttccttcggtttcttcagtcacgtgaaaatgttcgcttgctcgctgctcggattcttccttccgacactatggagctcactttctccaaaaactctagtgagtaccttttgtccaattggctaattgtatatgaaaagttcacccttactggatattgatctaattctaaactattctttttgttttatagagttggtttatagcccgacgagcataatgtttgtgaacataccgagcatttcaaagctgcaatggcatccgtttacgataacttccagtagcaaactcgaaccagagaagctaagtattgttatcaagaaagaaggcaaatggtcaactaagcttcaccagaggctttcttcttctgatcagatcgaccgacttgctgtttctgtagaaggtccttacggccctgcttccgccgatttcttaaggtgatttgtttatatacactttctcaatcacctatctaataactttatattcagatttgttaagagtcctggaaacttgattgacttgcatttcaagaaacattgatttcatacttttttttttttttgctttctaggcatgaagctttggttatggtgtgcggaggaagcgggataactccgtttatctctgttattcgtgatttgatcgccacaagccaaaaggaaacatgcaaaatcccaaaaataactctcatttgtgcgtttaagaagtcttcagagatctccatgctcgatcttgtcttgccattatccggtcttgagactgaactatcctccgacattaacatcaaaatcgaagccttcataacccgagataatgatgcaggagatgaagcaaaagctgggaaaatcaaaactctctggttcaaaccaagtctttcagaccaatccatctcatcaatcctcggaccaaactcatggctttggctcggtgcaattctcgcatcttcgttcttgatcttcatgataattattggtatcatcactaggtattacatttacccgatcgaccacaacaccaacaagatctattctttgacttcaaaaaccatcatatatatcttggtcatctccgtgagcataatggcgacttgtagtgcggctatgttgtggaacaagaagaagtatggtaaagttgaaagtaaacaggtccaaaacgtcgaccgtccatctccaacatcttctcctacctcatcatggggttacaattccttgagagaaatcgaaagtacgccacaagaatcgctcgtgcaacgcaccaatctgcattttggagaaagacctaatctcaagagtaatatatacatgaccttcttttaatttctctatctctatcttatatataaggaattgttattctaattatgttttttgttggtttatatgagcagaacttctacttgatgtggaaggttcgagtgtgggagttcttgtttgtggtcctaagaagatgagacaaaaggttgcggaaatatgttcctctggtttggctgagaatcttcattttgaatctatcagtttcagctggtgattgcgtatataactctgttttcactatgtgttgtgcaatttgcttgagttgcaagttaataaggtggccctgtgatttgacctatctttgtgtgctttacattgacttttcctgttttttgtttttctttatcctcttctaggaatattcagtgttaaaaaaaaaacttcctttcaaaagttccggaatatcctttttttgtttgtaacacaaggcatacagcttttgtaaattgtaaatgttgaaatataatactcatgttgggtcatatatatgattttatctctatttttcagttaaacatacttacgaaaaagtcaatttgctcgaaacgagttgggttatacacagatgtgagctacatgtaaattaatatttggatctatcagaatttatctgtcaaatacagaaatactatcttgcagatagcacaaattacctaattgttggttaaaaagacaagaagaagttacgtgaacataaaaaaaaaaaaccgtttcaattgacatgtcactaattattcgatttaagtaagaggaagtacaagaacaaattaaagaactcacctatatatacatccgtttatttaaaatctgtgttattgtgtaactctgctacaatttagtgggtaactaacaaaaaatatcatggttaaatttggtgttctgaggaaatttaatgtaaaattcataaatttacgtgtgattttttgataattgattattcaaaactcagtacaaggaataaaatcgaaaaagaaaaaaaaacgaaaagataatagaaatatacgtctacacgcatcggcgtacaaactcaatgattctgctttccgttgaatttgctaattttaagcccaaaactatagaattgcgttttcaatgtgaaatgaggaaattacacactttacctagactcttccacgagtcaagcctgttttgtaagtcagcagtaaaatgaagctgtaaatcacaaattaattataaaaagattcaattataatttctctggataatattattattttaaaataataataaaataatttcttattggtttattcaccagaccatattttcatataaatttaattattattttaagaaaataatattatgcatagaaaaatgacttaaatatcatttcttttatataagagtatattattttatatatatactctatatctttaaacatctcaagttctcaacatatttaattattggatcttttctgcatttagcataaaactactaattacattggtgtaattagcatatatatatgctggaaaaaaatatctttctatatatatgctggaaacaaatatagcacatatatatgggttttgtaaaattcattgcaaactccatttcgctttgttttttcttctcatttcttggaagttcatctctggtgccatgggagtaggagaaatgaataaggaagtgattgataaggtgattaagttcttgatgatggtgattttgatggggactatagtgatctggattatgatgccaacttctacctacaaggaaatctggttaacctctatgcgtgccaagctcggcaaatcgatatactatgggagaccaggtaatttcactcgatacagatctaaaattatttatacgaatccgttacatataatggttttcttatattataggagtgaatcttttggtttacatgttcccgatgattctactggcttttctgggatgtatctaccttcacttgaagaaatcaacaactgttaatcaatttaacaggtaattaaaagctaacgactgctcactctttagttaacagcttttagttttttttgttaatatagattctttttattagtttattttattttcatttttttgtaaaatttaaagcggagtggagaagaagagagccaagtttggtgcattgagaagaccaatgttagtgaacggaccgttaggaatagtgacagtaactgaggttatgttcttgacgatgttcatggctcttcttctttggagcttagctaattacatgtacaggacgtttgtcaacgtcacttctgaatcagcagcaactgacggaaataacctgtaagttttaatttatataatgagttttgtgcatgaacataattattttgtacgtatatgtaaattcttcatatttagtgatcaatctagattcaatcctatttgcagggaatattttctttcctgataatattgtgagatatatgatgaaaataagagtataaatgaacttttctatttttcactgatataatgatgcatcttaaatttattgggaaattctcataaattaattttttcttataagtttttttaattgattgacccataattttcataatcactcatatcatatctttaacaatatgtcctttttataaacaacttttgcaaaatgacattgacatgtaccattagttaagctatgtgacaaaacaagtttggctttttgtgtttgttttatggcaaaactaaaaaagatggcaagcgaggctggatttaatagcagtacggataggtatagtagggaacatatgcttggcgttcttgttctatccagtggctcgtggctcgtcgttgctggctgcagtggggcttacgtctgagtcaagcatcaagtaccatatatggttggggcacttggtcatgatcatattcaccagccatggtctttgttactttatctattggatatccaagaatcaattagtctcaaaggtcactctttttcttttttacattattcgtcgatattgctctataattaatgccctaattaatcgttcgtgtaaatagatgttggagtgggataggaccgctgtctcgaatttagccggagagatagctctggtggctggacttatgatgtgggtcaccacatatcctaagataaggaggagattgttcgaagtcttcttctatagtcattatctctatatcgtcttcatgctcttcttcgtcttccacgtcggcatctctcatgcgttgatccctttacccggtttctacatcttcctcgtcgatcgtttcttgagatttctccagtcacgcaacaatgtcaagctagtctctgctcgtgttcttccttgtgacaccgttgagctcaatttctccaaaaaccctagtaagtttaactatgtcccctctgtttttttcttcttcacttgatcgatgattttataatcatatgctaaaatgatattgcagtgttgatgtatagcccgacaagcactatgttcgtgaacataccgagtatttcgaagcttcagtggcatccatttacaataatttctagtagcaaactcgaaccagagacgttaagtgttatgatcaagagccaaggaaaatggtcgactaagctttacgatatgctttcttcatcttcttctgatcaaatcaatcgcctcgctgtttccgtcgagggaccctacggccctagttccactgatttcctacggtaattcacttaaatcacaaacagagaagttcaacattctgtttcttccgacacaagtaacattgatgctctgtttttcttccaacacaagtaaaatgctctgtttttctttaagtgcagacatgaatctctggtgatggtgagtggaggcagtggaattacaccgtttatctccatagtccgcgacctattctacatgagttcaacgcacaaatgtaaaatccccaagatgaccctgatctgcgcgttcaaaaactcttccgacctatccatgctcgacctaattctacccacctctggtctcaccaccgacatggcctcgtttgtagatatccagatcaaagccttcgtcacccgagaagagaaaacatcagtaaaagaatcaactcacaataggaatatcatcaaaacccgacatttcaaaccaaacgtctcagaccagcccatctcaccaatcctcgggcccaactcttggctctgtcttgcagccatcctctcttcttccttcatgatctttattgtcatcatcgcaatcatcacgagatatcacattcacccaatcgatcaaaactcggaaaagtacacttgggcttataaatcgctcatttaccttgtatcaatctccattaccgtggtgactacttctacggctgctatgttgtggaacaaaaaaaagtactatgcgaaaaatgaccaatatgtcgacaacttatctccggtgattatcgagagctcgccgcagcaattgatatcgcaatctaccgacattcattacggagagaggcctaaccttaacagtaagtctatttataacattttcatagagtaaaatgctgagttctaactctgtttattctattgtgtgaaacagagcttctagttggtttaaagggttcgagcgtgggaattcttgtgtgtggtccgaagaagatgagacaaaaggtagcgaagatctgttcttttggttctgctgagaatcttcactttgaatctattagttttagctggtgaattttaaattcagactgatgttttatcatagatgtttgggttacaaaagaactaggtggcttcgagagttcataactctaaacatgtcctagtactaatttatccgtctccggtctcctagtagactagtactaatattaaaatgtgaagcgatatatgagtcacatgttggcaggatttaaagtttgacagatctatatgcggtggatacgagttcggttagctgaaatttgtagaacaagcatttatgtcatgaacgtttctgaatggttttataatggtaattagtgaatggtttaagacattctttaggcagtcatgtagttttgtaatatcaaggaaaattggcttggctctgaatatgatttttttttctgaattggcttgttcgaatcctcaagatgattttttgaaatgtaaagttgcattttctgatataatttttttttgttgccttttataaataatcatcttttctttaacatttggttgccttttattaaaaatcatcttttctgattttttttggtcaactaatgtaacaccttttctttaacattttttttaaaaaaataaaacgcaaatgaagtcatggtaacccttttgactttcacaataccattcagtgacatctttcttacttaatattccgctgtcatgtcccactttggttaacatttgaggaatttcatcagtaaaaatcgaaaagatataaaggcatcaaaggagaaaccttaaaaagtcaaaatagagacacaagaagtgtttctttgtaggcttagatgagaagaagaaactaaggaaactgtattcctaaagtaaatactacttccttcattcctatgataatcaattattaaaagatatggagtcgcttaccaaatcataaaaccggtaacccaaatctaggaaattttattgtggaataaataacaaagcctttattttatttaaatagaacaagataaaacaccaaaaataatagctatgttctgaagtcttgaccaaactactgatacgggatctcacctagattacttacaatgtaggtgtaaaccgagtttttaaccaaactaaaacgaattaagcgacaattagttacggaagcttaaactctacatagattgatagattaaaaaacccttgaacaaaaaaagaatccaaattcagcttgaagtagattcaaccaaaccgaaataattttttaaaaatatgaattttgtttcagtttgaatttcatttgattttccaaaaattcacaaaccaaaccaaaaactgaatatcacttgtagctgtacctataaattattagagcattaaatctatctcaccaccgccaaactcaacgtgtgttaatcttttaaccctaaacttctaaattaaaaaatagacgacttttttacttatttcttcttcttccccaccatctttttttgtgctctatgttctcaactaatctcatttaattcaccacatacagctgcatcaaacatatatatatatgcatgtatttatgtacttatacacatacatacatatgatcatttaatgaaattcattaaatgaaactattcctttcgctgcaaaattaggtaccagtaaagcataaacaccactttaccacttcttgaattccaaatctgaaagctctgtcattatatatgtataaaccaatttaaacatatacatgtctcaccgataacaacggaggttcattaatgagggtttgattatgatacttacgagtgacagattgtgaatatcaaagagaagcttcttcctcccttttttctccctataaatttccgtagaaaaatcattcattcgcatctcttctcttctcaaaaatcaccacatttctttacttctctgggaaacaataataaaagagctacatggaaatatccaatgccatgcttcttgtagcgatcgtaacagggtattggctatggttcaagaggatctcacggtggctaaagggtccacgtgtctggcctctgttgggtagtcttcctggtctgatagagcaacgtgacaggatgcatgaatggatcaccgagaaccttcgtgcgtgcggcggcacttaccagacttgtatctttgccgtgcctttcttggctaagaagcaaggtctcgtgactgtcacgtgtgaccctaagaatctcgaacacatgctcaagacccggttcgataactaccctaaaggtcctacatggcaatccgtcttccacgatctcctgggtcaaggtattttcaactccgacggtgacacctggctcttccaacgcaaaaccgccgctcttgaattcacaacaaggtacctaaccgctcggtttaatcccttgagtgaatttcacggttttaattattacatttgacccaatcgaattggtaaattgctccggtttattaatacttatagtcggttcggtattgttatgatgcaggacgttgcggcaagccatgggtaggtgggtaaaccgaggaattaagctccggttctgtccgattcttgcaacggctcaagacaatgcagaaccagttgatctccaagacttaatactacggctcacattcgacaacatttgcggattggcgttcggtaaggacacacgaacctgcgcaccggggcttcccgagaatggctttgcctcggcattcgatcgagccaccgaagcctcgcttcaacggtttatcataccgaagtttatgtggaagctgaagaaatggcttgggctcggtttagaagtaagcttgagccgaagcttaggagaaatcgatgaatatcttgctgctgttataaatacacgtaagcaagaactgatgagtcagcaagaaagtggaacccaccagagacacgacgatctcctctcgcgtttcatgatgaagaaaacagaatcttacagtgacacgtttctccaacacgtggcgcttaactttatcctagctggacgtgacacgtcatcagttgcgctgagctggttcttctggcttatcacgatgcatccaaccgtcgaggataaaatcgtccgcgagatctgctccgtcctgatcgagacacgtggcactgatgacgtcgcgtcgtggactgaggagcctctagggttcgacgaaatcgaccgtttggtttacctgaaggcggcgatctcggagacgctcaggctttacccatcggtgccggaagattcaaaacacgtcgagaacgacgacgttttaccagatgggaccttcgttccggcgggatcatcggtgacgtactcgatttacgcggcggggaggatgaagtcgacttggggagaagattgtctggaattcaatccggagagatggatttctccgatcgacggaaaatttatcaatcacgatcaatatcggttcgtggcgttcaatgctggaccaaggatctgcttggggaaagatctggcgtatcttcagatgaaaacaatagcggcagcggtgcttctccgtcaccggcttacggtggttccgggacataaagtggagcagaagatgtcgttgacgctatttatgaagaacggacttctggtgaatctgtataagagagatctccaaggaatcataaagagtctagtggtgaagaagagcgacggtgtctctaacggtcaatgtaacggcgttattggtgaaggcgtcgccgtttacttaaatacgggagttgcagtggtttaacaaggccaatcacgtccctgatttattcatatacactttttttctttaattccaaaagaaaacacttgaacaaaaatacagcttgtaatttttgttcaatatgaaattgtaagcaatatactccagccgacaaaaaaaagaaagaaaaagcaatatactccaattagtaattttaccgggttcttttctttttctatttttttgcaaacctttttattttctttatgggaaattattgtaagcaaatcatatacgtttatatagtctaaaataaatacattttacttcgtactagctacataactaagtcctattatacttgaatgtatctatcaacaagtgtgttaagttgcctaccaaaaaaaaaaaaaacaagtgtgttaagtttcacgtgaaaacaaaaggaaactagaaaaattgatccagagccatgatcaaggtggaaattgatcgtaagcaggtacattggataaaagattaagcacaaactctctaaatatctatgcagttctaatgcaatttcactttgtatttcaagtgtgaaccctaaatcattatgtttccaaaatcaaaatttcactcctctagcagaagaaagaagaagaagttgttgaatccgtccccatcgccaatggtaggatcgagtccgccactgcggttcttccacgagcaactcaacgcccttctaatgaaaagagtcgagaatgtgtttttctctatgatatcttataatacaaggtgagtttacaaatcattcatagttaaggcaaggggaaatggtacactacatgtacgtactttgattcaaatgtagtttcattatccagtgcatattcaacaaaacattttcctcgaacaatacatgaaaaaaaacaaaaaaaaaagtaattgggaaaacccgaaagacctaacttcactcccaagcaaaatagcagcaaccagactagctggattattactccatggacttggtcttattgatagactcaacctttccgtcgttgcctccaagcaacagatacttatccttccttgtaagttcagtacattcgaaccccaaaactccaccgatcaccttctgaacgtaattagccacctcaaaaggagtcttgccaccaccgtttaccgtcatttcttcgggcaaacggtccaagaaagtggcctcgtagctaggtcgggggttcatgaagaagaagtacggatcccagaatttcacacctctaactgtcgtcccgttgaacatcccttgcttgcagttcatggccacaggcacgatccggtcgctcagctctgcaaatagagcactgaaccttagtagatatggttctctacacgttgtgccttcaggacagatcaccaaatcacctgttgcaaaataaataaaaaagagttacaaagataggaattatgtgtgtataaagatcagaaaaatttgtgttttctgtagatggaatgtgtatgattctataatattaatgttacataaaaaatcaaaactcaggtgatagcttttattttcagaacagagataatgtgataataatgaaaccaaataaatgtgtagaaaaccagagtaaaaacagagatactctgcttttctataacgataattgagcatggaaaatacctttctcgaggagttgcctcatgcgggctgcgtcagcgacacggtctcgggtcagagcaacagcaggaatgggtgagagcatcagggagaggcgagagacactataagtgacacatgtgatcttacggccgagagcaatggcgatgataatggggtcaagggcggtgcggtggttgagaacgtagaggtttccaggttttccgggggaaggaggtggaggacggtggccacggattgtgaggtgaatgccgaggatctcgtaagtgtagcggacgaagcgttcgggtaaagggaggttgaagtagacgcggaagacagagagcatgaagccgaaaggaagccaaaggtaaatgattaaggcgtttaatggggtcggacgttggacaagacggccatcatggaagattatgcggttcttgagactctctatagggactgttgtggctgatttggtctcatgcaccatgtaaccttcctgttaacatatcatataataagaatcattctgaaattcacgattattatggtaagaaatgttgtaaaatactattgaactttcaaacattgacatatcggatcattcattaaatggaccgtccaacttatgtggtgatggtagttggtgataggttggaagcatttatgaaaactattattctattctgttatctactttttgtcactctcagtgattactttcctctacttaaattcacttatacgtgtatgtgttttgaaactatggattttatcatcctaaaacattattctagatttttatgaaatcatgtgtatcccatagatcatgtgaatcctctccacaccgcatttaagtagttagttctttaattaattaccacctaaatcaggtttaagcaacgtaaactggatatgcaaaatgaaacgagagaggagagagatagagaaaccttgcaaatggacatgaaatcgtgatcggaggtgcggtcaccgaggccaagatccggtgagtcatcgccgaactctttcaagatggctaatctcttgagatcaccaacaagaacaccaggctttttcacaaaaccagtagctttcatcgttttggggttaacttcaatctctgttcccaaaactttatctcctcccaaatagtctttgacgaatggctcaaccatcactatcggattcgcagtcaccactactttcctcttcttacatttatcaaacacctcaaaactatctttcctcacatccgccgcgtaaaacctaacatttgaaaacgaagattaaaaatcgaaagggttccaaaatcgaaaagaataaagatccggtgattgtggttaccgtgtaagaacggcgcgagagacgagttcgatgttcttgatcttgataccggcgaaggagatgaagataaggatttggattccgagagattcggagacgaagagataagcgatgatgacgatgggaagagaaagaagaaggatcaatccacggaagagactacctgcttcaatggccaccagcatgaagtaagggaaagagcttcttgacagaagcagagtcccgtcgagatccgcagcgatcgaatcatactctctgcttttacactcgcttatcggaggaaaacttcggctcttcttcgccggagacatctttcttgcggcgaatactggcgatttagtaaacagagaaagagagataaagagagatttggaaagaaagagagggaaggtccttggggttttaaatgcgccttccagtggttgtttatcgctcaactgactaaataacttttcagtccaattaatattaactatttacgaaattatccttaaactttcaatctttacaaaattaacccttcttatttctttatctccatgagaaattaaatgttcacatcacatgattcgtaacaaaggtttcaattgacacttatttttttctaatatatttaagttaatatgagtgattatttgattagggtatttattagatgatggaatttggtgtatacataaatataattttggtcacacgcggttcagttactttctttttgttgattgacatgaaagaaagtagtttagtagttcacctaaatggaaggctgtataattaattgggtgagttattataaatttataatatgtgggttggcattgtgtgtatatactatatagtatccaactatacgtgaaacattaaagtcgacggccgcctgaccaagttaattatatgaaaatgacttttatatattggtagcatttaattttgattgcaatatttacgtatcaaggagccgtcgacagagttataatgctaattgagttaattgactttatactaggtttaaataattaactccttaatttataataattaagggattaagacggttttctttttctttgtccgcgtatcatggatggtcactcaaatgtcaatggtatattaataaaacggtaaaatagttgggagttggagagccattgagccatatgcattcatacttacggatatgagtgtaacagtattcccctagtatgagtataataactacttacacgctatggaaattgaaactgcatcacgtgaaccttagcttacaaagaaaagtgacttatgcgtgtatacatatatgtgtgtttgagataaattaccaaaatatgcatgcaattatgtacaatgaaaattatgaaatagaatttatttccaagaagataacaaacttatcataaacattcactttgaagatatgaaactgaaaagtaaaaactaaaaaaaaaaaaaggtgtgaagcagtgggtaggtaatccactttgacgaggttattgtagaataagtaagaatgttttatctcaacttggttggctatctatcgcaacaaattaaggtggagtgatgccgttgatggacatattatgggatactagttgtatccataaagagtgcgaaaaaggcccaatgtaaatgggcttaatacccacttggttaacgtggcccataaagagtgcgcaagaggcccaatgtaaatatgggctaaataccacgtaaactagttgagtcgatgacccgagaaaccaagccgaaacaatatggatcttactcaatttgtaccgaaccaaaccagaagaaaatcaaattaacaaattcctcttgaaaatttctcgagtctaacgacaaaagcaaaattaaaatcgtaccaaatcaatcataatatcaaactccatttaacgataaaaccagatcatccacagcaaataagaaaaagacaagtccattaattaaaataaacacatgatccagatctctcaaatattttcaagctcaattacaaaccaagatgcaacaatgaagttttataaagaaagaaatcaaatcaggatctggacttgaatggaatggctctgatgacaagttggtggtaaagagccgcaagagctgctccaatgaatggtccgacccagaatatccactgcaaaccacaatcaaaccacaatcaaaccaaagtgacaaagacatatagaaagacaaatcaaccaaatgatgtaatggggtactcacgtggtcgtcccaagcgtggtccttgttgtagatgattgcagctccaagactcctagctgggttaattcctgttccggtgattggaatcgtcgccaagtgaaccaagaacacagcgaatccgattgggagtggtgccaaaatctgcaaaaaaaataaccctaaattatgaatctttttctaaacacccaaaacaataaattaagaggaatcaaaacaaaattataccggaacgtgggagtcacgagcgcttctcttggcgtcagtggcggagaagaccgtgtagacaaggacgaaggttccgattatctcagcacccaaaccagagcccttagtgtagccgtgagcgactgtgttggctcctccgccgagagtttggtaaggatttggctggaagcctttgacaactccggcgccgcagatggctccgagacattgcatcacgatgtaaaagacagctctcgtcaatgacagcttacgagccaagaacagaccaaatgtcaccgctgggtttatgtgcccacctgtgaaacacacacacacacacactcatcagaatcaactctaaattaagatctctttgagaaaaatcgaaaactaaaagcagagctacaagggtttgaagcatgcaacaaaagaccaattctacttgtattaagaagataaaaaaaatggggttaccagagattccagcagtacagtagacaagggcaaagatcatgccaccgaaagcccaagcaatgccttggattccaacagaggcacacatgtttggtgctctcttcactcccatcactgtcaatactgttatgtatagaaacaggaaggtggctatgaactcggcgattccggctctgtagaaggaccacgaactcagctcgcctggctcgaaaaatggagctggtggtggctccttgtagtctttgtccgtctgagccgatgtacctatcggttgcctctccgggaacttgttagctcccactcgaacatcctcttctttcccttccatctctatctagaaaacgttcaagtgttctttgctttttttcttcttttctacaatgggtaatgagagtggctgagatagagaaagaatggttttatagaggcgagagagagagagaatagaaaaagcaaaaaaaactaacgtctcgaaactattatgatatatttaaataatgagaaatacagggaatcatggataacgatgatcttcgtaaaagcatatttatttacgttaataattgtaatagcctactacttgatgatgtttaatcatgtaacacaacccacgcttatactaattctgttgcgttggctaactattagtattatattctgaaactccttataaagatagcatgtttgacctaatttattctcaaatgccttgctacaggagtactactcagtcagcagttagaaatgtaaaaaaaaatattacagtgccagaaaactcacaaaggactaactttttgactagtcgacgaattaataatttacttccgaccgttggagaagaaaaggaaaagaagtgtgtggaaagcgattgctttatgtaaagtaacatagtctcgaacattgtgccgggcctagagtatttttaaaatgtttaattaaattactatgtgtactactagtgacaaaataatcacaatgattgtgaatttgaggtttttcaattaaacgatatatattttagaaaaaaagaaaatgaaaattggagataaggttcaattttgcgggggtttccagctcagaaatggattttgcttttctgtgatcacatgttcgtttccctattcccactttcctttttctatcaatctattcaaacctaacaaaaataaaattcaaaactctgttgttgttatcaattcacatatttttaacgctatatgagccatactttactagttaaatggagtttagtgtttaggattcaaaccctattagttttgttgatgttgtcttacccgaacaataattgaatttataaacagattaactctattgtagatatcgatttttaaaaaactgaaaagggaaacaaataatccgaagctaaactatatgattaagaaacaccttttattgaactagtggtggggtttgccatttttcgaaacgcaacccacacacacacatcacagtcgtctagctgcccaaccaacagaatcacgacacgtggttgaagaggcaaatatgtgttggtggtgtttactggggcggtcccgaccaaagtccgtatatgacatcctttctcagttgtacaaatcacatttcattataattcatttcatcgaattatctatcttttaaattttatcaatatctttttttgttagaggcgtggaccgtatgaatgtatgatagtatagaaatagaaataataacgttggcattgttatttaacaagcaaacaaatgattaggttgattgatgaacaagcaatgactaggttgatgaattttaattgttactgactttgtctgtgtacgtagctggtacttagttggtacatgcctatcaaaagaaaaactaatattttgcaacgaagcagatccttcattgcttacatacatgtggaaaaagatacgatcaatattttaaaaaatcgtgaattgaattttgttttatacacacagacgacagacaagcttctgacgtgggctcaaaacactaaaacggcctctgaatcagtcaacactttgaggcatgagagattgattaaaccacagaccaagtctttacgacaaatcaactcgagcccaataggctctaataaggcccaatacgatataatcgtcttcttcctgtagagtcggggacctgggattagtcaataaatgagtag

SEQ ID NO: 1107 - DNA, 109180 bp, Arabidopsis thaliana
aagctttactctttttttttttatctctagagtgatgtcaatttttaccgacttctgtctttttatttttttcctatcagtatgatcatttggagttccccggtgttgtccctcgaacttttattggtaaggagggctgttgaatttcgctctctgtttttgcatcacctgttgatggttttttttttatcattatacattagtggatggttttttttttattccactctgatttgttcttgcaggagccttcatagtctctgtttttgcatcacctgttgtatcaattatcagctgccttggcttccccaaggtttatagccttgttgcaggtttctcttctgtttctccctccctatataattccttaatgaatcgctaactattttcccctaaacacagacaaaaccaattcacatcatagttttatcattttgtcttgcagctcgtttggtgttgggctgcatcatattgtccacactaagatttttccggattcaggtatgaagttcctttagtgcttctttccataccacacttctgactcccctatctgattctttgtcccttcccatgtccttggaattgggatctcttacatgcatcttgttggctgtttttctcctatatactgccactgaccaaaatctactggtttgtcagataaaaaaaaagtttggaaatcaagtggaaactttctttgtacttttcaccagtcttcagtttcattttcttttctactgcactcgtcctcttcctaatattctagctttgggattaggtaattacttctattcatcttactctactagtagtggtccttcagatgtcctagcaatctttcccatgacccatctagcgtaggccttactaggttctgcttatgtttttaaattttgattttgcagtcaatctggcatatggtaattggttaaagggaaatttttatccagctttgagtttcctggtatgtattatctttgtggtgacatattttctcgattatagatttagaaaatcggtcatgctatccagaactatggggtttgctgacatctctgttatccgataatcagatttttgccactgtaatcttcagatgcgatacgatgttactgcttgggcctattggtcttgaacttttattggtgagctggtgacgaatattaaatagtttgggttctcaacttctgtatatgtataattggccgtatactttaccgttccatctgatgcgggtgctttatgtttgtcaatgacagaccaaatcgatctccttctggaaagcacttaagtattgtgttggaaccgctctgttggccgtaggttggttaaaattcctcttctttctgtgatctattttgctttttcccttcagacactaattcccgagtctattttctgtggtcatggaataatccttagcacaggtcttaccattttcgttgactctatcatgtggaagaagtttgtctggccagaatttgaagttttctggtttaactccattctaaaccggagttctgattggggtgtatccttcaaaaaaattgtttcctcaattgatttatttttcatatgatgcataatgttctagcatttttctactgcctgattaaaggattgcgttctgtacaatgataaccgtttggaatttccaattcaaagtttaatattgtggcacttgcatttgtatgaaatgatgtgttgtccttgaaaattagttgctaaactagacacattccatacattggtacttcacctcagcactcccacggtctttacttgtagcttatccactttcattggtaaataccagacttcctaacatctgtgatagtgtttgtcttgttcctttctagttaggatcgctaattgtatctctacaaattttcttatttggtttctttttatgcagcttggtactttagttgacagaagggttccattctttatagttccagttttatcgttcgttatactatactctaaacttccacacaaggtattcagatggattacttatctcagtagccatcaacgtttcttaaccattttctgacatcggcttacctatctttcttgatttatgaaggaactccgatttatcattagttcagtgccaatgttcaacttgtctgctgcagttgctgctagcagaatgtatgagttctatcagatgtttgctagctaagctttcaatcatagctaggacgttctttgattctgtatcttaagagctctttggagtttggatacacataatttctgtatgccactttaaattactaccaatgcgggccgacctcttaatataatccgattttgttgtacagctacaataataggaagaaaacgatttggaaactggtgaatatggttatgctagcgttttttgcaatcaggtagaaatagtaaacaattatctttgctatgtaagagaaggaaagagatttgctagtctactaaacctggttctatagtgcagggtgcacggttgtaacattcatggcatcttactacaattatcctagcggctatgctttaaagcgcttgcatcagattggtgagtgacttattctgttattggggtttgttattaatgcagcagcattgacttggctatcaaacaagaaacatctgctggtcagcgtttgttttgtggtgtctatctacctctggttgataatttgcctacaatatgattaattgacttggtgccttccatggttctcaggccatcctgcaaatgtagctggggaagagtgggttcacatagacacttttggtgcgatgaatggaatatctcgcttttgtgaagatgattttccgtggaggtatgttagctgtactacctcgttttagggttggtaaaagtaaaggaaatatcaatgtacatggaaaaaagttgccactcggaagcacccatttgtgcgagatgaggcatctgtttgtttttcatgttcattttcttggatacgaatatcactttgttggaaaagggatcattctacattgcctttgaatacatagaagaggtatctgtttatctatttaggaggatataaaattttgttgtgcaatgcagatattccaaagaagaagagatagtagtggaggagttgcgaaaccgaaatttcacgtacctggtgaagtgagtatttcatcatatagtagaaagcaattcatagtaaataaaaaaagataccactggtggtcaacatgtaacactgttgtcatgcttggtgcagcgagcattcctctgtagatggatacaagtgcttattttatgaagaaggctttgagagacttgagctgcggcgaggtttccctcccattgtcttggtaaatcggtgggcgtggggctagtatttcatcaaaataggtgcatggaatgtaatgtaatgtaatgttgaattgcaggtaaaaaaagccaaagtatacttgcaccgggagatgaagaaggaagatccttttcataagaaatggcctggatgttaggtaatcctacaaatagagacaatgttttgggtcgatgtaatgtagcattcctcagagaggacatgatgtaatgtaacaacggagatgcttgttactgacttactgtaatggattcaacaaattcatccagaagcatcatcggcctttgggctttgagttacgcgtcacaattgaatcaattggtccttttaattagttttaccaatatacccctccgtcttttcccccttctcgtttaggaaaaaaaatcattagcttcgacttatccgaaacctaacgagtaacgacgagagatgcttcttcaggcggcggtgcagaaccgcaatgttccactggcttcttccgcctcctactctcgtctccttcgctgcagatctcctgtcgtctccgtagctgctctctcgaagaagacggcagcaatcgtgtgctccatctcccaggtttatggctacggcacggtggactacgagagaaggccgattgtccagtggaatgccatctacaagaagatttcgctgatggagaagccagagcttggcgctgcttccgtcttgaatcagtgggagaaagccggccgcaagcttaccaagtgggagctctgtcgggtcgtcaaggagcttcgcaagtacaagcgtgccaaccaagctctcgaggtccgtgtcctccttgtatttgccctcgctttattttgtatctttaacactacttacttgatcgcgtatcgttttcataggtgtacgactggatgaacaacagaggcgaaaggtttcggttgtctgcaagtgatgctgcaatccagctcgacttaatcggcaaagtgcgtggcattccagacgccgaagagttcttcctccagctccctgagaattttaaggaccggagagtttatggttccctcctcaatgcctatgtgagggccaagtcgagagaaaaggctgaagccctgctcaacaccatgagggacaaaggttacgccctgcacccgcttcccttcaacgtcatgatgactctctacatgaacctcagggagtatgacaaagtcgacgctatggtcttcgagatgaagcagaaagatatacgtctcgacatttactcctacaacatctggctctcctcttgcggctccttaggatcagttgagaaaatggaactagtgtatcagcagatgaaatcggatgtttccatttatcccaactggaccacgtttagcacaatggccacaatgtacataaagatgggtgaaactgagaaagccgaagatgcactgaggaaggttgaagcaaggattactggtcgtaatcgcattccgtatcactacctcttgagtttgtatggcagccttggtaacaagaaagagctgtaccgagtctggcacgtctacaaatctgttgtcccgagcattcccaatttgggttaccatgccttggtctcgtcgctggtgaggatgggagacattgaaggggccgagaaggtatatgaggaatggcttccagtcaagtcttcttatgaccccaggataccaaatcttctgatgaatgcgtatgtcaaaaacgaccaactagagacagctgaggggttgttcgaccacatggttgaaatgggaggaaaaccaagttcaagtacgtgggagattctagctgttggtcataccagaaagaggtgtatttcagaggctttgacttgtcttagaaatgctttttcggctgaagggtccagcaattggaggcccaaggtgttgatgctgtctggtttcttcaagctctgtgaagaggaatcggatgttaccagtaaagaggccgttttggaattgttaaggcagtcgggggatcttgaagacaaatcttacctagctcttattgatgtggacgaaaacagaacagtaaacaacagtgaaatcgatgcccatgagaccgatgcgcttctaacacagctacaagatgatttgtaatctgatagtcctagatctttgctttaaaaaacgaatcttgtaaccggagtcaactgaggaaatgcgaaatatgtataatgtacacaagagactgcctagtgaaacatgaatgtaagagctgtgtccctttttgtgacagctatttggaattagtgttgcttagggaactggattagcctttgttctcttgtttgattgttgttacttgttaagactaatattggagaggttaggttgtgctcttttattttgggccggacggataaaaggcccgatattgaatatataagtctgagagtctcaaaggcccatctccattaagatatcttcgcggaatcggttgtgagagagagagacggtgatcgggaaatgtcgacgaaaggcgcggcggcggcgtaccctagcgcggctcggatatctgattctccatgttatcttcagtactctgcttctctcaaatgtgagtcatgctcctgatctcaccctttgtgattgtttcttcgaggataggatttgacatgttatcttcagtactgtcaagttccataacgaattagcattgattagatctcatctatttcattatgcttcctcaaggtgattagattagtgggttgaatcccatgtcagtgattcgatttaggtcccatcaattgataacgtcgggtttgattcctgattgtttatgtgtttccgttttcattagttatgcctcttagcttgaccccttgatttcttatcaggtcttgaagaatttggatcagacaagagtaaatgccaggatcattttgatgtgtacaaggaatgcaagaagaaagaggttgttgttgtgaatgaatatttaggcttttggcgtttccaacttctttgctgctttacctatgtgttattttgtttctcagagggaagctcgactggaacgcaataagacacggtcgttgttctcgtgaatgcagatcctcgaataccaatgatgtctcagaacatcacctagctagtagtatcctgttgtttcatttgcaatggctgtgtttgtatgatctatctaagtaaacaagtggaaagtgtttgttaatgttactttttactccccattggtgaatcatggtgtatacctgttaaactttgagagcaagtggttatttatttagttagagagttagagcttctccaccaccatattgaataagaagatctttctctcattcttttactttactctggcgtctgaaacagatccagggattccagtagtgaattgggcttaaaaactgttatatgggctttcgaaagtaaaaggttcggtgagctgccaaagaaaagtcagatgcctttaatcgcatttgacgacgattctttacgtgcgccattgactgcatcgtcgtcttcctcacgcgatttggtaatccgattcgtcttcatctgattccctcccttccgagaataataatgtacccgccacctccctcaagcatctacgctcctccgatgctggtgaattgctccggttgccggacgcctctccagctcccatccggcgcccgatctattcgctgcgctctctgccaggctgttactcatatcgccgaccctcgcaccgcccctcctccgcaaccttcctccgccccttctccgcctccccaaatccacgcgcctcccggtcagctgcctcacccccatggcaggaagagggccgtgatctgtggcatctcgtatcgtttctctcgccacgagctcaaaggctgcatcaacgacgccaagtgcatgcgtcaccttctcatcaacaaattcaaattctccccagattcaattctcatgcttaccggtacagagtatttctatcttttcaaatgcctatgtttgctactatactactattccttggattttgaatacaattttccttggcctcttcaatctgataaacacacattccaagttaccatttcgaaccactttgataaaaatgtgttgcattccatagctgactaactaattgttcatcatggatggttttcattctcagaggaagaaactgatccatatcgtatcccgaccaagcaaaacatgaggatggcattgtattggctcgtacagggatgcacagcaggcgactcacttgtcttccactactctggtcatggttcgcgtcaaagaaactacaacggtgatgaagttgatggctatgatgaaacactctgtcctctggattttgaaactcaggggatgattgtagacgatgagatcaacgcaaccattgtacgccctcttccacatggtgtcaagctccattcaattatcgatgcttgccatagtggtaccgttctggatttacccttcctatgcagaatgaacaggttattagtccctcaaccgcttctaaaagggatgttgcttacctctctcgttatatttaacatacatccatttttttttttaattgaaacagagctgggcagtatgtgtgggaggatcatcggcctaggtcaggtttgtggaaaggaactgctggtggagaagccatttcaattagtggatgtgatgatgatcagacttcggccgacacatcagtaagtagaacgactctaatcatacgtcttgctgttgtagttggttcctcctctcatgattaaaacacatacacaggcgctgtcgaagatcacgtctacgggtgctatgactttctgttttattcaagcaattgaacgcagcgcacaaggcacaacctatggaagccttctgaattctatgcgcaccacaataaggaatacagggaatgatggtggtggtagtggtggagttgtgacgactgtgctgagcatgcttctgacagggggaagtgcgattgggggattaagacaggtaaaattctttcttgctctcttgtgttgatacagatcgataaatgttttcttaaatctgttttttgacaggagcctcaactgactgcttgccaaacattcgatgtctatgcaaagcctttcactctctagtaaaggacaagtcactttttatgtatagcgagtgtgatttgagaatccgtccatataaccaccttttgtttcttatttttatttttctttcaaaagaataaaggaaaacattgatttggtgattcgataacaaaatgtgccatctattctttagtctttacaaacaagcagcaaatggtttgcctttcagaatcaaaatttaaggtgtttctcgaatagacagaaggaagagaagagaagtcccagaaagctgttcagaaggcgcatacaaatcatgtgtgcgttgctgctgcaaggaaaagcacttccgctgtagcagcctgttctttgtttgataccccggccgttatcttccagtacaaaggaggagtttttcacaccatcgctaaagagaagacaccaaaagaaggtacctttatgcaacctagccattcccactccaacctcggtatgcgacctgtttctgagcaccgacaacgcactgctatctctaaagagaatgtctgagaaagcgacttctggtgctgcatacttagagctgcagccgaggatatggccagttatggtaccaaaagtggggagttctacaccacagtttggggcaaacacctgagtgaagtcgtcttcagggtgttcacagctgagagtgttgttgacattgcaattcccctcgcagagctcaacatactggagggccatgcagccaagaccgggactctcatttagtttgcctagtttccgagctgttctgttctggttcaagatgctcaccatttcatgagctgagtttcctgcaaccattctaactaacacttagtccgcctaaaacgaatcaacataatataaactgtcgaatctggttctgactaaagaaagcgaactcgagattaaatcagagggagtggctgtaaattcaaaataaagcctggccaaatgctgaacgagaaatccaagtctatattcgcatatgttatgaggggataaagcaaggagttaccgtgcaatttggagctagctagcactgatgagagtgacagaaacagtaaaatcaactccaaaatgctgatttcgttcttcatatcgtgttttatcctctgaattcccagcgtaatagctcgagctggcggattttcgaaaaatcgagaaaaacaaaaaacagaaaaggagaaagtttttgaaaggagatgagcttgatggagatgttgactggtccctgaataaatgaaaaatgtgttgcattatttctattattgagaagaaaaaaaccaggcattttggttattgggctttgatttgatgttgggctctcaaccattgaaattgaatgaagaaagaaggaaagtacgtgacttgaatttcatttacttcattaaatgggcggcgttggggccggtggaggtgggccaatgacattgatgtgtaaacagaggtaaagccgaattttggctaaggcgaatcaatgcccattggctcctctccttacatatttgaagtttgaggtttccttccttttcttaaattaaatgttgctgtaacatttctactattgtaaaccggggctccaccaccatgtgcttcttcaacactgtatcatcagagcccacatggtcatgcctctatataatactttgtattattattattcttatgtcacattataaacaagtacctccaaattgcacttccttcaaacttattcgacagtagactagctcaagtacctttggatggcgtcgaggcccggagctcttacggagtggccatggagtccccttggtagcttcaagtacctcttggtggccccgttggtgatggcgagcatgcactcgtacgtgacggctgtggatgaggagaaagacctcagcagacttatgatagtcgtgttgatgctgtggagaatagttcacagccagatatggatcagcgtgtctcgccagaggacggctaagggaacgaacaagatcgtggacaagcccattgagtttgagcaagtggaccgagagcgcacttgggacgaccaagtcatcttcaacactctcctcatgtatctcgcaaacatcaagctcccaggcgcctcccaccttcccccatggaggctagacggggccatcctcatggctctacttcacgctggtcccgtcgagtttctctactactggtttcacagagctctccaccaccatttcctctactctcgctaccattctcaccaccactcctccattgtcaccgagcccatcacgtgtacgtacctttatccaccatttgcttctattctatatacattcattcatatctttaatcaaacttggcagctgtggtgcaccccttcgccgagcacatcgcctacacactactctttgccatacctatggtaacggcgtccctgtgtgggatcctctccatcgtttccatcatgggatacattacttacattgacttcatgaacaacatgggacattgcaacttcgagcttttccctaagcgtctcttccacctcttccctcccctcaagttcctctgttacaccccctcgtacgtcgtttgtaaaaacactactatttatttggatttgaatatatgcatgcatttataacatggcatcaaatatgttgaaggtttcactcgctccaccacacgcagttccggaccaactactctctgttcatgccaatatacgacttcatctacgggacgactgataatttgaccgactcactatacgagaggtcgttggagatagaggaagaatcacccgacgtcatccacctcactcacctcaccacacacaactccatctaccaaatgcgccttggtttcccgtccctctcctcttgccccttgtggtctcgacccccatggtacctcacatgcttcatgtggcccttcactctcctctgctcatttgccctcacttcagctatccctttgcgcacctttgtctttgagcgaaaccgtctccgtgacctcaccgttcactctcacctccttcccaagttttcctttcacgtaagcattttacacgcatgcatatgcactttccctctctctcgctctcttgacacaaacgggtttacttattatgttgtacttcacaccactattttccaaactttcacacacaaaaaaaacattgattctcacttaacttgtacgtactacgtaggaaggacataaccttttatacaaaaagaaaattaaaacaacctaaaaatgaacaatgaacattttcttgtgggtataccttttgtaagttgcatctaaagtttattaataattttgcctcataaacatgcggcggtagtataaatcacagcgccaccatgagtccatcaacactatcatagaggaagctatccttgaagcagatgaaaagggtgtgaaagtaatgagtcttggcctgatgaacaatgtaagtttatttacttcaaatccccctaaatatatatgaatcactattggataagtactgtaactaattacacacgctggcaaaagaaaaaagtaactaatcaacacacaattaattaatgagagggaggaactaaacgggtctggagaaatgtacgtgcaaaagtatccgaagttgaagataagactagtggacgggagcagcatggcagctacggtggttatcaacaatattccaaaggaagccacggaaattgtctttagaggaaatctcacaaaggtggcttcggctgttgtctttgctctgtgccaaaagggcgtcaaggtttgtgaatatatgagggaattggaatatatatactcagcttctcatatcaaacaaaaaataatgtagtaatgtgtatatataggtggtcgtgttacgcgaggaggaacacagcaaactcatcaaatctggggttgacaagaatctggtactgtctacaagcaatagttattactccccaaaggtgtggttggtgggggatggaatagagaacgaagagcagatgaaagcaaaagaaggaaccctctttgttcccttttctcactttccgcccaacaaactccgcaaggactgtttctaccagtccactccagctatgcgtgttcccaagtctgcccaaaacatcgactcctgtgaggtacatctttgaattcttatagatatatctgtaacttttatattatataagctgatagatgtgttcatctataatgaatgaatggttgttatatatatatagaactggctggggaggagggtgatgagtgcatggaaaataggaggtatagtgcatgcacttgagggttgggaggagcatgactgcggcaacacttgcaacgtcctccgtctccacgccatatgggaagctgctcttcgccatgatttccaacctctcccaccatctcctctatgagcttttttcatattcatacatctatgtcccctttcttgattatatctacttcccttccatcattgtttgctgtttactatgtttttctatcgacaatatataagtacccttgttacccttggtgccacgtgcttcatatatgttagaaagggcaaaaaaattcgtcgtatgatatgcttagttaaattttataaaactcaataaaaatcttcagaaacagtgctatgatcattacatcttaactaagtgatatatatctgcgtgcctatttaacaaaataaacaaaaaaacaaaacaaaatatatttgggtgcatcatcaaatcaaagtagttgcaaaaactggacgaggtttttacttaaatggtccttaccccgcatggtccacttgctacctaattaaggattggtagggtgcgtatacgtatataaattgtggcggtgggagatggagttactaaaaacgaaacgtacaagtattattcatagctctcgtataaggggttagtccttagatctagatattttcacttttctttcatttatgtcggagcaacagacactagctggcgcttcaacgtgcatgatcttgattggctagtaaattccaagcatcaatacctaacacatgcccaacttggttcattagtattctttcattggtaaaatacccttacctttcaataatatccagaaataaatatatgaagccatccatcaaccggtgcatttcctcaaggcatggatatgatatcagaacatcgatgaaggtgggagggggtaattagctgagtgtcataaatgaggatccatgtggagatcatcgaatggtagtagtacatgtttggtcttagctggccccaccacaaggaattggactggtgggaagataggggtggttacgtcattccacatatctaccaattaaggagtttaatataaaccttgctatataatgtaccttggctcacaagagttgaagagacacagtgacgacacaaacatattacattcgacggtataatggccacaaaaccaggagtcctcaccgattggccttggacacccctcggaagtttcaaggtgcactctgttttcttgtcctttaaatttaaaaaaacgcgtgcttatgatcgaatcccgttacgttactgatatatatgtttttcttgacattgaaacaatacaaaagtacatcgtaatagcaccatgggctgtccatagcacatacaggtttgtgacagatgatccagagaagagggatctcgggtacttccttgtgttcccattcttgctcttcagaattctgcacaaccaggtttggatctctctgtcccgttactatacgtcctcgggaaagagacgcatcgtcgacaagggaatcgacttcaatcaggtcgacagggagaccaactggtgcgcttttctaaatttttaactacctgcgtgcctcgtgagtatatgtaatcaacgtaactaatgaaatcctgatatatgcgcagggatgaccaaatattgttcaacggagtgctgttctatataggcatcaacctattgccggaggccaaacaacttccctggtggagaactgacggagtgttgatggcagcgcttattcacaccggaccggtggagttcctctattattggctccacaaagctctccaccatcactttctttattcccgctaccattcccaccaccactcctctatcgtcactgagcccatcacttgtaactattgtttcttaccttgatttttacgctgcctatatttccgtttttctttttataattattatacgtaaaatatacatcgttcacgtcctaactagtagcttttatctgtatataatgggatttgatcaaatgtatgcagcggtgatacatccgtttgcggagcacatagcatacttcatcctcttcgcgataccactacttaccacgttgctaacaaaaacggcgtcaataatttcgttcgccggatacataatctacatagacttcatgaacaacatgggacactgcaacttcgagctaatccctaagcgccttttccacctctttcctcccctcaagttcctctgttacaccccctcgtaagtccttaattaacaactcctcttctgtttcatacactaccaatttggcgtagtaaaagcatttacaagaaaccattcttgatgatctgatacaaatacctagttagatcatattaattaatcctcttatggtcatcataaaatctaagcaaatgataaatcatactaatacaggggatatatgctattataatagaattccatacacgtactccattcctgtataaaataaaggtgacgtgatacagttgtatgcttaatatgatcgtcaactactgaatccctggaccacaacagaaaaaaaaacaattatttaatatatcttacatggttcaacttatcggcacataatccaatttcccacaactttacgcattgatagcatctttaaccaaacatcctttgagaactattttaaatatcaaattcattagtcgatatgtagcaggtggtccctctaaacgctcaagttatattaaaccttctggattcatatttacttttaaatatttgtgactttttttccttcggtattaatttagcgcaatgtgaaagcaaaatttaatagttaaaatacattaaagtttggataataaatggagcatgagaattgcagataccactcgctgcaccacacgcagttccggaccaactactccctcttcatgcccttgtatgactacatctacggcacaatggatgaaagcacggatacgttgtacgagaaaactctagaaagaggagatgatatagtggacgtggtgcacttaactcacctgacgacgccagaatccatataccatttgcgcattggcttggcctcatttgcctcctaccccttcgcttatagatggttcatgcgccttttgtggcctttcacctctctctccatgatattcacgctcttctacgcccgcctctttgtcgctgagagaaactccttcaacaagctcaacttgcagtcttgggtgatacctagatataatctacaggtcctcatcatcatcatcatcatcatcatatatataggctggttaacttgctgatgcatatatattaatggtgatatatatatgatgcatgcagtacttgttaaaatggaggaaagaagcgatcaataacatgattgagaaagcgatactggaggcagataagaaaggagtgaaggtgcttagtctgggtctcatgaaccaagtaaagaaactatctctgactgttttggttttatattgggtagatgccgtacgtactacgtagtgtatgttaaagctttaatttgatgaactgaaacagggggaggagcttaacaggaacggagaggtgtatatccacaaccatccagatatgaaagtgagactggtcgacggcagtagattagcagcagctgttgtgatcaacagtgtacccaaagcaactacaagcgtcgtgatgacaggcaatctcactaaggttgcctacaccatcgcctctgctctctgccagagaggcgttcaggtcctttgttttccttttgctcctatgttgtgatatcaaattgatgatctctaggagaaaaataaaatccaagctttatctacatgtatttatgctcatgactcgtaacattttcatgtgaatgtcatccgcaggtctccactctgcgcctagacgagtatgagaaaataagatcatgcgttccacaagaatgcagagaccatttggtctatttaacctctgaagcactctcatcaaacaaggtaattcagtatacaaaagaagcacaattaatcaaagaatcagaaggaaaatattcaaagagcttatataaagaaaactaatgaagggattttgggtgaaggtatggctggtgggagaaggaacaacaagagaagagcaggaaaaagccacaaaagggacattgtttataccattctcacagttccccctcaagcagttacgtagagattgtatctatcataccacaccagcattgatagttccaaaatctctggtgaatgtccactcctgtgaggtaagcattcaaagctacccaatccaactaatttattagaagaggtccttattataaaaaaaacatctgcagaactggttaccgagaaaggcgatgagtgcaactagagtggccggcatattgcacgccttagaaggatgggaaatgcatgagtgtggcacatcccttcttctctcggatttggaccaagtatgggaagcctgtctcagccacggcttccagcctctcctccttccacatcattaaaactccaaccttggaagattttaggagaatgagagcgacacgctctgtgcttcttttccttatgatccagctcttccacgcacaaatgaactatgaaacatatataaagcgcacacatatatttatgcatatcaagcttttggtgattatggtattgatagagtcaaattaagctcggtgactatggtattaataagagtactatttccttttctctttgtgaactaagaaacatatatatataaagcaaacatgttccagaatatctaagtttttcttctcccactcctagactttatagttctacaaaatttaagtagcatagaacatagcatttggatcgcttgatgctattactaggacaattcaaatggtctctcatcacttataggagaaacacctatcttattcaaatcatttggtggtcaataaccgttttgaatacattgattggtgttagttagtagttagttctcatacacagtggctagagccgggcaaaacggataccaccaccgttttttaaattatttattggttttcttaaataaactaacaaataattaaattagtgataatgtactatttaaaaaataattatgtaaataaaaatatgaagttacgaataaattcatgaaatttaaaaatttaacacttatcaaaaacaaaacctaatagaaatataaaaatataattttaaaaacaataaaaacaagtgttaaaattaaaaaaatgtgtaaaccgtattgaacctaagacacctttttggggtttggatgttatgtccaattaagttacacaaaatttaaaaaattaacatttatcaaaaacgaaactttataatttttaatagtaatataaaaatagaattttaaaaacattttttaataaataaaaacaagtgttaaaaatttaaattatgagtattgaacctaggacaactctttgtgaaatcgttaatgaccacggttaaatggcaggatcaaaaatccgattagatttcacaacgtcatattcatttagtatttataaaaccttctaaaaaaaaattaagaaaagagttgaaaaacttttaagaaaaaataaaataaaaataaatgctaaatatacataaagatgtgaaaaacatgttggacttgtgaaatcgctaatggccacggttaaatggcgggatccaaaatccggtgagatttcacaacgtcatattaatttagtgtttgtaaatactttttaaaaaataaaaaataaagagttgaaaaccttttaagaaaataaaataaaaattaaattataaatatacatgaagatgagaaaatattttggatttgtggaatcgctaatgaccacggttaaatggcgggatccaaaatccggttagatttcacaacatcatattaatttaacatttataaaaccttttaaaataaaataaaataaaaaagttggaaaccttttaagaaaataaatgctacatatacatgaagatatgaaaaacatgttggacttgtggaatcgctaatgaccacagttaaatggcgggatccaaaatccggttagatttcacaacgtcatattaatttagtatttataaaaccttttaaaaataaaaaataaaaagataacaaaaatcgaaagagttgaataccttttaagaaaataaaataaaaaataaatgctaaatatatatgaaaatgtgaaaaaacatgttggatttgtggaatcgctaatgaccacggctgaatggcgggatccaaaatccgattagatttcacaacgtcatattaatttaatatttataaaaccttttttaaaaaaaaaaaattgaaagagttgaaaaccttttaagaaaaaaaataaaaaaaataaatgctaaatatatatgaagatgtgaaaaacatgttggatttatggaatcgctaatgaccacggttcaatggcgggatccaaaatccggttagatttcacaacgtcatattaatttagtatttgtaaaaccttttgaaaataaaataaaaaaaaaaagacaaaaaaaataaagaattaaaaaccttttaagaaaataaaataaaaaataaatgctaaatatacatgaagatgtgaaaaacatgttggatttgtggaattgctaatgaccatggttaaatggcgggatccaaaatccgattagattttataacgtcatattaatttagtatttataaaaaccttaaaaattatttatttaaatgttttagtgaaagttttaaactaattagttttagttttggttaaaacaattttttaaagaaaggaagaaaaaaaagtagaatgaagaaagtaaataccttattggatttggttgtaaagaaggcctcatacagcaaagcccattccaaaatcctagtgtagctctgtcgtgacatcatccaccacttttaggtcaattttgtaagtaaattactcatacaaataaattaaaaaaggaaattgatcacatcaatattaaaaagtgaccgttacaaataaattaaaaaaggaactacatagaaacagtatcccgataattgctttcatcataacagattctcacacctttgcaattgtggctttaagagattccaaattgttgatttgagtttgaaatataattttaaaatatcaataaagaagtaaagaaagtattatacctgattggacctcgtttgggccgtcacaggaaaagcccattaccaaattcttcgtcactgctctgttctgtagttgatgacatcgatgaaactcaaactatcgcactcgtcgtcattaccaagtccactgaacatgatctgttccatcgccaagttattcttcgctgccactgaactggtcgtcgtcttcactaatctcatgagaacggtgaaattagggtagacccgattgacagaaaacagaggatggtgatcaatcacgaaacgagatgaaatcgtttcataaatcatcggcatactctgaatgggtcatctctttcacgctctggattcttttgttttccttttgaagaagaagatgaatggagaattatgatttcacaagggagaaagagtatttataaaacaaacgttttcaatagaaaaatgaaattttggattgtttcctttttttacaacggtgttaagaaaaaaggaaatttcagttatactgcaaaaaataatgaaaatttgctcacaacggtcatatttgttattgtgcataatattatttgagttttaatgggtaacaatttatcaagaaaattatttgggttttagttcgtaacggtcatatttgttatttgtgcaaaaaaattatcttagttcacaacaattaatctagataaatcatttgagttttcttatttgttaaaacagagaatgcgccgttgagatagagaggagcaaagtcgggatcgtgtgtagttacttatctttggttactttgtaaaaacacaattacaaactcaaaactgttacaaaaaacaacaacttttcactcattaaagaacactaacaatcatcatccatgatacaaaacagaacagagcattctttaatcatcatcccggaagctttagatctgtgtctcgcttcagaccatacccttcaccacccccaggttatttaatttacttacaaaaagttcatactttaactttgtaaaccaaaaatgttttatttatacattttcagtcttaattattttcttggaaaaattatctattcatttatttatttttaaaacaataattttggttaattttgtttggtctttattacaagttgttcagataaaactgaattactgtatttccaatttggtttgagtttcaagatcactttatttttaagtttcatgtgattttaagttgagaagtttataaccaaatttgaaatatatttgactatttttagatgctgaaggagaacaagaacatggtcgaagattaaggtggagattattgcaatggcttagacgagcttctcccaatagttcactctcagtattctcatcaattcgattattttcattggggttgtttcaccgatctaacgcatgtacgcatataaaataatattatgttttaaaagaaaataataatctggttatcaaaacgactttttcaaatatataatttattcacatatataagttcatatcataatagttatggtacaagtttcctaaaactaaaaaataaaaacaaattttggcttcacagtcattggaacaaggtgaatccagcggtctccttctcggagaaaatggccacgcggacggacgatacaccacagaaaagtccaacgtgagttaactctaaagaaaacattttatttgccaaatataacgaataattatttattattttcagaaaatattattatagttgtgattctctgtttcgcaagagttgggagtagggaatgtgaagtagtagtggtggcccaagttatgtttccaaacgccagtaacgaccaaatctaggcatgtagatttcattgggtcacgtggatgcatcaaatttaacgcgccgcatttacttttcaacgaatggcacagtttcaactacctcgagaaaaatccaaaaccaaaaaagctatttggaatctttaaaatctttttacaaatttcttctattatagtattgctttgttgtactatatttcacgacctttcatgaatattttaaatataaatagaagtggtaggcgcatatctttttatattcaaaagattcatatccaatgacacaactaatcaatgttcaaccgaccttagtagccaagttccgttatggtcaatacgagaggttgaagagtgattaagctcaattataccagatttaccacaacgactaatatccttccttatcttcacttttgaactctactttgcagacaatatatgctctctgtcgtcaaagcccataagatatctcactaaaacgttcaaactcactctacgtataagatcatataccacacgtagacaaaaattgaacctactcaggctgatctttgtttcaagttttatttttaacaaatttataaagaaaatatacgacatgtatcttagtaaccattgtgtagagatatatcagattgtgatttgaagaggtggtcctgatgtttgaaacacaacactctcagctttaggcaatagtttaactaagatggatggtaatttttacaaataacatgcacgtacgatttgtttaactatttctcgacaacctaaaccaaataggatataatatatgatcgtgttaattaagtaagataatatatatatatatatatatatatatatatatatatgtaccaaataacctaaaatttgattgttttagggctaatcggcagattctctcataacatcgttgagaaaaaaggacacggtgattaaacatcataaattcggaatattacctgattaggaggcaaaaacgttggttgatacacgtgcattacccaatcggatttggatccattgatgttttcatacgattggaaaaccaaaacttgtttctcaccaattttaacaccattactagttatccacttgccaatgattggtgtgttggatacagtttctttccaataacccgaattcgttttcaatatttcttcgttatattcatcacaactaaagaagaaccataccatagtatcagcccactcgctctttgatttggctataataattattaaaaaaaaaaacctaaatcagaaatcagcctataatcaatgattgaatcagaaaatcatgatctagcattaattgaccaaaactttcatggcacatgccaaggatcgtaactagagattttaacggtggtaatgaaatgatgatattgccttccttgatgccgagatgttttagcaggaggtaatattcgatgataacgtcatctgtcggccggaatctgaaatccgccggatatttcattcttatcgaataaacccataaagttaaaaacaatagagagcgatgaaaaatgcaaaatagggtttacaatttttatatgtaggtaatttagaaaaacaaaattctttttttttgggcaacataaaaaaattccttaattctgaagaagatataacgaataaggtacgtaatttgatgtataataaacgaaagcaaagtctttgaacgccgaaacagaggaattaacaagaaacagaatgaaagtgatgtagaagaaaaagaaagattactaaaattacatgatataggataatgtaaacaaataaacaatagtctaatgggttttggatttagccatcaacatgacaacatgcacgtgtacatatatgatgtagacttgaaagtccaaaaaaagactcttgacattactgaaatgaagcatcttaatttgaaatttattcttgttttctttcgttgaatggaatttgtttatggggttaggtaggactagaatagtacttcgaggttgattgatacttgatagggtacgtcaaataaaatttgagcatttggttagctgtatgagcagaaattatacaactttgtcttcacaatggagcatacatacaagatgagaaagtaacaaaacaagatagacattattatgtcaatggatacaaatttgtcttcacaaatttaccagttttatacatatcacacatacagtatggtaaagttacaaaccaagatagacatcatagcatacacttgtactgttgtaaataatttggaaagtagaaaaggtgttattgatcacttttattgttatcaagttcttgagatggaagaacataggtgaattttcttgacgaatttttgtatcatcctgtgaaagaaaccagctcttttcttcttgatcgtctcttgacccaatttatgctcaccaatctcagtcccttgtgcatcatcataaggattcttcttcttctcggcggtatcaatactggttattagagcttggctcaccttgaatcataacaaagaaacaaagtcgttgtaatgagtgttggcacaaagtagcatcattgattgtttgtgttgttagtagtgatggcacaaagtagcattaaggattgtttgcctcagtgaaagatagagagataagaaagctcacctcttgagttagtgacactaagttgattgttgaggtaggagattcttgcaggtctttgatctggtctatgcgatgatttgagctaccaaaactatcacaagtgctcgaagtttgaatagagttctgtcaaatgaatgaaacaaaaacttgagctttgtaaggtgaaatacgaaaacagaggattataaaggtacaaaagtagaaatttgcttactgtttttggagttagcaaatcagaatcattatcatcactgctaacatcatcactgaagacaccagttaatgagtttggaggtctgtaatcacttcgattatcatgcataaacatgatactcttctccttagcatcatcaatatcattcaaccatgtttcccattcctcaatcggtatagcatcctcgatttgagcatcatcctcatcattcatcagccattttaccaattcctcggtcagtttagcatcctcgattggagcttcttgcagcacatcaccaaactgacttggatcttctctgtgaagtgaggatccctgaaaaagggggagaacgcaaaagaagtcgttgtcagatttaaaacagaaaagaagttttgagatgaacccacctcagaattgttgacaagctgagggattaaagagtcacgacgactctgctcaattccactaacaccagaagaagaaggagaagaggaagacttctctctcatgccaccattaaacataactttacagagtgtgtatgtcatcatcatctgcaaaaattcgataaaaaaactcagaatcgcagcaatagtaagtaacacaaaaaaaaaacagagagtacctggttatgagagaaaccgtggtactcgtgtataacccaatcggatttggattccttactcgtgtaaaacatcaaaatctttttctcaccgatctgttggcgattacgcatgataggctttggtctgccagtactcttccaaaacccagatttcgtttttctcatctgctgatcacctctgccatatttgttctccttaggtctgaagaaacaccaagccacatctttcagtttgatccttgactggcctaccataccaaaacgagaaaacgctaaaatcagaaagtagcggatgattcgattgaacagtgagaaggacgacactcggtgatatgaatgacttacaaggtaactcccaaggatcgagtctacagacagggactgtgttaatgaatcgatcgacatggctcgtgtctctatcggaatttttcggccaaaggtaatcgacgacgatctcctcgtcggtcggacagaatcttaaacccacaggagtttccatttctctgcagcgatcaaaaaagaagggaaaaggaaaagatcaaaaaaatatgcattggagagctttcgccatggttgatgttcttctgcaacttaaaatgatggagaagaaagacgtatagggttttgtatttatgcggaaattctcaaattcaaaaaaataaaaaaaataatacaacaataaaagagtaaaaatattaaatagtcatgacggtatacttgtcgaattcgattacgctaagacaggacattcaaagggttaagtttcggaatggtaaatacgtggtgcgtttgtttatcacttgtcttataaattttgtaattattttttccatacgaccataccaatcttcaatccatgaaattgaaaatattccccataaattctcttacattgtgtgacttgttaaaaaaatatcaatcagaaaaggagggtggaaaaagaggatttgcaagctgcaagtttgcataaatttaatcagatagtgacatatcttttcatcatgggacggtagtttcgcccaacacgtaacgacgaaattacatttctttcttgaacttgtttgatgtttctctttattatattttgttggcccatttggaaattatataatgattaacgttgcccacaaaaaaaataaatataatgattaacgttaacgtcgatcgtccgttatctatgtagaaacagaaacatagatacgatgacaaaaagtatctctatatgctattatgctaataggtagagctgtcaattagacaggcggctcatgaacttgcccagtccaaatgcatatggacgaactatattctggaccataaaacaaatggtccaattgggcatataaccagttttgtccacgaataatatgagtttgaccatatggacaatgggctgcccatgggcatgaattgagggaaaaatacaatttctccgattttacgattttgacggaaaaacgtaattctgcaaatttcctctaaaacgcgattttattattttggcgagaacacaattttacagtttcgacgggaaaacgcaattctccgattttacggttttggcgggaaaacgcaatttttctaccaaaatcgtgattttattatattggcgaaaaacacaattttacagttttggtgagaaaacacaattctacgttttggcgagaaaaaacaattttacgattctaccgttttggcgaaaaaaaacaatttcataatttttccgccaaaatcgtgattttattgtattggtaagaaaaacacaattttaccgttttgtcggaaaaatgcaaaatgcaaaaacataattctttaaaatcatgatttttgatttatcaataataaaatgggctatacatgggcttgcccatatggacatggtctttattgggcatggacatttttcggaccattgtccattatggaccgtccaacttgacccataaaaagaattgtccctacggacacgcccaatggtccctggacggatcatttgacagttatactaataggaagcttcgtagaagccgtaagccgaaataatctaaagcccttttaagatttggggataaatatttatatataaggctagacatggggaaaaaaaattaaatatttatagacatgcatgctatataccagattaccaggtccagaaataatctaaagagagcatacaaagtgaatattaaattgcaaaaatgggggaaaataaaaacaagaatagacatgcatgctatatacgcatatgcagagtgagcgatcacttgatgagaattttttgtaaaacgattatcgcaatttgagcatctttattgatgaaatacttatagaaagtttctcaaataaaatactactaatatatttatttattttttgttttgagagttttacatatatagggttctcatatatagattctcaattatgaaccttttgtactaaaaactctactattctagaaacttaccttttttttaaaaaaaatgtgtgaatactatggatggaaatgtctttagttgctatgaaaactaatttgtgttatttatacggttatacctaacgtttctagttatcacaaaaattaatggtgtattaatgtatttaataaagtaagttaagttgttgcacagaaaagaaagtgtaagttgggtaaattgtgtgagccaaaaaagattgtaaattgtgagtttgtgacgctgaagagtgaagacaattcaaaaggttatatcttatatgcgacggcgtaggtcagttttggaatggtaaacacgcggcaagtttggttatcatcatttgtcacaatcatatatatttactcatataacatacatacattgctttatcgtcatctttggttcatgaataagaaaaatgttctcccacaaaatatctttaccctttggtttatattttagttttttttttttttttttttttgtcaaccgatataaattaaacctcaaaagagccaatcccgagggatattgtttacatacgtgacatgatgcggtacggtacgaatctttcgtgccaacttatccgcttttacatttgcactacgagaaattaaagataaagagaaatttgtgaattcttccctatcactttgcaactcctccaaatacactgaaaacgccggccattcggttggagaagacaccatcttcaccaagtctgaacagtctgtaaagaaagctacgttctgattatctgctccaatcatgcacttcatcgcccaaagaagagcttccatttcggtatgtagaggagatagacttctacgaacgttggcggctcccatggttggcgactctccaagagatgatagacagaaccatcctgttcctgagaactggtcacttgctttccaagatccatcaataaaacaccgaaagccagaaaaagttgtatcttgtgatacatccctcacccgaattcgactatctatagacaaggaaccatgtttttcactatggagctcgacttgagcttcctgccacgattgagcctcttttaccgataagagcaatatttccattggatctttatccacattttcaaaaactttttcatttcttgctttccatatataccaaattatccatgggtaagaagccgaatcgacgcctgaaggaattctccaaaacaaatgatccaaattcgtaaaaattgaattcgaaggaaaaatccttggggccgtaggaatttgtgatagtgcccaaatctgccttgcaggatggcatagaaaaggtttatattttagttttaatataaaaaagaggggaaaagagtatttgcaagttgcaagtttttaaaatatacattaatcaaaagactgacatataattattgcacttatcatgtgacagttacgctgttaatcccacatttttttttctatttttgctctgttaaattcgatagttcattatttatgtcgaagcaaacgatgtaaaaatgtaaaccacatataatgattttgtatataggaaacttcgtaggaggcgtagataaaagaactagacagctccaaccaaatactcctcctcctacttagtaattttttttgctaaatacagcttattagttcgttataagagttaccaaggagtagtaaagctaaagtattagcaagttgcaatttaggattttcattaattaattgaacagtgaagtagtggtgggccaggacatgttaccaaacaccaacaacgaccaaatctaaaatatgtgagctaattgggccacgtggaagcattttaattacacgcgccgtgcatacttttcaaccaaggcacagtttcaactttcaactaaggccataatattttctggccataaaatattctttcagatttagagaaaatgtttttttttttgttttttttttaaattttagagaaatgtttggtaacagtttgctgaaatgattttgatttggattggttgtatttagccaaagaatcttgttcattatttgttaataaaataaaaaatctcaaaatgaggaagaaaacaaaaagttagcatcagtcaaatggggtttggactcaaagataaaagtgacaatatgctgcacgtaagatgtagactaaaagtcttatagaaaactcttgacattattaaaatcgaagcatcttgatttgatattatccttgtttccttttgttgagaacctgacatcttttgtggggattaggtaggactatagcctcaaggttgattgtgatcattttcatcttttgtcaaagaaagtgaccattttattagttgtatcgtgtatgaattgaaaattatccaactttctcttctcggacttctcatcacaaatttaccgtttttatatattggaccaacataaaatagggaaattttacacaaaaaaggatagacataacattttggtagttgtattaattgaattcatacaactttatcttctctaacaacttcgtatcacaaatccaccctttttatatagagagagtacatacatgaagtcacacaatctgatcaaagtttacaaaacaagatagacataacttatatttctacaaatttggaaaagtactaaaaggtgttcttggtctcatctattgttatcatgttcttgagatagaataacattggtgaattttcttgactaatctgtgtatcatcctgtaaacgaaactagctcttttcttcttgacagactcttcacccaatttatgctctcgaatcacagtcacttgacccggaccttggctcacctgcaaaatatattaaagaaccaaccatttaaataatttctctaatctggtctcaatgttgtgagtggtgaaattaacaaagtaacatgattagcatttagagttaaatgagataataaatctcacctcttgagttaatgacactagctggactgttgagtcaggagaatgttgagtttggtctatctgatgatttgagctagcaaaactagcacaagtgctcgaagttccaatagaattctgtcatatgaaacaaaaactttagctttctgatgtcaaatctgaaaacagaggattatcaagatgcagagtaaaattttgcttactgttttaggagatatcaaatcagaatcattatcatcactgctatcatcactgaagacaccagttaacgactttagaggtgtgtaatcgctgcgatgatcttgcataaacatgatattcctctgctcatcaccatcattattcaaccatgttttccattcctcctcaatcggtgtagttgcatcatcgatttgagattctccctgcacattagcaaagacaccagactgacttgaattctgtaattcttggctgtgaaacgacgaaccctgaaaaaggggaggaacactaatgtcagatatttcaaagtttctaaagacaaaacagagaaagtttgagattctcccacctcagatcctccagaactgttcacaagagggattaaagagtgaatctgttcaatttcactaccagtagaagaagaagagatctctgtctcttcacccttaaactcaactttgcagactgtatacgtcatcatctgtacaaataatcaaatcaaaacacgatcaccaccacaaaacaccagaattaggtcaattaacaagagagatagaaaaaaccctaggaatctggaattaggtcaatcaacaacaaaaaaccctaaaagtttggaattgaaaaattacctgattaggaaacaaggacgtagcgtgatactcgtgcataacccagtcggtctttgaaccatctcgattcttaaaaaccaaaacccttttctcaccgatcttctcacgatttcctcttttgcgcatgacagtcattgtttttccagttttcttccaaaacccagagtttgttcttcttctctgttgatcacctctgttatacttcatctccttaacactaaagaaataccaaaccccatctctcgatttgatcatcgacttggctgtgaaaaaagagggagaggaaatcagagcaaatgatttcgaattcgatacaacagtttgggaaaaaataactcgacttacaaggtaaatcccaaggctcgaagctacagatatcgactgtgctaatgacttcatcgacatggctagtgtcactatcgagattttttggccggaggtaatggtcgacgatctcctcgtcgtttggacggaatctgaaacccaccggattcatcattgtccgagagcgactaaagtttcagataaaagacaaaattggtgagaaaaagtcaaaatatgtagcagagaggtttcgccattaacgatgctctgcaagttatgtgtgagtttttttgtttttaggaggaagacgaagtgtgtgtttataattttttataaaaaggctgtgacgggagtaagtgacgtcaactatgaccagatgatgggacccactaagtggatgacgtcatgtatgatgaaagcaggacacatcacaccaagttcacatggcggcggctggcacttatcctaatgaccccaccatgatttttccaatccccacacacttgttttatttgtttacactttctgacaaattctctaaatactctttttcattccgttttattttaccggattaatgacattttcacattccgatttagtataatttttaacacgttttatagtaaatacatagtaaaatcactttttttaaaagtcggtaacgtggaaaataataaaacaactggtaaagaaagataaaatttatcaaattgaatgatgacgaccgttaagacgttcaaataaaataaaagttatgattagtctaatggcgggttttgggcttaaacatctaacatgacaagatattcgcgtggcacacatctataaaagtccaaaagagactcgtgacattgctagaattaagattaaagcatctttgatttgatgatactgttattttattttgttgaacgaaatcttttgtggggttaagtaggactagctgactagatgagtagaggttgattgctacgaaaaattgtctattttgttaggttgattgctacagcttttgatatccatattgtatctctagttttcttccattaaaaaggagggaaaatccgaatatttttcggggattctaaaataaaacaaaacaatacataattatgggagttattatgtcacgttactaccaaaaaaaaaaaaaagatgtggtttgaccattttgttagttgaatcaaatgaagtgatacatctttctttcctctaaccacatcttatcacaaattcaccattatattttaatatatctcagggcacacatacaatgtgtaaaagttacaaaaccagatagacacatattacatactactacagattttggaaagtacaaaattgatatcatgttcttaggtgaattttcttgacgaatttttgtatcatcctgtgaaagaaaccagctcttttgttcttgatcgtctcttgacccaatttatgctcaccaatctcagtcccttgtgcatcattatcaataccggttcccggtgttttgctcaccttaaatcacatcatagaacccaaaatgctgtgagtactggcacaaagtagcttggttaattagcagtttagaatggttggtctttaagaaaaggagatgataaagctcacctcttgagctaatgacactaacttgattgagttaggagattcctgcaagtcagtgatttggtatagaggatttgagctaccaaaactaggacaagtgcttaaagtttgaatggaaatctgtcgtattaaacaaaactatagctttgtgagaaaaaactgaaaacagaggagatagtaaaggtaaaataggaaaattttgcttacagttgttgcagaaatcggatcagaatcactaccatcggtgctatgatcactgaagacaccggtcaatggcttttgaggtgtgtggttgttgcgatcatcttgcatagaaacaatcttactctgctcatcgtcatcattaaagaagcctttgaaatcatcactcaaaatattgcagaagtccctatctagtgcatccacatcaagaaagccagaaaactgacttggattctgtgattcttggctgtgaaacaacgatccctgaaaaaaggaacaacgtaacacagatgaaaaaactatgtgtacgagatatgattttgaagatttaaaagagaaacagggaaagtttttgagattgactcacctctgtctctacactcaaaactccagaattgttggtaggagggattaaagagtgagtatgcttaattccactaccagtagcaactgaaaattctctcctttcacccttaaacttaactttgcagagtgtgtatgtcattatctacagatcaactcagcataaatgattaccataaactcagatttttcccgtttacgagaaataaaatcacggtaagaaaacaacaacaacaagttaaagaagcctaaacaagagaatcgaaaaatgacctgattaggagacgagaacgtagcgtgatactcatgcatagcccaatcggacttggaaccaccgtgattcttaaacaccaaaacccttttctcaccgatcttctcacgatctcccgttttgcgcattatatccatggtaacgccagttttcttccaaaaaccagacttggtttttcttatctgtcgatcacctttaccatatttgttctccttacggccgaagaaataccaaacctgatctcttgttttcatcctagaatgggctgggaaagacagaacatgatcagaaattaccgggatgatacaacagttgggaaccaaagaaaaacaaacactcgcgttagaaagacttacaaggtaagtcccaagggtcgaagctacaaatatcaactgtgctaatgacttcatcgacatggctcgtgttactttcgagatttttcggtcggaggtaaatgtcgacgatctccccgtcagtcggacggaatctaaaacccaccggattcgccatttttcaacagctacaaaaaggttcagatcaaaactaagagagggaaagatatcaaaatatgaagtagagagctttctctatggtcgctcttcgcccgctcgtctacaagtttatatcataagagcaagtccaacaaagggatttaaagcatatcttaactgttgagaaccaaatttaaaaaactaccgctggtcatgctctaagcaggcaagatgggtttgtgcgcttatataaggcacaataaaggagatcctaaaaaaaaaaaaaaaaaaaaaaattgagatccttggtagatttcgtcaactattttacggacaggttttggaccccataatgcagatgttgggtcacataatttctttcctaccagatcatcttcttgataccctacccacttaagtcaaagtgcgcttagtcatgtgatgtgacagttactcctaacgttaacgtcaatggttaatttatcttgaagcttatataagatcacaaaaagtaaaccacattgaaatttgtatataggaaacttcgtagaagtcgtaaataaaaagaaccagccacaaatataaggatttgccgagtatggaacatagcatacaatacaatgtgaatattaaattacaaaagacaaaaaaaaagaggggcgcttacatatacattcataaattcctcagctctacatacacacatctgcggagtagaagaaccacttcaacttgaaaaatgctataccattttcttacttatatagggtgtgactgataaaaaatggacgaaatgagatgaaaaataaacgaagaaaagtgaagaaaagaaaaagcaaaaagcagaagaattttctctctcatgtatttgaagtgggatgaattcttccttttcacgttgctttttgaagaattgggaagaaacaaaaccaattactttttattgctttttgaagaattgggaagaaacaaaaccaattactttttatctgactggttacatttaagtacaacacagaagaattctttttcttctcactatttttcttctatagaagactaccagtcagacccatagttgtgatactgtttgtttttcaatgatgcaaatatggatattataactattattaaattacataagtgtggaaataaaacctagctataaacactggttcttgaaaaaagaaagcatatatgcagagtgagctatgatttacttgataaggaagagaccaatcgcagtgacgatgagtgttgaaggcaaaccgaatttgaaatgtttagtgaaagtgagagtgtatccatggctcactgctctacgagcttgctcacacactatcaggtttgctgctgaaccaagcaacgtcaagtttccagccactgtgctcacccacgccagcaacaaccacgccttcttctcctcctccctccccatcgctgatgccgccactcttgctcccaacaaaagcactacaaacgattaaaaaaaaaagaaaaaataatcattcgcatggtcttgtggttccttttgaatcaagaaattgttcgtggagccaaccatacatgtttggctttaaaaataatgacattaccggttggtacattagaggctacattggagaggacaagaatcacaactgctagaaccgcgattcctttggcttgatcaattttggcatatggctccattaggtcccatagagcggtagggataccagttttgttgaatccatcaacggttatgaacatcccgcagaaaaagatcaaaagcgaatacgatacctgcaaaagttacaactttgataagatctttgaattgtatctctaaagagtttaagaaaatttggttttcaccttctcgagagacggccttgcgtctttgaaatcaagaaccacgagtgctagagccgcggtaattgcggtccacgacatgtttaaacccataagcagagatattagcattcctaatgtgatgaaataaacacttgatttccataaaactcttctccatctcttggtctggaacatattgttggtattattgctctctccttgagactctgcgtcgttgtgttgttctctcgacgcatttgaattgcagcttattaactcgctctcacccgctgaacccgctctgtttctgagagtctcggcggcatccattctcaagttcgaatcttcggatgagactggcgaaaatgtagctggcgagaacctatgagattggacatcttcttgggcaacaacttcagaatcagcattttgtacttcttcttcatcctctttatgatctgacaataaccgccaatacataccgagaagaagcatagcgttaacggtaataccaacaatcatcgcaggaaaaacaccaagaagaaactcccaaaacgggatcttgctttgaaccgcaataacaagattctgcggattcccaatgggagtagcagaagaaccaatattcgcactcgtggctaaagcgagcaaaaacgggtgaggcgggagattcttttgcctagcgatcttcaacacaaactcggttaaaaccacacaagatgtatcgttagtaaacagagcgcttgaaacagcggaaacaagacagactctacatagcaagtctttcggacctctgcttttccacgaaagcaatgtgcctaagtacttgaacatatcagctctctcaaggtatatactaacaaccatcgttccaaagagaagaccgagtatcgggagatcaatggctgcataagcttgttccggggttatcacttggaagataaccattagcattgcaccgaacagagaaccggcggttcgaccaattggtaggaatggtacagagggaaacactgctaatatccagaaaatggcaaaggcaactgaacctaagaccagctttattactggagccattgccattttcttgcaaatatttcttgaaagctctctgatcaatgatcgaaaagcatggactttgtaaaccctagttggtgattttgatgaatcaaatatctgattagaaaccctaagatctctgataaacttgaggacgttgaccgattcccaatagaagaatcgtcctgttgaaaaaacaagaaaagggcaatcagttacgaattcagaacgacaagtattggataatcaaacaaacttgaccagtttcatggttaaacatacagtttcttaaggaggaatcgaaggcaaatgagtgacaaaaattgaagcaactacatagataacactcagagtaagcgaggactcatctttattatattgtcccgagtccccacgacgaacttcaccaaaccaaaaaagtcagcccttttccaattttctttagtttccaaaaagtgaagacaagataccgagaagaagtctctctgttgtgttcgctgtttcagatctttcttcttcccctttttcaattttcatgaaattaacaatttgacctgccacgtcctttagattaattaaagtgttttcttttacataacagccaaaattgaagtgttataacgagtcaacaaatcctacacgatactgtattttaaaaataattaaaatttaacttcatcttattggcttaacattttaaatttatcacttttactccactaaaatttgattcatgaaaataaataaaaaatctttaaacagacaaaactatacagcacactccataaggttcgtaaagatgtctcattgcaaatctcaatctcattgcttctttacatttacaagagccgtaattaaacaaaatttagctacaaagcattttgactggagagaattgtacggtgagacaagcatgatcggatatattgtaattctccggccacaatcctttctctgcttcttgtggaaacaaaattgctttattcactttcaatccgattgcttcatcttctccttcttctttcttactctccatcacactctctttgcagtttccaggttgatttaccatcgtcatgttccaaattttctgacattacataacacaacacatcagagtcttgattgacgttttaaacaaagctaccggtttgtgatttctgttatgtaccaattggtttagttttatttaccttaagttcttcatagtcgaagacaccatttccatcaagatcagctcggacccatagctcttttgtctcttcgaagctaagtccatgtggaatacccgttagatttacctaccacacaatatcaaattttgttgtcagcataaaagtccattcgtctttgaaagaatttgtaaaaatctggaagaacttatttgatccttattctactgttatgataagtgaaatctctagatgatcacaaagttttttcagaagtgtcaaattccaattagaatgtgcaaatctaagatttttttatcagcatttgtggaaaattgaggtctactttttcctgaagagaatgtatttaccttttgaagtgctaggcaaaagtcagagtaggttagtgaatcactgtgattttttgccccaagaaaagtaaaggcatcgtcctcggctatggaagctttgtgtagttgatactggaagaaaccatcaagagaaatcagaaatagacaaaatgaacatgaaaatatcgtttaggaaaaagtaaatttggaaagaatgagacaagacatggtaagtatgatgtgactttaacattttgtaaaggtatagtgcttaatatcttagttttccgaatatctcaccttgataatgctgaaaacagcttccacccaacttgttctcaatggttttcttgaatcactagggttacagagccatatgaaatcaactccgcaaatatttcccctgtggtttctgtggctaacccactgaagaaataaatggaagaatgacggataaggatgtgtcttttacaatatgaggcgttttaaataacagaaggctggaggaagtttttttgaagagatgtttaccctatgagcatcactgtcggtatactgatgagcatcatcgtatgatgaaataaacccttgagatctcaaaaatttgtagacatgcccgcgtttgcttccattccagtcactgcaataagcataattcaaaagtctgtgattacattgaactggcggatggacacaatatcaagactcaaagactagaagctaacccgcagagaataatgggcatgtgattaagtttattttccttttggtaagcttccagatattcaagaattttgtaaacctgtgaaaagaagcaatcaaattaaactatcacaagattcaaggtgaacggtctcaaaatgcaaaatgatggaaaggatgaccaacctgatgcagtcttacaatagacaaactagaatcgtgaggaaacaagaggtgagtgttcactataataacttcttgttgaacgtcttgctttccattaagcggaaagggaataactgttttgacatgtaagagctgagcaacacggtctccaaaatcgttaaagagcagctcccggtaatttacaactttaaaatggtccttatgaatggctgttaaaagacctgtaagaaagatattcaagtccacaaatgagacatcaaaagcgaagaagcctatctttcatcgcatgcgatcagctagaggagtccaaacatatagcattgactttgaattttagacaatatttctactccatccataagattgccttttaatacggcatcctactaacaacgacgttaagatcatataaacaccaacaagaacactttgacaccagaaagatcctgaactaccagtttccaagtcatgaaaaggtatagatttggacaaccctacactatttactgaagcatatcaagcagtaacattgagcctcttaactttctaatgactctggacagagaccatattcaatcaaaaacatgataaaaaataaagaatcttaccatcaccacgactgtttgttctagccaactgataaatagtgtagcctgaagatgaaagctggtggtggtacatgttcactaattcctcattcccaacccaaacttcctacgaacagtcacaattgctaagagtcagcttaacaaaaaaaaaaaaaagtcaaaatttgactctttctaagagacaaagtgtgtacctggagacagataactgaagagcgttgatggagtaacaaatctaaaatcctctggttacgagctaaccaaagcgtgcggaaatcgctctctcgagtgctatgattctgttaataacacccaacacaatcaaccaatgtcgtcgattccagaatcaacaaggtaaagagtgaagaaatcagaagaatagaagcaaaccttttgatcaacgcgtttataaatcggagccaagatattgaaagtggtacaagaaatattcgattccaccattgaagaagctaagttggagttgagtctctgcacaaacaaacaaacacaatcggcgaatcaaatctcagaacaaacaaaaaaaagaaggaaagtggaggaagagcgacgacgaaccataactgaaagcggcttgttgtttctgccggagagtagaccggaaaagtagatcggaagaggaacagcagcgaggacgacgaagagggagagtggtgaagagaaggaagggatgaatctagaccgtagaatcaagctcagcctgcttcgattctgatggctttgcatttgagtttttctttcgaattctctcaacagatcttttttctcatcttataatgaatttctatcggatttattctttttggcagtacttgattattattattattattattttattcataagttaaaaaaaaatatgaaccgttggtttcgtaaatatctaatttcagtgaaataaagacaatgtaatttcttcataattgcaatgaaataaagaaaaattagtctattgaccaatggtagattttggtatttttgttttggccattcatggaagtttacaacgatcataacgttttaaatcgtacttgtattttttgtagatttatgagaaaaggtaagtacaataaagagtaattgcagggaagaagagggatattaatgattggagaaggagaaccgcgtatcaggctgggctatgtcggtttctcatgacacggtcttgttgtatcacaccgattatatattatcgttttacagcaatgtttatatcatgcctacaaaatatagggattcaaattgcttaaccacgttgtattcttcttcttcttcttgtccaactttttctacgaaattatagcaaatcaaattcatgctatttattgaacgcaaatgtttaattttcagacaaatcagattcttacttttgctgttcaaaccccaaaattcaatgaagaaattttataatattcatcagatactgagcggattttaagcaaaaaaccaagagaagtgatagatactgagcgagtttgatatgaagattatcttggccggaggttgattatcgtctttccaacgaagcaactgcaacaccattatatggatatttggtgtctcgtcatcagagtcgtgccaatgaattttgatgctataaacaaaaaaatatagtttaatattttaataaataatgtaaacataacaaaaaaattatttattaaaatatacacataacaaagaagacggaaagctcctctctcacaagccaggctatctcgccacctgctatacctttgaatatttcaaaggtcttttttgagaagtatttcaaaggtccgtcttcttgacactaccggcgacaagagacatttttacaacgaaagagttcgataatagaaaggttagtaaaaaaataaaaatattctttgtcgtaattatttcaaaggtcatttttgagaagtcaataaaactatgttttgttttgttaacaacatgcattataccgtttgattgataacataataacgacactagcacattttactagtttacacattataatcaacctaatcgtttttggtcatatttttgttctaaatgatttatgttttgcttaaaatttgcttaatttattattaaactttaaatattaattattttttttgttatgtttataatatttattaaaatattaaatcatattttcgcgtatggtatcaaatttttttggcacgttctgtttggatgttatgtcacaaaaattaaaaatttagtacttacaaaaaaaacaaaacatggttgaaaaaatctttcaatcaattactaaaaaaaaaagtaaatgaagaaagcaatacctcatgcagcagcttgtgatatgatccaaaaacaaatcgggacagctaaaggtcttggctggtacaagcaaaaactcggtctccttgagcccatccagcttctttcaggtactacaacatattaaaaagattgcacatgtcaaaatgactattaccatatccaaatttcgattgtttcctactttccttttatcttcaacagttgtttcctttttcttatttgagaacgttcgagaaatctggaccgtctattttcatcatattgcaactgtgagatctgatggtgattatctaatctaaacggtaagtttgttagattatgtgggaccgggacgatctatttcttaaacctctgttacaaacaaacactcatgtctattagtattaggaaataagagatggatatgatgatgattccgaaccaattctcaataaactgtttataatggaacagaagcagcagtgattgatgatctaacagacattgacatcaggctaccaatgctagtcttcctgtgggagatagaagcggccttggttatgccgagttttctgttgatctgtgtttatgtaatcacccgaggatgcaaacaattaatcccatcagctaaaagacttgtttgattcaaaacagactttagcagatcatttgtttttcttatctacagaacataatatattctttttttggtgatattatgattgggaaacatccatttcatttaaccagaaagcatggcaatcttttctttgaacaaatctccataaattacagacaaagataaagccggaaacaagaaaatgttgcagataaaatctaacaaaagaaagaacaatcgaaaaactcttcttctccttgtaatttgctcacaacaaaacctcttcttcagagcctcttaaagtggctttccacttgtcttgatatcatttctgattgctccttgaatcatcttaacgatcaaatactgcaaagtagaagaaaggatttcacttgtttaccaaattcgaacaagacaataaatcaaactgtgtctctttcttacctgagcgcctatgataagagggatgagtttctttcctttatcatcagagtaagatccatctaccatcttcttgtctacatgaattgctttcctctggtttgttgctacatcagttatcgccttaaccaagttcgggatccacgcttcaccatttggaagagcctgaaccgagagcaggtaagcaacttttaacagtcagtctctctccaagtcggatcaaatcagagattcgaaaacacaaaccttttcgtccttatcgttcttgctgcatcttccgctgttctctgcatagactaccgcgattgcagaatcctacaagccagtaaagaatgaaactgattcttgctacaatgaaccaaacatacattggtataacaattttcggagacaggtatatgtataaataaccatacctcaaactcttgttttcgcatcttagaaccagcccggatagttttgaggagagaatctgatctcttggaggaaaaagtttcgtaggaaagttcatcgggaggggaaaattgagcatgagtcagaacaagcaaggttttgcaccatatctcttttccaaaggtttgggtgattgctataacaacttgcttatctagctcatcgactctatacacatccaaacgatcaacatagagcaagacatctattgttctgttcacaagaaacctgtccaaaatccgagaaacacaacaactatcgtaaaacttccacacacactccaatatacagcttcagcgtaaaccagatactcataattcacaatttcaacagaaacccacaagtaaacatgttaaccacatatatacttagcttaattaattcaaaaacgaatgagataatcctatatgcaacaatcaacgaagagatattccaaaagagtagctactgaccctttgattaactcgagagcttggtgattgacatatccagcttccacaagtccaggggtgtcaataatgttgatagtgaaccctcccattgttcttgaaaccatcactggtctcaatccttcagcctacaaaatcaacaaaacagagccatcaaatatcttgaaatgactactctttcttaatccaaattaaaaaaatcaagcttagggaaactgaattacgtacttggaaaggactgacacggacgacttgttcgccgataagagaattgacagtggatgattttccgacaccgcctttacccagaacaagaactgtcattgagttcatatcctgcaattacaaaaacctcccatcattatctcctaatcacaacggagaatccgagaaaccgacttaagcaccaaagaaacaggaacaacaacaacaaaacacaccttttgcttcaattttccgaagaattcaatcagcttttcctgggtagctgctggaaattgctgaaacccaacccattcacgaacgagagaccccatcactcctaaacccttcagcaaaaaaattcttttggtaaataatcgctgagtgatgacgatgatgataattaatttcgaaagcgataacgttttgggagatttggaggagcttaccgttgtgtgaggagcgtttgaggtttttggaagaagctctctcgatgtgttccgcagagaaaagctaaagaatgtgaccttatcggtaatttgtttaatagttcaaattattttcacttttactcctctatttctttagtgtttctttttagtgccttcaaattttgaaaactaacaaactcaaccccaaaccaaatccagttaccaagttgcagcattacacttcatattttcatggaagactacattaggtggaacattgaattagcatagcgtcacgggagctcaagcgattctctgaacctttcttcgcttgtaagtcaaggaaaacaaatggtcactattggcttctcgagcatgattgtcttcgctcaggacccccagcggttttctcagagccttggcttccctctgaaagttattactagacgaaatcctcttgctctctgttgtttcagagcctctgtcaacagtcctaggcttaaaaccaggagacttcaggtggtaccggacatattcttcttgctttagaggtatattctgttctgtgatggagtaatttgaaacacggagagcactgggaacagtgtgtgttggatcatgaaacaccggttctgtaccttggattgatctttgtgtagtttccaaataggttaagaaagggtctgggatagaacagccaagagttccgtagggtggtttctcaaatgtcgtacctaagtatggagacgctgcaaatctagtactctttgaaccggtttcatggatttgcaggagattgtttcctggagctacatagggtttcctgaggatggcagaagaagatttagggactaatttgagaacaccctttggcaaagtctgatgatgatggccagcagaaactaagctggaaccttgataccggaatactccttccttggttatctttatcttgagactgttcttggagctgccactgcgagggaaggttaaacttttcgatctatttctttccacgggtttcactacattgggagttttgaatctacatgtagcactatccatttccttagatggaactctattgaggtccagtagcttgagattaccggtttgagttcgtcctgaccaaatgaggagccttgagtaattgcccaatttatttccatactgaacccacaccctttgcatttcggtaaatgtcctgatcagcttttcatgatagaactttaaagagtagtaatactttctcctcttgacaaacataacaccttctttgaaacaagctacctttggagtaaacaatccacctagcaaattcttgtaaaacttatcctctggattcccaaaatataaattggcaccatcaagaagttcctgcatcgtcaaactgaaagtctgtggatccatatctggcagaaaacatgagaggaagaatctttcttcttcagtcagaagtgagttccaagtctcaacagacaatattcccgttaaatctggtagatcgtagagctcgtatggtatgttacagagctgaccttcaaccaaagctagctcacagtttacttgcgcaatgtcgtaatcatcagagtcatcatcttcagagtctagcccaactgtttgattcttattcatctgtagttaaccacttactacccttaaaacacaagtacttcaaatctccaaccacaaactcagtagaaaggaacacaagcaggagatacctagatagaaaatgttaaagactcatcatcagcaattcacattacaagaattctactacaatacaatggacagcgagaagctgagtatgttactaatcagaaatcaaacgaacataaatagcattttactcactgatttcagcaacaacaacactaaaggctatataaaacacgaaatatacattgtgagatcaatgaagcactcaaaaagaagaagatacacaacaccagaaaatctcccagatcggatcagctacaaagcttaaacgtaatcgatcgcgaactcaatcaataaccaaaatcaaaagctccaacaaggcaaataactagagagcgaaaacccttggatttgacaacaaaaatgtgcagacaatttgaataaaaaacaagtatcatacaaatctcagcacaaatcagctccaatgagtttcaaaaacctaccggaactaataaaaaaaaagaatctcgagatattcagagaaatcgatcggaaagcgtaaaagacgaggagcttaccggctctaaagacaggtgaaattagcagattagggtcgaagaaaccatatccctttggctacagatacgaacttcatcgccttcaaagattctctgcttcctttctagagatttctatggcttttcgatcgatgcgacagtagagtagagactagagagactaattactgttacacttgtattttgatttctttaattaaagccgcctaaagtaactaatgccttgattactttaattaataatcatttttaaattgtgatttataatcaagttagacattacttcacaaatagtttgggcctggaaacgtataggcccatgtaaactttaataaaagaatcaccttgcaggtaagtataatatcctgatattattatttacttgatagaatgggcctataataaaagaaatcaccattaaagaattataggcccatgatatcaagtaaatatcaagaaatgatgattaatgatcaagttagacatcattacttgatattttggtaagtaggatcaatcaacggtcaggatccttttagtaaaatcatgtgtcattttcagtttgtctaaaagataagcctttcactttctctctctgtcttattagaaaagaaaatttgtaccgtttccaaagtctgagccaatcattgtgttgattctggaattctttgtgggaacgagaaatttgtacaagggagattcatcatggctgatagttgttgtatcagacttcacttattagcctctgttttcttgctcttattttcatccttcaacttgcaggtactttaaactttcgtaatctgtgtgttaaaattgcttactaagatcgatttgttggactcttgagctacaagttaaaaaaaaacaaaataaatcaaactttgtgatttttttctctgcgtatcaatctaagacatatgaaggggaaatgtatatatggttttttgtaattgtttctatatcagtaaagttttaaacttttgaagctggtttatctcttaatctcagggtattgcagcggaaaatctttccaagcagaaactgacctcactgattcttcaggttttgatcttaatccacacaattatctgtattgttttcgtctcttttagattgcctaaacgttgatgatcaacttttgcagaatgagattgtaaaggaagtcaatgagaatccaaacgctggttggaaagctgctttcaatgatcggtttgcaaatgccaccgtgagtttattatcacctccatgctcttatctctttaagagctacgttacttatcattgttcctgaaagtttgtgtttttgtgtatgtatgtgcaggttgcagagtttaagcgactcctcggtgttatacaaacaccaaagacggcatacttaggtgtacctattgtaagacatgatttatcgttgaagcttcctaaagaatttgatgctagaaccgcttggtcacattgcaccagtattcgaaggatcttaggtcggttttaatctcttagcttccactatctctgtcattaacccaatgatttactgactcttcttatgttttgtttcaaattatctccctctttattgcactaaagatcaggtgaaacatcatttcatttgagtgggttatatattgaacaatgtgttactctggtcgacgataactttatggttttggtttcttttgggtcattgtggttcttgctgggcatttggtgctgttgaatcactgtccgacaggttctgcatcaaatataacttggtaacacaactttctccatcaagccaagattgacgattgctacagctttttaatgtaattgctcttcttcccttgcagaatgtttccttatctgccaatgatgtcatagcatgttgtggattactttgcggttttggttgtaatggtggtttcccaatgggtgcatggttgtactttaagtaccacggtgtagtaacccaagaggtaaattctcagcaaagaacaaataataatggcaatgtggtcaaagtgtattgaacttttgtaatgctgttggttcttcagtgtgatccatactttgacaatactggttgctctcacccgggatgtgaacccacttaccctacaccaaaatgtgagaggaaatgtgtaagcagaaaccagctatggggtgaatcaaaacactatggtgtcggcgcatacagaatcaatcctgaccctcaagacattatggctgaggtttacaagaatggacctgtcgaggttgcttttaccgtttacgaggtaatgaaaaagatttttgattgatcaaaccatattgattatatcttggtgaagtccacattttcatgtatctttttgttcttcaggactttgcacattacaaatcaggagtatacaagtacataacgggtactaagattggaggtcatgcagttaagctcattggctggggaacttctgatgacggcgaagattattgggtatgaattctctggattttgattcagatcaagctgaaaaagtaataacattttcttgttcgttgttgcagttgcttgcaaatcaatggaaccgaagctggggtgatgtaagttcttcttttctccaatcaaaacttttaaattagaccttccaagtaaacaaaagcacagaacctgagatagaaaatgtgaaaatctcaggatggttacttcaagatcaggagaggaacgaacgaatgtggcattgaacagagtgttgtagctggtttaccttcagagaagaacgtatttaaaggtattaccacttcagatgatcttctggtttcctcagtctaaacaagacgatgtgtccctacttctgtaatatatcatttgcaactgtgttgtaagtttaatataccattgaaagaatcaccttcaatcaaaacaaaagtatgtatagcttctgttaatattcaattttacatgttaccatgcaagaggactgttacagtgtttatttggttttggtaaattatagccacctaaaagtaacgccttaattaatcattttaaattatgattaacaatcaagtaagtggaacaaatcaacggtcaggatcttatcctcgcagtaatatgatctgtcattctctaactaaaaagataagcctctctctgtctcttcctagaaaagaaaactttgtaccttttccaaagtctaagcaaatcattgtttttgattactggaactcgttgagggattgagaaaaaaataatcagaagagaaagatccatggctgataattgtatcagacttcttcactcagcctctgttttcttctgtttagggcttctaatttcatccttcaacttgttgcaggtacttgaaccttcataatctgtgtttgaaattgcttacgaatatttatgcatgttagtgctttcttctagttacgatctgtttcgtagccttctcgggtttttctgggtttgatcatgtttgcttatttgttggactcttgaagctagaagttttaaaaaaaaaaatcgaaattttctgggtcttaatcgaatcaatgaacgggaaacatatttgtgatatcagaattgtttaaagttttaaacttttgaagctgggttgtctcttaatctcagggtattgcagctgaaaatctttccaagcagaaactgacctcatggattcttcaggttttgatcttaatccacccaattttctgttttgttttcgtctcttttagattgcctaagcgttgatgatcaacttttgcagaatgagattgtaaaggaagtcaatgagaatccaaacgctggatggaaagcttctttcaatgatcggtttgcaaacgccactgtgagtttctgattacctccaccattccttacatatatcctatcaatgcttatcactgttcctgaaaacttgtgtttttgtgaatctatgtgtaggttgcagagtttaagcgccttcttggtgttaaaccaacaccaaagacggaatttttgggtgtgcctattgtaagccatgatatatctttgaagcttccaaaagaatttgatgctagaaccgcttggtcacagtgcaccagtattggaaggatcttaggtcggttttaatcttttagatttccactatctctgtttttttctatccaatgatttactgactcttcttatgttttgtgttaaatcctctccataatcgtctcactaaagatcaggtaacagatcatttacttgagttttatattgcataatgggttctcagacagatataaacattttggttttggtttgtttagggtcactgtggttcttgctgggcctttggtgctgttgaatcactgtctgacagattctgcatcaaatataacatggtaacatagatttcttactgtagccaagattgatgatggctagtgtttttctcttcgaatgattaatattcgtttcttttgttcgtatgcagaatgtttctttatctgtcaatgatcttttagcatgttgtggattcctttgcggtcaaggttgtaatggtggatacccaattgctgcgtggcggtactttaagcaccacggtgtagtcactgaagaggtaaattcactttttaactgcaaagaacatctattaatggcaaagtagttataaaacgtattcttgattctacagtgtgatccatacttcgacaatactggttgctcgcacccgggatgtgaacccgcttaccctacaccaaaatgtgcaaggaaatgtgttagcggaaaccagctttggcgtgaatcaaaacattatggtgttagtgcgtacaaggtcagatctcaccctgatgacattatggcagaagtttacaaaaatggacctgttgaggttgccttcactgtttacgaggtaaatactaggttctagagtgatcaaagatatgattatattatggaactccacatgttcatgtatctttctgttcttctacaggactttgcgcattacaaatctggagtgtacaagcacataacaggtactaacattggaggtcatgctgttaaacttattggctggggaacttctgatgacggtgaagattattgggtatgactccacttttgacgctctggattttgagtttcgatctagccaaaaaattcacaacattttctattcttttgaattgttgcagttgcttgcaaatcaatggaaccgaagctggggtgatgtaagttcttcttctctccaatcaaacttttactttcgaccttccaaagaaaccacagaaccttagatatagaatctgaaaatttcaggatgggtacttcaagatcaggagaggaacaaacgaatgtggcattgaacatggtgttgtagctggtttaccttcagacaggaacgtagttaaaggtattactacttcagatgatcttcttgtttcctcattttaaacaggaatatgtgtctctactctgtaatacataatttcccactgtgttgttgttaccaatgaaataaaacgactttcaacccaaaaagaagtctattgtatataccatttagctttttgttcatattcaatataatgtgttgttgtttccaatgaaagaatcaaaagacattcaactattctacatatcatttagcttttgttcatattcaactatacatgtttcctatttttacattctaatatctactgtttgtatctatactgtttcattctgcactatgtgtgaccaacggtggatacttgaggtttttcagtttactagattggtcggcgataagctgagcagtagtattaggacctgcttgcataaagacctcgtacccatcacctaacagaccagttctattggtcgtaagctgccagaaaacaccaccagtacacgaaccaccagcccttgcactgtcgtagataacatcgtaaactctttggaaaaacttgttccgtttctctaagctaaaaccagggtactttgaagatttcccaaactctgttatcagcaaaggcttcttgatgatattgtcacagtcttcaatatgtgctccgatccatctgtccacaaatgtatcttgttctcctgttcttgagctctgtaatggtagcctgatcttgatttggtacacagagagaatgtgttaaaagacaacaaaccagaaaacccaattttgattcattgaatagagagactgatgacttaccaagaatccgggtagatatggatagtggcgaaatcgatatccggaatttggttattggtgatgaaatctgtaccggttaagacccttccgccgggattgtaaaccgttctttccggtatagattctccgtagaacccttcaagccctatttccagcaaatggtttgagtctatggacttaacataactagccatttccttcacccaatcctgcacacaaaatgacaccgtttaagtatgtatacgtgtgcatgttgtatagtataaatacagaggagagacatagatacctgaagaatattcgaagcagtggaatcattgcagcgaggttcgttgatgagttcccatgagaagatggtagggtcatctttgtacattcgaccagtgattgtgtttttcctcgtcaacacggtctgtttcatggttttgtcaaaccgtcggtttagtttgatttttaagtcggtactagtatacaaaattctatatatgatctaatccttttacgagatatttaatttgggacatttgttcaataataagttaacaaacatttttagattggtacatttgtcatgtttgttgattacttttaattgatcaaaacctaacttttgacatttcaaaaccgtcgtttatctcgcgttaacgtgtacaaatataacctgaatattttgcctttaacgtgtcgtgttacatatgatgatctctagatattaaatttaactgatatttatgtaattaacatgggtttaattttcatattattactaaccttcacgtgattcttgtagaattgcttgacagctgagtttgtgtagaattcatccggttcatctaaaccggcccattccacgtacttttttctccctccatagtcttcgaaattattgactaaactaattatcaatttaatattaaatcgtccagcttcatagacgacaaagtctagcccctgctgtcacaaaactttgtatcagtattagtactcataaaacccaattacaatttgttgttagtttttctatcaatcaattgtgagagtctctttattaggtcaacaaaaattaaaggtgtctagtaccaaattatgcttctaattaatataaatatgattaacaatgtgaaagtctatctatgcttttgtcattttttgcgattatccactttatattagcgtatgaaaaggagtagacgacgatttttttacgagaaaaaaaacaaaaaggtttgaaggtcttatgtcggaagtataatttgaaatttgaatccttcaatttagattcaacaaacaacggtcatccaaagattaatatacatatgatcatgacaataaaaaataacagtcaatatttttctttataattccgtttactagtgaatcaatacaaaataattaagtaaataaacaatgataattttatcaactcagtcagcaaacgatcaattcatgattaaaaatattaagtttgttgtataattgataaaaacatacgaaatggtgatttcagcatgttttgcaacgagccaccaaagttctcaaaatataaaatattaagtatatatgtgtatgtatgtatatgcatgcgtgttaccttgaaaacgtcttcactataggagccaggagagatctgaagaggaatgtaatctccttcgttgaaaccccaaatcctagcgacgttcattcccaccgcggaggcttgccggagcgccgtcgtgacggtagctcttcctttagatgccgtgtcagccgcggtggtcatcatccaataagcattgaagccgtttaagtaaacttgttctccgttcaacacgaactgcgtgccgtttctcccgacaaagcctgtctttacggcgacgcaaatgcggttgtttccgatgagaaacggaagaaagaacaagaaaaacggtaagatgtttaacattgtgatacttttgccgacttgaagaaaagagaatgacacaacatgaaacgttaaggacatttgtgtgtgtggtgttatatatacattacagatgtcttagagcctacgtatttgaaaactattcatttttgtcaccatattgcctacgtttaattgaaaatatgtacacggaacgcgtgaaatttagataaagttttttttaacgtttatctcaaattcacttttgaaattatattcttgggtttaagaaaactctttactttttaaactgatacatattatttaaaggaaatagatattttataatttggcttaaaagcgtttattttttggctaattggcttgaaagcgtaatatttttcatttccccattaaaacggtttcagactgttagatttaaataaattgtaatcttgttgcattaaaggttttaaataaatgattttggcgaatataatattttctagtaagtcattgtaaagttaaaaatagataattttggttttataacatattgatgatacgtaatcgaaataatatgatttttggttgaataaaatgataccaaatgatcacaataattatatatgcttttgaatgtaagcatgacacgcatgtggaatggagctatcatacttaagctagtacatatgtaatgtacgattaatttattttcttaggtcgacgactcaatcatgtaagatgaattattgaatttcatttctcaacagaaataattattgaaatagagaaacttcatatggatttttgtaagctccaattgattcgagagatatcagatgtacttttaactcttcccgggtcccctatgtttggacttttattatttaaatttgtttggcaaataactatgaaatttgcaatgattaaaaattaataatagtttccctatcaaaaaaaaaaaaattaataatagtttggtctaaaccatgtgaaatgagatctaacttgggccattcattcttgttctcaagttttacttcacaatattgggcccttgataaagcccatatacttgatatggtttgactctatggacttacataactagcgctctgggtcttcaatacacctcatttttctttgggtgtttttaggtgaaatacgaaacctaggggttcatttagcaattttcatcataaagggaaaaagacatgtttatattttccaagtatggatcaaaggctctaacagcaacaaatgggaaacaatgtcaagaaactggggacctaatctatctggcaaagccttttacttaccttaatggccaaagtctttccattcaaaatccaaaccagtaatggcaaaatcaagacactactcaatgtcgttccttcgaattggcagtttggttagagctttgagagcaacttaaacttctgaaagcacacttttactatgaactatgtaaacgaagatttgttttcttttaatgaaatgttacagaattccagtacaacataaatctaacatccaaaagagtgttgttacccggtcaaggatgaagtctgcaaacatgtttttacttttatcttcgcattacacggttacgctctctcttgcgaaatcgttccaacatgatttgatcagttgctgcttgtctgcttttccctgaatcagcattattattagtactactgctagtagaaggtttagctgcttcaccgtccgcttgaggtcctcctctatctttgtatagctcaggatgctctgcgttttcaaagtttatatcaatacaagaaccaacacgcacatggactaacaaatggaaaaaagagaaaaaaggattcataaagcaaacctctcctaagcttctcagcataatctttcccgcgttggaagtaatccgcactataactagacgggatactaaactctgactttggccgacccataagtctcctctcttgcaaaagcttcttggcagcttcagtttcttcaatgttcttcagcttgtatctgaatattatccatccaaacaaaaaaaacattaatctctaaaatactcaaatacacatttatcttacatctatgattgagaatgtattcatactcaattgggagttggacttctgctattccggtagtccactgcgtcgagctctcttccgagctacgcttcttgacctgagaaggaaggaaggcttttagtaacaaacaacaatcttaacccctgttaaacatcgacactaaacaacttactttaagatgatcaggtatcttatataactcatcttccactcgcttcaattcgttctcaacctcctctgcatcatcaatatttcttccccgtttcttcgccaattcttgttcaatgtactttaccctaaagaatcaaaacaatcctcaacacttacaaagacaaagacaaagacagctcactctagcttaatctatttaactaccaagcaaactaggttacaatttttgtaaagagagatttgcttacatgttgggatcttcaatcaaaacagcagtctcttgagcaaaagtatcttgcaacacaagctcctctttctctccttcagtttcagttttctccactggtttcacttttccgatgctagattgcgccgtagaagataaagctgggatacctaatttcctctctcgcagcttctgcaaaaacttcacctcctctaacgccaatctgtagatcaaacaaaaatcgaaccttttcaacaacccatcaaataaattgaagaaaatcaaaaccctacagatttgcttttcaatttagagctgaccttcgcttctcttcttcctctgaaattgcggctttgtttacatcattatcttcttcttcctcctcgaagctacgcttcctgaaatttctcttcggcggcatcgcagccagaaactatcggatttttgaaagagctaatgcgacttgagacgacgacgacgataggcttttaggttgatctgaaaacagactctccgtcggctaaaatcacaagcgaaacatttaatatgggccctattagtaagcccattatgtattaaaaaaatatatttaaatgagataatttactaacattttatttagggccatattagttagcccattatacatttttccaggcccacgttagcttcttattcaacttaagaagtgtattaatccatcactggtccaaaagctctaggacgaacacttgatctccaagcaagcaataaaaatcatcaacaagataatcacagtaacacctttttattcaatacagtagtgttaaataaaatctttctaggtaacggttacattatattttcatgtttttattttttttttaaacttttatgaattattttttagtggcaagcctttccttaatcttatcaaccatcttagatcccacttgaaaagtcttagttaacacatcttccggcaaagccggctctgccgcaaatagggttgccgcaacagaagccgttcccggcaactgactattaaatgccgacaaaaccgacgcgggagatttcccattgttcttttgaaaatgcacaagccctcttggaaaaacgaaaacttcaccaatctttatggttttagtgaaaagcttattcgctgttgtgataaatccaacctcaagctctccttctagaacgtagacgacttcggtggcgcgtgggtgagtgtgcggtgggtttaaacctcccggcgcgtagtctatacgtgctaaggagacggagagagtgttgaggcctgggatcttttccacgttggctcctgttacggccgaacccatcgtagagtttatgacggcgggttttgagattccggcgaagaagaagtcggactccgtgatgtttaatgtttccttgcacggaaatccattcagtttggttcctgcgtttcgcacatcgtgccgtttaggttttatatcaagtcaacatagatttaataatggtgtaatattcccacaaaatatctatatattaaaatatctctaatttcaacatattaattttatttttgatttgaaatttagataagatgttcatagagtttgagatgatcctcctgatacatagatattattataacatcacgatagattaaattttcgaacaaaggtaatttctaccgtgagatttatcggcaacgcagagatcttgaagagcgtcgggatcgtatgcacgaattgaagtgatcataatgcaagataacgcaatgataatagaaattcttgaattcatcatggctccaaattaaatatatccgtgaaaagatgaattttatttaactatgagagaagaagctcgaagtttttggtacttatagaatcagagaccagtttgatcgacaagtcatttgcttggcgaaataaaaaaccaaacattttatttgtcttgaccaaactaagaaatgtacgtcatagctaattagtaggtaaaactatgcctttctgacattgtttttcactaaagccaagccttattgagacaaaaggatatgtatttgtaaaataatacgtatataagtgtgcgcctgtgtctgtgcgtgtagaatttttctttttttatatataaatatgaattgtgtctcgagtttcggacgtaatatttcttgtgtgtgtatttacctagctcagaaaacaaaagaaaagagattattactcacaagtcacaactttaaaacagaaaacattttgaattttccacaaaaaaatgaatatatcaactgtggaaaagcgatgtgtaaacacaaaacgcaaatcaataattgatgtgtaagaaagtgattaataattctcgaagtcaagtttcctcatttcttcttttgatcttttctcatacatccggccctatatttggcagagccacatcctaacttctaagtaacatgcagtgtgcagaggtaagttaatgttactttttgtacattaacattatcatagtgtatgacccactggtcctgaatttgagatgctgaagataaagctagttgggatgcatgtaaccaagtgtaaacgtttgagacgcttaagaatcagggaaatcttgttcctacgttcaatgctcttataagcatgtctcaatatattttacaaaatatcagataaatgaaaaaattgttacatgcaagaatttatacaaaaagttttaacttattgattattattaatatacaaaaccacccggaaaaaaaagtatatgacacaaatggttcacacaaactgtcctaatttggaactcttttctctcttaattagtcaacgatcatttcacataaacttttatcgagctacttacttatcatagtcttctcatcgcatgggaagaaaaatccaagaaacttgggaaataaggaaccaaaccgtgaagagactgaggagaagaagctggtgatgatgttgtaagaaatagagattgactagatgaatgtgggaatgaaatattagtaaacggtggtaatggccaatttaacgccggaattagcggcgatggcatcatgtgattcgccggatttaggccgtgagccgaagccattgccgtcagcatgtggttgtgcattccaaatcctaatgtcgccggaagaaaataaggattcacccccactgttgacatcatctgcaattataacatcaactttgattacaacttagtttctgaatataaatagcacatatacatattcgaatgatcaaaatgggtacatagttctataaaatataaaacatttagttggcactaaataatcacatgaaaagagatgaattcgaaatattaaagaaattctatagacttcaccatctaggttatctactgcctactatatatcattccatttttttcgtcactaaacaccaaaaagtggctatatttgtttgatcaatttgaaacccatattgtaaaacaataatccatatctcataagttggcgagtcagatcgaataccaagaacagtttatgtcaactagttaaattaaccaaaaaaaaactcagactattagataaacacttaaaacctcaagcctcaataattcaaatatatggaagaagaacactgaataaagtgtgaaataaaaatagtgaataaagttaaatatagacctgaagttgaagttgaaggtttttcatatactctatggtcttgtcgagaaccgaaaccttgtccgtctgaaaaccgtaaaaaagcaccacccgttatcagaattggaaacttaaggcaagatttcttcatatatgcaacggaagtagcggaaacttatacggaaaagactagacactcaatagttaaattgaaacattatatagaaggatctatatacacaccaaccttgtgacaattaggtacgagttgctgtagcttacgcatcttattactcatcttctcgtctcttcttcttctcttggaaccttttcgagtaactgaaggaacttctcttgtaaactcctccgattcatcctaaattaattaattttatttatagaaagaaaaaattaaaaacagtgaaaaatgataatacataaggtaacatgaaaatatatctatgtatcgacttacatcactacttaagacctggatacgacgttttttggggttctcatgtttgtttctcagataaaatcgatgatctgatctctctgaaaaatctttaatatgatgatgatcatcagtttcagaatgttcatcagggacaacaaccaataaatcctccttcgcattttctacttctttatgaatctctggaacaatctgaagataattatcagtttgatcatgatcaaagtagccgtagccccattttagaccgttgattagacgatcttcatcacttcttgctctttctgacatcatgccctgatctttcacagcaagtgatccgacgtcgtttctccatcccaattccatgaaagcttgattattcgacctgccaagaaaaaagtagtaaactattagggtttacgatacaaatcattgataaattattaaagaaataaataaagagaataacaaggcaagaaacctaaactctgaaacctcctgtttaattatacttacatgttagttaaagagatatcggagatgaaaagtttggagaagtgttttttctttagggatttcagctttgtccgagaaaatggtatcccatacgcttatgttataagagcgatcggatcagatagatggtatagttgtcagctacattggtgacccacttatattgtgccacgtttcaaagtatgtgtggttcgtttgttgcgtacaccgacaacaataaaacaattcggctagattctaacatacagctacacgaggttattatagacatattgatgtcatttgagttctttggaaacaatacttttttggattcacaacaaacattgtaatgaaaatattgttttactaaaataattaatacagtaattaaattagtttttattttggaaaagtattgtcaaataattccattatcacaaattcacaatgtacttaaatggattattattctgcttattgtttttatgattctatacgtaattgtcccaaaactacgtcatagtagcatatatcgactttagagtaatcttgaaattttgcacagaaagataaaagtaatcttgattaatcaataacgtcactagattcactaccactttgacacatgaacatagagataaatttatctttgtacgtatagaatgtattcatttatatattgagatttgagagacagtttaatagtatttcttaaccaagaactgtaatgcacaacgggtagggccatttttatccgtttaattatttttcccgtaatcttatcgtttatcattgaatactcgtcattaagctttatctttatatatatataaaacaatgtaaaatatcggatgtctatttgtttatttttggtcagatcatctctaaatataaaaacaaaaagatgacgtctccgtttggaaaaaaaaaggttgactaccacaagtttcataatataatcgacaaaaaaatatcgtctgtaacaacgataagattattcgatctcccaattggtaaattcgttattatgaaaggcttacaaaattcagtaaccagcaatcataataatttcagagttatgatactagagttcacttttttgtgcaataatataatggtcgattatttccagcctgagaatgcatttcatttcatgaccatttatggattcctgaaaaaagaattcatttagggttttatccaaaatcccacgtgggttgtgggctctaaaccaatcctataacgaatcagttttttttgttttctgtaaccccacgacacatttattggaattttagagtcacgtcatcatcaaccatacaccgagcaggtgcgatggtccacattattactatctttgataaaaaaggtccacactattttccttaattaaaaaaaactccaataattacaacatattctgaataaacaaaaatgacctggttactaaatatcaacaatcaaaaaaaaaaaaaaacagtatcaaattctaatttcgaattagtagaacaaaaatactaattattattattcaattgactaatgaatgttaactttgtagcgttgaatcaaatgggcctgaaaaaaatcgaaaaagagagagagagaggaagaagaaaaggcgtgttcacgtgatgccctcgtgatggacatggtgctatgtctgacacttgggtactttatattttgttggtgtcttagcgagcgacgaagcaaaaccacagccactacataggtttccaatctccttcacgacaacgacctctcggaatatacgttccaatctacaacttcccactgttcaatctatttgatattatggaaaaactttgcattattgattcttattttaatatttttctcttgttcccaccgttttggttggaatcatatactatacgaagtactatttgtgtatctagtggttgattgacgatttttatttttgttgtacattaaatgcagcatctatgatctatctatcttcttctttttttgccaaatagaacgttatctttactgggcttttaggttagcccatgtaatgttattaacccaaatatgaatttattaagggcccatcaatgaggagtgaaacatgttagacaaaactgagaacaggcctctacttcttcttttcgtagcgatcgccatggaaatatcaaatgtctcttctccgtccggcggtgtcgcagccatttctctcataattcttctccgtcctcggttacttgcttatgattctactaatctctgttgtttccggttgatcaatcgtcgatcttctaaactcgaaggcggaggaggtattaccgtgacggcggattgactgatcctcagcggagtatgtatcttgacacgcgaggaaaaatgtttttttttttcccttttcctattgtggtttcgatcgaattcgcttaattcgattttgttacatgaagcgttaaattgagccaatgtatatgatttcgaaagcaaaaattagttatctacagaacaaattgtcttgtatctgatagtttagtggtttgaaattcactaaaagagttttagtagaatgctctgtcttggtttagtggatttaagccttgtcgttgtttgcaagtttactagaagagttttggtagaagctctgtttttggtttagtggatttacatttgtcgttgtgtgcgtaattcaggtagatattgtttcccattcccaggtttgtgttgtggaatgggaaactgaggccgcttctgtcaaagccaaagggcccaaacagttggttctttcaggaaaggaatcacaatgttgccagaggcaatctctgcaaggtattgtattatatgctaatgaatctgttttctttcacccttttcaatgagaacagtgcaaaaatcattatctttttttttatttgggcaggttgagttgcaacttgcaaagttaaggaagctctcaagtattactaagatggatagcagaggatacaactcgacttatgaaactctgaggggatattctctgtacagagcaaaagtgtagcgatgactgctccatctcatgttgctaacagtctttttcccccaattttctgttaagtttttggatttgtgaaaccagttgtgtgcaaattcaagtagatacgtttgggatcttatgttttgtcgccaaaattcccatatacaagcttgtcgattgaatatgcatacttaaactatcttaattcttaaatcatgttggatttgtagactttcccaatgatgagtgacttgatgataaagttgctgaagctgtggtctttcatcatctggtcatgattgatggatattctttggtggcaaatatgttgctgctggtgtcgcattgggtcggtgtgtggaaggggcttacccaagccaatgatttcatttataggtccgcttacaagtaagaaaattattaaacgaaaaccaattagatactaagattgcagattagactttgacaagacataagtatgtgaaggttcccattaatatcctcataagtgattttacaacttgtggccaaaagagcaaaaattacacaaagcgggagaaagatagtttaagtctagaacaaatcgatcataactcttgaatcttgcggatcttcgtgaagaggtgagatcttgaaactgtcgggtcttggagatttctgttgatgcgtgtaatggaaagatggagaagaagaagatggtgtaagaattatggaggaagaagaagggaattcagagattgtagggtgaaggatttgtgtgagtagaagaacaattgacgccattgatgatcaacttcgaaaaagctttgtatatttagggttttggtgtagattttgttttctcatgtgattcttatctgccttttatatatagagagagaaaaagtgggcctgtggtattgtggatcgatgttgtgtgttttagaatccagtgggactcttaaatctttgggtagcaggcagcaagtggtttttgtctgacttttgtgtcgcatttatatctcgcccccaaaaccagctgttccacctggcttaggattcttcttctctgcttaattttggtattaacaaacataaaccataaaatttaatattcaaaatattaattttacttgaaatacgatctacaaagacattaaattttatggagattcatgtattaatttttcgtatgcttattattagaaagcaaaaaccatagtagtaacatattctttcatgcaataaagggtggccaacatagtggttctttgttgaaaatgagataaaataaaaacatcaagaaataccatgggaattaattttaattaggtagtagttgaaatcaaaaccatcaaatcacattaaattgaattacattattgaatataaaccccttttatggctccatgtgtgggcaatgccataaacatacatgttgactttttgtttataaacatacatatttcgggtcaaccaaattaattgtttaagcataaggcctttgattttcacagtccaaattcggcccagttgctactttaaacagcccagtatatctctgaaaaaacccgattcggtcattgacccgtccgtctccaggaatcccacactctaaaccgccatttattatatttgtggttaaaccaaacccgccggtccggttagctgccaaatccgccgccgtaggtcggtattttccgatcatgacgtcatggcacgaaggtttgggactctgtggcgtcatccaaaaccaaagtgctgtttgaaaagctatcactgaattatttgacaccgtttctggattccttagaccgtcgaatcctaaggctcgaccggccggtccgtaattgtagttccttatatcccaaaaagtaaaatgacaattagaaaataatataattacgatgtggaatcttgcatggtatagttttatacaaatcgaaaactataaatgatagaattcaaaatatatatttgaatgaagatacggaccactattagtgaaaatgaacctaccacgatagttgaattggacctcttccttgataagtcttgttagggaaacaaggccactgtgtatcagaagaatcacaataagtgctttgtggactcacttcttctttaaagcataatccccaagcgtacggtccgtctggtgccgttgcccatcctccggtcgtctcgtgtgaaatctgagccaaaaatgcagccacttcgagtcgttgtgtcacggggcttcctacgctcccgaatctcggaaaccgcctcgtcgcttggacaaatgattcgtaagtgtagaaaccatttgcgggacaagcggtattgtccttgtggatgaaaattttgttgtagaggtctcttggcactaatctctcgattgaggtggcttcggtttgggcggaagatagtaaataagagattgagaggaagaagcataagaggagaaaagagtgttgttgagccatttttagagagggatcgatcttgatggttttggtgtaagaagatgagtttgttatatagatgtgtaaatgatcaacgcgttgacttttgactttaacggtggacttttttttcattggtctgaaggttcgtttatacatgctctcatgtgttttcattcatcaaacgatgcttctttcacgttaagtgaaactttttctatagtttttggtataatttttcatatagtttacaccttaattagattagatatcaagacaacaacaaaaagcgaatacgtgaaggggaaaaaaacaacaaaagcaattattttttattgtagagaaaaaaacaaataacggcttttcactaaaatgacattttttttagctgacattacttaatatgaaaccgagatcatacaaaataaaaacaacttatcaatataatcattgaatgatatagatagtgtgtattacgattaaaatgatagtggatgacgatattcttattcggtcgacgtagcagtattaccgaaaaagactgatttcaatttttaatgcttgaagactcattcttgctatggaaaatctcattattttatcttgatggaagactcattcgtattttttattaatgtggtggaatctacacaaaaaattctcgttcggcggctaactaattggtaaagttgtatatacattttattatatgttcctatttcagagccgaaacaaattacaacactttaagttgtgcaaaagttgacaaaaatgttttttgacaataaactcgtttctttttctgatttctcatccaaaaataaaaactaaatttcggttccttactatcatatcaactaagtcttccgtttttatgtgttttaggtccattccaaatacatgattaaacttttttaaaaaatcacaatctctatgaaactttttaaattcttctttttaataagttgtatcaacaatgtacagaaaaaatcagaaaattagtataaaatttaaccttttaccaaaaaaaaaaaaatcacaatctctatgaaacaaatctcatctttcgaagaagataatgttacaaaagacattcaaacagaaatatttgtaatccttctaaaaaactgacattcattgtaatttcttattactgtggatttattcatattctgtcgattagtgactagtgtttacataattatgaaatacgtgactaaaaataatatagttaagagagactacacaaaagtacactaaagtaaaaaaacgacaccaagtcttatgtactgtaaactgcacgccgttttcagctatcttaaacgacataaagttttgccttaaaccctaccatcgtcactcactctgtcctcgataggtttagagaagaaatagattttgatcgatccttacaacaaaaatgaatttccgtaatctgattgcttccggttctcgcctcggcaagaggttctgtgcaacggtatttgctccggcgtcggcgactggcatcgtcgaagcctctgtttcttctccagcggcggcgaatgtcgtcgaagcctctgtttcttctccggcggcggagaatggcgtcagaacctctgttgctgctccgacggtggcttcaaggcagcgagagttgtacaagaaactttctatgcttagtgtgacgggaggaacagtggcagagacgttaaatcagttcatcatggagggtattactgtcagaaaagacgatctctttcgctgtgctaaaacccttcgcaaattccgtcgacctcaacacgcttttgaggtccctcttcatatctcttaagcaagtatctgattttaacattgaaattggagatatttcattatctatggaaaattactcttaaaggggctggctttagatttagggtttagtgatttcactagttttagggtgtaattagggtcatgctcgttgttgaatgaaatttcacttttttcgaatggatagagattaaaaatggcatttttaagtttgttagagtttgattgagtccattgttgatgaaatttcagatctttgattggatggagaagaggaaaatgacattttctgtgtctgatcatgcaatttgtttggatctaattggaaagactaaaggtttagaagcagctgagaactactttaacaacttagatccttctgcaaagaatcatcagtcgacttatggggcgctcatgaactgttactgtgttgaacttgaggaagagaaagcaaaggctcattttgagataatggatgagcttaactttgttaacaattcgttaccgtttaataacatgatgtctatgtacatgcggttgagtcaaccggagaaggtacctgtgttggttgatgcgatgaaacagaggggtatatctccttgtggtgtcacttactctatatggatgcagagctgtggaagtttgaatgacttagatggattagagaagattatagatgagatggggaaagacagtgaagctaaaaccacttggaatactttctctaatctggctgcaatctacactaaagctggtctttacgagaaggcggattctgcactgaaatctatggaggagaaaatgaatcctaacaaccgtgattcccaccattttctcatgagtttgtacgctggaatctcgaaaggtcctgaggtttatagggtttgggaatcgctgaagaaggctcgtcctgaggtcaacaacttgagctatctagtcatgttacaagcgatgagtaaactaggcgacttagatgggattaagaagattttcacagagtgggaatcgaaatgctgggcttacgatatgaggctggctaatatcgcgattaacacgtatttgaaagggaatatgtatgaagaagcagagaagattcttgatggtgccatgaaaaagtctaaaggtcctttctccaaagcgagacagcttctgatgatccatctgttggagaacgataaagcggatttggctatgaagcatttggaagcagcggtttctgattctgcagagaacaaagacgaatggggctggagctcagagctggtcagcttgtttttccttcactttgagaaagctaaagatgttgatggagcggaagatttctgcaagattttgtcgaattggaaacctcttgattctgaaactatgacatttctcataaagacttatgcagcagcagagaagactagtcctgatatgcgagagagattgtctcaacagcagatcgaagtaagcgaggagatccaagacttgcttaaaacagtttgtccctaaactaagtaataaatgtgattagcacgttatgtttaaacttgtgtcccgtttagagtttccagttccagaaaacaaagcttagttctttttttaagtctttgacatatgtgtcggttacatagtggaagatctcataaacaattaagtgtttctttcatacccaagtcatcagcaaaatgtatcactatttttaaaaattgtcaaccaataatatgtttgtttatccaaatccaataaccgactaatttacttgtaaactgtgggtgtggtccatgacccatgttatttgttagtgccaccaactaagttaggaaaatgtttatacaaaaaaaaaaaaaactttatctataagagaacaattactggttaaaaatagctttacaagggaaaattacaatttagtagatctacagtttctttttaactgccgatttcgttttaaattcttatcttttacaattagaaactggataattgataatcaattttatccaattgtgataagcctaaaaatgaaaacaaatctgatttcttttacttttgccaatgaaaagaagagagaaaaaaaagaaaaaaacaatcggcgttagattctgtaacaagctggcacgtctctgtatcagtcgcaacgttcctattttctttctttgtcaatccgttcggcgacagaacaatccaaaaaaacattcttttagctttttctgtttcttctttatatattacacacaaagcctatacaggagataatctcggttacaaaaacagagaagataaaggagaagtctttctctgatttttcaccctgaagaaccctaatttcaggtgagtactactctcaatccatttttttttatattattccagtgccgcatttgctagttctcttccttattacaagttattaatgggttttgacactcgtagcgaaaggtttgaactttatctgcttcgattgaattctctgtaatttatgaggctttgcagagttttgttctttagagtctgtaatctttgtttagcttagggcatttattgtccctgtttgttttgttctgtcttcattgttagaaaatttgggttatggaatcgaatgcgcgagtttttgagtatagtgatttcaaaattcgcattcagttttcgtgaaaattataaaggtatataagtcactgattttggtagttaagcaaaatcagttttcatggttactttgtattcttagttagtgttttaaggtgaaccagaattagcattcttctgtgtcaatttactcttgtgtgttataaggatgattggtatcctaatctctcctatcatttgtttctcatgttctaggaagttgcgagtttcgaaagtcaaaaagcggtttatccaggggaagtaaagggttttaagcagataagagtttgagaaggagaaacttagtgtataggatggatcaaatgttatcaggagaacaagatcttgaagtagatattgaagctggtcgatctgacgttacacaagaatccacatcagatactgtttcaggcaatggggtctggagtgaacgggcgaatttcggtgtctctgaaaagattgctgatgatctgagctatccattgataagagacgaaaaccgagtagaaactagcagtcagagtttggatctttcagagaaaaaatgcggtaatggaaagtttaagaagtcgagaaaagcttcaaagcctccaagacctccaaaaggcccttccttgagtgagaatgaccgtaagatcatgagggacatacaagagctcgctatgagaaagcgtgcaaggattgaaaggatgaaaaagtccttaaaaaggttgaaagcagccaagacgtcaccatcatctccatgcattaccattttctccatgataataacggctatattcttcgcctttctagtcttccaaggtacctttttacttattcccttttcaactcttaatgaaaaccaaaaaatgctactttggtcttcatatgaatttgtctctgaagaaagattctatatagttttagattcattgcttttaagatactctgatataacttgaaaactatattattagtctttgtatctcatcaggataaaaagagtttgttgtgttaagaacaaatctttttccgttttgcaggattctccacaggcagttcgagtatgaattcggacaaatcacctgcaccaacagtttcacctaacaaccaaatgatttcagttcagttctacaatgattttgctcccgttgagcaaaccgatcccagcccgaccacctcattaaggtaagaagaggaacaatttatatataactcattctcattgttaaatcaaagaagacactttctaaaaacaagtgctgatatgaacaatttcgttctttgatcgaatctctgtaaattcagatacacgaggaagcgaatttcgggtgcagaagaagaagactcgagagacgttactagatgagttctctgttttggtcttcttgacccaaactgttaactcatttggtcaaagttttgttcatagactaaaatttgtaaaaacgactgcgttttaaacaatgatgatgatatattgatatgtcactaaccgggccagtttttcaattattttgaaaataaaaagattgtgagcatcgtagtaattacggtatttaatgaagggaaaaatgatgtaaaacttgttgttgaccttacaaatataaaaaaacaattgtttttttcaatgcgaatctgaaaatgacttccataccaattggattctgcaacgtttatggtatataacaatatcaaacatttcaaaccctacacaaataaattctacatgtaaaagccacaattgttctactaaatatagaaaatttctttttgataagaaaatgaattgtatggctggtctatctgctaagtgttaccctgcaagagatagtaatccgcaaaatcatttttgtcgtatatgataattatggaagtgtaatcaacacattttataatgtcaagattagcaacttttgtttagtatatatctcttcaattgagtttttttcccaactaaactcaaaattgtattatctagcagggtggaaattttgtttctttaatcggttgacttactgataattccatcaccaacgatatgctttcgatcgtttgtagttgatattcttagattagatgttacggtggcaagagtcttgattgtgaggcttttattggatatacgaaatatcaattgagaatttgcatatttgactagagtttctaaataaaaggaaagcaaccaaaatggagaactttcgtcttcaagtttgaaatgattaatgaatttaattttgtcattaagatcgaaactttagtgtgaacatgtatacatacacacctaatcctttatttggtagtgattattttggagagtgcatatataaattaggtatacgtcgcacatcattgaatgttcgaaattttccaagacataacactaattcatttgaataatacattctctacgatttttagacatttcttgtacaatacggcccaaatttctcactttgtttcaaactgatatatgttttatcttttccctactttttcatatataaaattaaaatgtcctcaaacacctatttttattttcttactaatgtatgttcatttttgccttggctataattgtcttaattggtacgtcttaaacttcttcgtttcttaccttagtacgtcctctagcaactgaatggacttcatttattagaatctaatttaatgaaagtatttacaattttgaaataacaacactttgtgtatttcgaaagctagaatacaataacatgtaattttttgtcatcttataagaaaaataaccaatcgaagagaagaattcgcaatattaaacggatctcaggcagtatgatctcttagtcaactttatcttatattttattttttcaaatcgatgaatgacgttaatcaagtggctcgatctctcagcagccgagtaattggaaattgaacgtgctaaaactataagtctactactataaaaagacttgtatttgtatgattgtatattcataatatctggtagttaatttatcccttgtaaaaaacagatttaagttaacttaacaaactcttatttagattatttggtttcgatatctaattcacactaaaccgtaccaaaaaagaagaagccgactttaaattgaattattccttaagtcttctcacattttatctttgctagagacgcaatatttggaatagatcaagccgaactaaatatcgacgcgtacgtgtacttttcagatttaaacattcagatcattaattacaatcatgcaagctgtacgggaagaagtggaaccatcatcaatggcattcctcgtaaatatcaaacacgttcgaagggtatttacgtcatggtctcattatataactgtcagagccccttccgtttctctcgacatgcagagtctagattccagcgacaccatataatatagttattagaaaacgagaggtcaaaaccatgtccggtaataagatctcgactcttcaagctcttgtcttcttcttgtaccggtttttcattctccgtcgttggtgtcatcgtagccctaaacaaaaataccaaaaatgcccttctcacggcctccaccaatatcaagacctatcgaatcacactttgatattcaacgtcgaaggagctctactcaaatcaaactctttattcccttacttcatggttgtggcattcgaagccggaggggtgataaggtcacttttcctcttagttctttatccatttataagcttgatgagctacgaaatgggcttgaagacgatggtgatgctgagcttctttggagttaaaaaggaaagcttccgagtggggaaatcagttttgcctaagtattttctagaagatgttgggctcgagatgttccaggttttgaaaagaggaggcaagagagttgctgtgagtgatttaccacaagttatgattgatgtattcttgcgagattacttggagatagaagttgtggtcggaagagacatgaaaatggtcggtggttactacctaggcatcgtggaggataagaagaaccttgaaattgcttttgataaagtggttcaagaagaaagacttggtagtggtcgtcgtcttattggcatcacttcctttaactcgccaagtcacagatctctcttctctcaattttgccaggtaaattatattctggagacgtatatacataatctaaaagtgctttagttgtgttattcttgcattaaaaaatttatgattctaaaagagacattggtaaccttataaaaaaacagacgtaactgtaattttttgggagacaaacaaagacaaagcttatgttactcttctatttttttttcccttacatttggtaacccgataataaatttatcaagtcccgaataatacttgcattctaattttgttaaataaatagtatacgtttaattggtttataggaacttaataataagaaatgataagattctttgaacttaataagaatccccaataggattcttttagttttaactgtggctctttggacgaatcgagatgcattgattttttattttttttatgttaaaacttaaaaccattgactaagacttgttgtaatctagtactgcgtcacaaatcaaactaatatatcaagtaaatgctattttgaaatttttggaaattaattatattataaagttctgatgcaataaattcaaagcatgcatagactacgtacgacttggaaccggtccacttcaactgatatatttcatttcctaatgataatctccccctaatcctttcttttttcttgtcataaacaggaaatttacttcgtcagaaattcagacaagaaaagttggcaaaccctaccacaagatcaataccctaaaccattgattttccacgatggtcgtttagccgttaagccaacacctttaaacacactcgtattattcatgtgggccccattcgccgccgtcttagccgctgcaagactcgtcttcggcctaaacttaccttactccctagccaatcccttcctcgccttttccggtatccaccttactctcactgtcaacaaccacaacgacctaatatccgccgacagaaaaagaggttgtctctttgtgtgtaaccatagaacgttattggacccactttacatttcatacgctctaagaaagaaaaacatgaaagccgtgacgtatagtctaagcagattatctgagcttctggctccgatcaagaccgttagattgactcgtgatcgagtcaaagatggtcaagccatggagaaattgctgagccagggagatctcgtggtttgtccggaagggactacgtgtagagagccttacttgcttcggtttagtccacttttctctgaggtttgtgacgtcatcgtacctgttgctattgactcacacgtgactttcttctatggcacgacggctagtggtcttaaggcatttgatcccattttcttccttttgaatcctttcccttcctacaccgtcaaattgcttgaccctgtctctggaagtagctcgtccacgtgtcgaggagtccctgacaatggaaaagttaacttcgaggtggctaatcacgtgcagcatgagatcgggaatgcgttggggtttgagtgcaccaacctcacgagaagagataagtacttgatcttggccggtaataacggagttgtcaagaaaaaataattgatttgagtagtttattttcttaattagggcctttttgtgtgacgtacactttatttcttataagattttttttctatgatgtatctatctttttttagttaaatgtaattatctaattgtgtgaccaatacgatatgtatatgtacatgtgttattgatatcatacaacggtctctggacgtatattattaatagtgaacactccaaaatagtttatatccatatatgttcaatttaaatattcggagttaaaaatttcgatgatttcaagatattaattaagagtggaactcatggcgataattgtggggttagagtttgtgtgtcaaccctacgcatctccccacctaactatatttaatgcttcttcaatctttgattgattaattaaattcattgagcggcgaatttaaaaattatcttacaaaaggaagaaatatttttaaccaataagaataaaactattttaagaagattatgtcatactaaatttatttatttatgaagccttacattatgacgatattggttatactagattaaagtattaaactaataaacagattttaaaagaaaaaaaataccctcaaatttaagtcatttagttttcataagtccggacttgatcaagaacataatctcagcttttcgaacccagcaacggcaatcaacatcatgcggctgttgatcgatctcttttcgatttgatcgttttctcttctcagtggaatgggctactaggcttcttaacatatatgggttcaatactgtggactatagatgggccggttatgggcctaattattaaccttaaaagacttctcggcttttgtgagacatgacaatatcaatgtacaggtaacattgagccgaaacttgctattgttcttgtctcacttcttaatataactttagcccaaaatatttgtttatgcttgatgataattcttttttttttaagtaggcaaagaaaacgttaacgactaattacttttacaacccatgaaaaagggattttttttttttaaaagctaaaaagagagggataacttttatatttttaatttatacacaagtaaaatgcatttctaatttttttttgttccataagttaatttgccattccatgacttttcccttttagttaactaatttactaacaaaaagaaggaaaaagagactttcgaacagtattattctttagttcaaattcatatataatgatcttattttattctcccccccccccccccccacattataacacaatgtcggacacatagtgttgacttggctacatgtcttcttgtatcaaagtttaattaataataacacatataagaaaaataagggaggaaaaagcgtttcaacgaccaaagagattccaacggccgttttgctcatcccattcctatgcatgtgccttcccatttgctttgcttttttgtagtttgtgtcgccggttctttgcatgccacagaacttaatagttttatcataaactaagaatttttgttgaatactctgcacgtaattatatttcatgttccgacattagcccaaattacggtaaaacatacatgcaggttcatcttaagataatgtattgactatgttaatattagaatatacagaatataatatgcgtttaaactcatagatccaaacctccatactagtaatattaatgaaattggtattttatcaatgctgaaattagtatctatgctacgttacattgtctaacaacgctgatacttcaaaattgaataccaagtaaactaaaataaaaacataaataaatgaaaaaaaaaaacagaaacctcagattggatgtcttggagtttggtgaccgactgtctactttagactcataattgatctaaaattgtgtatataagttcaagaagagacgtataaaatcataaattaatatcgaattgtttagcaaatatggtcaccaaaatttaaaatgataagagttaggttttgatataaccgatatgtatgtttcattcatggggataatgtcggctaatatgtcagatgacatgttcattgatccatcctgtctccggtcaatttttctcccatacttatttttatattttctatctttaatatttagaggaattcaaatgaattgaaggtatatccattcatcaatttgttgttcaaatgttgtaacaaagaaacaaatgtgttgttcaaaatgtggattatcaattttgagttcactcaaattcaattaactgttatttttcaacaaaacacatttctgtattgatcaatcgaatatgttattgtccaaagtgcttataactagtataaaatataatataatgaatcttgcaaacatgaaaatatgcatcacttcaaaattcaacaattttgaactgaaaatcgactatacttttgaatgttaatttcgtaaaaaagtgggtaggtactaggtattggtagagaaagagttgagagaataataattgaaagaatatgggctatgaaaagagtctttttagttaaatcggacggctaatgggagccgtcaaggttgaccatttccactacgtgccgacatatcagccttacacatgccccatcctcctcacctttcccacttccttgtgactcttttccacgcgcctcttctagcatttgcttcttctttttatttgcctcttcatcagaaaaaatattataaatctaaacagttaaaatatctatctacgaaagacaaatcttgaaatgttttagtactgcattttgttggtcacaattaacaataataattgtgatgcatgttttgttagccagacacctaattagttctctctaacttcaaacagagaaagaagtattgtatttgtcaacgctgatacaaaactgacactttcaagtttaagtttgtcatatttcttttaccaaacttgaaactactgcatttttttttataacttgttcatttgaacaaataatatttttatttttttttgccaaacttgtcaatataatatctaagatcggactcctcctattgtcaatcttaatatatcacaacaataattgatctaacttatattgtatacttaattcattgaaataagaaatcaatattaaatatacgcgagtcttatgactaaccaaacacggtgatttaggcaataagtgctcaatctttcaattattttaagaattgaacatcaacatcatctactactttcctatcaccaaatttcaaactacccgattttaatagtaataactaggttaggcaagaatgttgacaataaaaaaaatgtataacacaatttttaagttttttttttttttaatcgtatcataaaaattcctagtttgaaaatgactagactgatataaacgtaattttaattttaaaataatttgcttgtacaacttaagatccaatttaatggagatagacatgcatgtcaaatttcattattagtagacaagagctttattcatcttggcaataattttggttttaaagaactcgaccgtccccattgatgacatgcccaccttacgcgatttgtaggatgagaagattactttaaattcccccatttgtcaaccgtatggaaaccgtagaatttaaaactaaatttcgaaaaaagtctttgaatttaaaatatttattttatccttccttctcttcccaattcccatacactatatatataagagctcgtcactcttctttcagattcaaaacctcctgatttcattctttactactaataatcattttttgaaaaaaataaaaaagggacatggttttgccatcttcaacaccgttacaaaccaccggaaagaagacgatatcctcgccggaatataacttcccggtgatcgatttctccttaaacgatcggtcaaaactatcggagaagatcgtaaaagcctgtgaggttaatgggtttttcaaggtgataaaccatggagttaaaccggagataataaagagattcgagcatgaaggagaagagttctttaataaaccggaatcagataagctacgagccggtccggcgagtccgttcggttacggatgcaagaacatcgggttcaacggcgatttgggtgagcttgagtatcttcttctccacgcaaatccgacagctgtcgctgataaatctgaaactatatctcatgatgatcctttcaagttcaggtacgtatacatgtattactatttttttcgtacatattacaaatctttttagcatatgttttgtgtgtatatttattgattcttgaacctactttaatttcttgaatcatattataatagccataaaagaaatatattttaactttatgtcaaaaatttgagtaaaacaaaattaaacataaaggcttaagctaatgtatcaaccaaacaaatccatagtatgagttttggttaacaaattcatataaaccataagctcaatgaagcatgagaaaactgacaaccatttatatgtgtgtgtgtgtatgtgtggaaatggcaatcgttggttcttggttgcgtctacatattattattttttaaaaatatatattctatccatttctgtgtgtgtcaaattgaaagttgacccaactgaaattgatgtggattgtgtgtgacaatgtgacttgtgagaaacctaaaaagagagggagagattgaaagtgagatgcaatgtcgaataatggataatgaccagaagacacggcttttaattattatcagtcttgttcctttattgtcattaaagttgctcatattgttttttccttttgttttaaaattagtacaaattataatcataccaacttaatgccggttcacctgatagtttgttgtgatcaataatctatactataatagttggattttgttattggttcatagtagtatattggtatgtggttacaataacgatggcaaccatttttttctctagataatactaaaatatcaaaattgtgaaagttgcttttgtaaccttgactgcgacatggttgataaatcaaattctctttttaaaaaatccctaatttggtggcatataggttacgtataataaatatattttatctaattcttggtggaaatcgaactataaaatatcattcatgggctccatagtagttataattatttgaaaaattcagattaaacacacacatacgttacaaactaacataataattgaacagacttggtcaattagtggatactgtgcatgaacacagacaatactttgagacgtcgtcaaagaatcaaaattggagacgtcaacgagtaaagatttgacttgttattcctcttcgtcatttttaaaatgacaagttgtaaataaaaagcaggaatcatggggtcctcactttccgaacattcctctgtctcatgtcttttctttttctgttattggtatttatcgtaataataataataatttgaaaatctttcagaaaaaataagaacaacaacccgtctctctgtcaattgttgttgagtgtgttaataaattccacgtgttgtttctcttttattagctcggcgacgaatgattacatacgcacggttagagatttggcatgtgagatcattgatctgacgatcgagaatttatggggacagaagtctagcgaagtgagtgagctgatcagagacgttcgtagcgattcgatcctacggttgaatcactatccaccagcaccgtacgcgttaagtggcgttggtcaaataggtttcggagaacattctgaccctcagatcttgacggtgttaagatccaacgacgtagatggacttgagatttgctcacgtgacggcttgtggatcccaatcccatctgaccctacatgcttcttcgtattggtcggtgactgccttcaggtactaaccacattttgtttcgtaaagacttacaaaatagttttcatcaattaattaattaatgaaataatctttgaaaataggcattgacgaatgggagattcactagcgtgaggcatagggttttagcaaacacagcaaagaagccacgtatgtcggcgatgtactttgcagctccaccgttagaggcgaaaatatcaccgttgccaaaaatggtgtcgccggaaaatccaagacgttataattcattcacatggggtgactacaaaaaagctacatactctctccgtttagatgtccctcgtctcgagtttttcaagactttatagattatattcataccattgaaagctagattttttattttttttttgcttgttgaaaaagaaaatatgattgttggattgttacaaatatataccatgtgaaatgtatagatttagatgaacaaaaagaaaaagaaaattgagttttggtcatttactttgtaatttactaatttcacatgtgaatcagtggatcattgcaatttctaaagaaaagctctaaaacattccagtaagagaaattataccttttttttcttcaactacaagtctacaagtcatgcatcatcagtacatcacaatcataaaaaacgacttatgataaaaataaaaataaacttgagcttctgatcggtagaaactatgatccatgaaacgcgtccgatcacaatggactctttggtccactgcagttgtactctcgatcataattacacgaattaaaacctctttatacaaaatcggctattacttatctaggtatgcttgatttcatttgaaggttttataaaaggttgcaggggacaagtccaaataatatgaaccacatctgaccctaactataaaaattaatccacaatcgattataattattaaaaaaaactgtatctaaagcatacgccaatccgttaaaagtaaacaaaatctttatgcaaaccttatagaagttcgaaaacaacaacataaataatttctgatcataatcaaagaatcagaaaaaccataactccaaacacgaacagcttcatcaccgaaaagctttctactgccacagccgctccatagtaattttcaatagggtacaagtctcccggcggatatgtgaatacgtaattaggtggaggtggaggtggcggtggcggcagaggcgatggtggacaggaagatttcttcgggggtggtggtgacggaggaggaggggagggtgtacaagaaggaggtggcggagacggaggcggaggcggttgattttggagacaaggtatgcagttaacgtcaacttcggctgaagaatcttcggcgttgattatgatcggagatgcgaggatcacgatagccatgaggattgtggccgcaagatccgtcgatcggcgagttttaggcgacatgttgtaacaatgttttgggcttagacttgtgtatataaaaagatgatcaaacttatggaatgtatattagtgaagttatttgtggaagattattacagagagatccatcacaataaatgaaataatttcgtaataacatcggagatatggaaatcttaaatgacagcagatttgtccaaaattagatacatgtaataaacacgttaaatttaagtatgaaatgacaatattccttgtatactctaattttcatttgggctttattgggccaaataatatgggcttacaattaaaaattcgactgaacggatgtgaataatttttttttgaaagaaccgactatctttattcttaccagaccacaaagacaagtcgttgtttgacttgttgactttttttttaatccacaagtttttttttttttgttgcgtcagattttttgtttgttttccagtgacgtctttgatctccctcccgccgacgacacaagcacgccgtctggtttacctgtaagtcttctattctcttcttttcctttcgcgtgcttcctctttgataggttacattctttaatcgatcatggcatcgttcttggcctctgattcgattacgctcgggtgattttttttttttcccccgattattgatctcgccggaggttgcggaagggagaaattgggtttcaaattttcgaaattttcaagtaatgtaatctgggttcgtgtttattgtgcagataagtgtttttgtgtggtgtctgtgtctcactgtgtcgatagattaaaataatttctcttcggccatgtcgtggtcgaaagcttgtagaggaactcgaatttcttcatatttagagaaccttcatcgaacatctcagtatccaaggtaattgaattttatgcatgcgcatgaactgtttgttaaaattcctcaaagagaagttctatcagttttatagaattaagtttgtgagaaatgtttatgtcgatgtaggactattttatgctctcgttattacactcatggagcttgtaaaagcaatgagcattatctccgaagcaagagagtattttggggaagctcttcttcatggagcttgaattctcactctgctactgctaaatcgatgttagatagtgcccatcgccagtattctactcactctccatcggaaaccaaatcacagaaaatgctctattacctcaccgctgttgtctttggtatggtggggttaacttacgctgctgtgccattgtatagaacattctgccaagctactggatatggaggtactgttcaacgcaaagaggtatatatcgtttttgtttcttcctttctatttttatcctcttgagttttcaagtctacttagtggctcttcctcagtctttttgtttggctttatactacagactgttgaggagaagattgctaggcattcagaatctggtaccgtcactgaaaggtgtttatttctctgttcttaacaccattcttctttatatgtttcttaacaccattcttctttatatgtgtttataatgaacttgctagcttactatattctctactatgattgtctggtaaacagggagattgtggtgcagttcaatgctgatgttgcagatgggatgcagtggaagttcactccaacacaaagagaggtttagactttatatctcaagaagaatgttgagacgaattagtgtgtttttaactgatatgtctttttggttttggtactttcttataggttagagtaaagccaggagaaagtgcactcgcattttacactgctgaaaacaaaagttcagctccaataaccggagtctcgacatacaatgtcactcccatgaaggtatatatattagccttggtagtggatcctattaacttcccatagaacatagattggtcgattctcaaaatcttatattggtttcttcaggcaggagtttatttcaacaagatacaatgtttttgctttgaggagcagcgactccttcctggagagcagattgacatgccggtaactactcttttgttcttggctatattctcctcagataaaatcaagagtccattaaaacctataatttcttggttttgcaggtcttcttctacattgatcctgagtttgagactgatccaagaatggacggaatcaacaacttgatattgtcttacactttcttcaaagtgtcagaggaaaatactacagagacggtcaacaataacaactctgttccagttcaagaaaccaattaaaaaaagtgtccatgttttttaagagctacaaaatatcttgtgacacaaccttatgcaagaacagtctctcttagatttaataaccaatttccaaattcggaaaccaatgttcaaaacccacggaacagaaaaaagaagaaaaatgttggtaaaatgaattcactataagctcttctcttcgtttttttttcgttaagtttataaggatatcggtttttactgtctctttggctctgattgaagaaaaatttaaatatcgtctgtagatattttatgggatgctttgagaatgggcttcgttttaatgggcctcctctgcaatcattgtccagagtcgagaaaccacctcttcttctcttgttctttctccaaatcgatttggtcccaactctcttcaagcaaaggagagatatgaaaatgaaagctcttacggcgaacaagtttttccgattgaagaagagaagaatctagaagatgaagacaacactagtgcaccaaacagttttgcgcgtcttgagaggaaacaaaaaactattcagagttcagagagagtcaacccccaaacgagacttaaacgatgagcccactataattttataatttatgggccatcaggcccaaatgatcagtagtagttattatttgacttttgacatggtggatttggtttaaccaccaaaccgaacgagtaaaacactattggattgggtgatgatatcccggttttatttggttaaaatcacaaaatcctgattttggttcgcggcttgattctgccgctctctcgtctttaacctaactaaagacgtagaatgattctggttattgaattagtttgatacagagagagcgagcttcggtttttcttctccgatttggaaccaaagctcagattttggattttgttagacgatttccaaatgatgatgatcctcaagcctttatcttctcaccacgtttccaatttccgtctctctgtatcgtttcttcacagcgtggcactatcggatgcgaaggttcctgtagaagaagaaggcgatgacgcagaaactgttttccggatgataaatggatcaaatctgcaagtggaattgaaggaatcgttgagctctagtggaatccacttgtccaaggacttaatcgatagggttttgaaaagggtaaggtttagtcatgggaacccaattcaaaccctagagttttacaggtacgctagtgctataagagggttttatcattcttcgttttctctagatacaatgctttatattctcggtagaaatcgaaagttcgatcaaatttgggagcttttgattgagactaagcgtaaggatcgatctttgatatctccaaggacgatgcaagttgtgttaggtagagttgctaagttgtgttccgttagacaaactgttgaatctttctggaagtttaagagattggttcctgatttctttgacacggcttgtttcaatgctctcttgagaactctttgccaagagaagagtatgactgatgctaggaatgtgtatcatagcttgaagcatcagtttcagcctgatttgcagacttttaatatacttttatcgggttggaaatcatcggaagaagcggaagctttcttcgaggaaatgaagggaaaggggctaaaacctgatgtggttacgtataactctttgattgatgtgtattgcaaggatagagagattgagaaagcttataagttgatagataagatgcgagaggaggaggaaactcccgatgttataacttatacaactgttataggtgggttggggttaatcggtcagcctgataaagctagagaagttttaaaggaaatgaaggagtatgggtgttatcctgatgttgcggcttataatgctgctattaggaatttttgcatagcgaggaggctcggggatgcggataagttggtggatgagatggtgaagaagggtttgtctccgaatgcgactacttataatctgtttttccgtgttttatcgttggcaaatgatttgggacggtcttgggagctgtatgtgagaatgttggggaatgagtgtttgccgaatacacaatcctgtatgttcttgattaagatgtttaagagacacgagaaagtggatatggcgatgcggttgtgggaagatatggtggtaaaaggttttggttcatatagtttggtttcagatgtgcttttggatttgctttgtgatttggctaaagtcgaagaagctgagaaatgtttgcttgagatggttgagaaaggtcatagaccgagtaatgtctcgtttaaaaggatcaagttgttgatggagctagcaaataagcacgatgaggttaataacttgatacaaaagatggctattttcagtacagagattccgcgttaacaaccaagacacattcttacattctttcagcatttttcaacagccagtcgagtccttcatgtaaaccatcaccagagaatgcacatgagctctggacatgcctagcaagcaagaatcaaaaaacagatcatcagaagaatcgatcataatcgcaaaattagagtcttgaaaggtttttcttatcttcttaccagtttctctgccagtttttttgacgaagagaagtgagatcaagcttgttactgatctcagaagcagacatagcaccaggaacttcatgcttgtttccaaatacaagaacagccacattgtccggtacactcccttgtatctgttatacacggcatcaaacattagattatttgacttgctcaatgtttagagaagtcaggtttgtttgttacctcatcaatcaccgcattaagaaaatctttcgcatcttctattcgatctctgtctgtgctatcgactacaagcacaagccccgctatttcttggaagtcatgtttcgtcattggaaaccactgaaatgtttttttgaatcacccataatcagatatgatcttactgtttataaaaattaacaactttctcctaccttgtaacattgttggccgcccatttcccaaaagcgtaagtttgaatccttgtattttacactttccacatccgttcctagaaacagtgattcaggaattcatagagaagactagattcaatatcagaaagaaaagaagtgataatgagatttaccaatagtaggcatggttgtggtaagggtttctccggttttgagtttgtgcattattgatgattttccggcagcgtcgagaccgaacaacactatcctcgattcttcttggtggaaaaaaccggcaaatggctttcccagagctgtccccatttttttctggttcttgcaacgaagttgactttgtttgtttcgctttggaaaatctgaatcacaaggagagtccttgagagagtttttcaaagtcaagtggtggttaaagcttaagagttaagagttgtctagtctgtttcaagatccgaggaatcaaaataaaaagttaaccagttgacttttgaattattagttgtccgattcatatttgtttatgcaactagttgcgtatttgttataatctttatatttgactagataacaaatctggtcagcaaaaaaggttcatatagtttggtttcagatgtgcttttggatttgctttgtgacttggctaaagtcgaagaagctgagaaatgtttgcttgagatggttaagaaaggtcatagaccgagtaatttctcgcttaaaaggatcaagttgttgttggagctagcgaataagcacgatgaggttaataacttgttacagaagatggctattttcggtacagagattccgcgttaaaaatcaggactcgttcttacattctttcagcatttttcaacagccagtcgagtccttcatgtaaaccatcaccagagaatgcacatgagctctggacatgcctagcaagcgaaagtcaaaagtcagatcatcagaagaatcaatcctattcgcaaagttatagtcttgtaaggttttcttattttcttaccagtttctctgccagttttttttacgaagactagtgagatctagcttgttactgatctcagaagcagacatagcaccaggaacttcatgcttgtttccatatacaagaacaggcgcattgtccggtacactcccttgtatctataatacagaacatcaaacattagattatttgacttgctcaatgtttagagaagtaaggtttctttgcacctcatcgatcaccacgttaagaaaatctttcgtctcttctatttgatctctgcccgtgctgtcgactacaagcacaagccccgctatttcttggaaccagtgtttccataatggaaaccactgaaatattttattaaattacccatcatcaggtatgctcgtaatgtttctaaaattagtaactttctcttaccatgtaacattgttggccgcccatttcccaaaagcataagtttgaatccttgtattttacactttccacattcaatcctagaaacaatgatccgttttaaaggaattcatagagaagactagattcaagatcagaaaaaaacaaagagtgataaagagacttaccaacagtaggcatggttgtggtaagggtttctccggttttgaatttgtgcattattgatgattttccggtaccgccgagaccaaacaacacgatcctcgcttcttcttggtgaaaaaaaccggcaaatggctttcccagagtcgtccccatttttttctggttcttgcaacgaagttgactttttttggctttggaaaatatgaatcacaaggagagtccttgagagagtttttcaaagtcaagtggtggttaaagcttaagagttcagagttgtctagtctgtttcaagatccgaggaatcacaatcaaaagtcatctggttgacttttggattattagttgtccgattcatatttgtttatgcaactagttgcgtatttgttataatctttatatttgactagataacaaatctggtcagcaaaaaaggtttaaagtaatgatcttcttaaacagataattatacaacacataaaatttaaacaaactttgcaatattcaattcttacagaatgataaattttattggttttggttttgctctaaagaattacggtttaccgaatcaatcccatctgacaggatgttttgcctcacgattcttttgagtttattcattttaaagttaattatcggacattttagttaaatgaaggatttaataatcacaacgctaacaaatgaaacatggacaattaaaaatagattaaaactaattgctactacaatgcaagattaagatctaaagccttgtcttcgtttcgctcttctgtttgatcttcttcttgttccacctttgtattttcttccttgtgatccgaaacaaacatcaatggcggcttcaaacccgtacgacactgagagaaatcctccggctgaaacgccggaactactataccggacctttctccgccgttagatttcctcctcacgacgccagaattttcagctaactcttctcgtctacgtttccgtgcttcttgatagtgtttgataagcttaaagaacgtatcaatcttcttctcttcttcctcttcttcgtcttctcttactctcttatcaaccctgatcgtctctttgctctccacattctcatccttgctcatggtctctagggaataattgtataaactaaattgtttaggatacatttagagaaagtgattgattttggagagtgaagaaggcaaataatccttttcgtctgatgactttcttttaaaggaaaaaaattagtcatcacgaaacttcttagaaaaagactaaaacaccctgtccccacctcttttactctttagtccttttagtttcctagttacaatttaaaccacaaaaaacgaaaattggagatatttttccaagttagttaggatatttaatttcgaaactttataaatgggttttttggttccctgtaaattcaaaatagtaatcataatttttataattgttaaaaaagggaccaggggtaaaagagtaaaagaacgcggagatatcaacgttaaaattacgtcagatgatgatgtgtttgggatgacaacgtgacatgaagcggttacgagatgatgtcacaatgatgacgtaatctatacaacactaatctacttggatatacttttgaaataaagaaagactctaatcatcaaaaacttgacttgatgcgtttactttactcgtggttggtcttggagagatattctagtagatccgagtgtacagcactctattactatcaaccgttagatctaatatttcaggcatatgtttttgaatctaaggatggagaataccataatgcttgaaaaggttgatatattaacgtactattttactattaaattgtgaatgatgaggttatataaaagatttgtcgaataaaatctcatattgtcggccacttgtatgtaaattaaattaatttgtatatgtgaaatttgtgtggaacaattggattccaacgaagaacattttttcccctatttttggtattttaaatgaatggtaattagattacctctattgatgttacataaacaaaaagaaactagattttaacccgcggtatatcgcgggacgatttatttttaaaaataatatatattaaaacttgcaaattttatttttataaaatatttatattttacagtttataattgttattaagtaacgctataccacgaattcatgagacaattgttaaaaaaactgaagttttgacccctattaaaacagcatattaataatattttaaaattttataaatattgattcaaatacatccaccatataacccaattccaaaataaaacacgttctgtaatttctttaggcgtcccatgatttttttttaaagtagtaatttttaaaatttaagaattattttttatatataaaagttttgcaaattgtatcattctctaatacatttatattttatagtttaattttatatatagtaacattatacataccacataacatttttggttttatataattttttctaaattaggatgatttgatatgtttaatattagtggtcttaaaattaatgatttaacccatattgaaacggtggattaattatattttacttttttattaatgttgattcaaaaactcgtccctccatgttgactctgaattataatctaaacattttagctaataacataagagtgcaccatatttatttaataggggaatgtaccatatgacctgaatgcatttttatccaaatccaccaaaacattcttgcaaaaatactatagagataagaaacgatagtcggttttgatagatataagattagcaaatatattagttagcttaaattagttaaagaatacaaattaaaaaggtatattacactttattcaaatatagtatcaaaacttatataacacagagatttgataattttttaattgttgaatactttttttttgtgctaatttttatgtgattaagatttaattgatttcatatataaaatattaaattgacttatttgtttataagttggtaacatatagatatttgaatattcagtatattttgcttcagtttaagaaatctttgatgacccgtctttagattcaataagccctataatctagagattaatctgcagtataccgcaggtaggcttatattttagttaaagtaaaaacttttattgtaaagatgatttaaaaatatatgatattattttatttgattttaaatgtatagtaaactgtgagttgtatatgttttgttgatattatctatattgtttagtgtttaagattatacacttgtagtttgattgttaatttaagagtttcacatgtagtataccatcttatattaatatcgatctaaacccgtcaattttaggattttccagcttgtattaaaaattgaatcacatctaatatgttattaactattgtagtatataagattataaattttcaatataatatgtatgaaattgaatataaatatttcaaatttatgttccgttactcagtagaaaattttcttaaatctatttttcacccgttataatattatttcatgtattgaacagtttatattcgtttttaaaaattcaaattatagcatctgcaaaaaaactctaattatgatgatattatttttccgtaaaaatagaatcatataaagatgagaagtgaactataataattaataaaaaattaatatgataatttagataccaaatataatttgttgattttaattggttacttttttggaaattaataacgtattttgtttttctaattaaattaaattaattaaaatatagatatcaaatcttatatgttgattttgattggctattatttttggaaattaataatgtatttcgttttttaattaatttaattaattaaattagtatttgactttttaatccttaaagagataaattaatttactctttaaaattttatttctaatggcatacctatgtaattacttacaaaaattaaggttacataaaatatacttcccaaataatatagtaggatctctgtttttccacagttaatttttttgtgtgaaaggttttattagttagtttttttttttgaatattgagactcactgttcgtttctttggatgaccgaattttttattattattttttgatacagacaggaaaaaaggaaatattcttcacatgggatatgttttggtttaggaggtcaatgtttttatattcaataccgaaagaaagaattgagaaatagaagcccaatgtgtttagatatgatttatgaaaattgtcttcggaaaagcccaatgattaactgggcttcagggtatgaagactttctcagttctgattattgcttgttgggttttgttaaacaattccttttactggaattgggaaaaacaaaattcctataaaggtaccttttctgtttcatataattcatatttattttaaaataaaatatttttaaattttgttcctttcataagaagtatcgtttcacattttaaagcgaaatttataaatttgaagaaaaaattattgtataaacaaagagaatttaaaataatataaaaaagtctgtaaaatgtgtgaatactgattgaagccgacaaacttgctcaaaagctgaaagcgaagagtgaaggaaaaaaaaaagtggtaggagtggctgagatctatgagaagaatcacttttaatttcactgccacattgtaagagtgtgactgttataaataagcctttatggtctaaaaggcatcctttattctctcttttcaccttttgcatccttaattcatctttatgtaagtatccgatcctctctttttttaaaaaatataaatatacacaacataaaacatgcatcatatataccatgttggtccatgcatgtaaagtgcagagagtttaagagttgttgtaaaaagcataagaaatttgaaccctttttttttttctatgcgtgaagctagttatcacatttggtttagtcgaccttatactaaaatttaaatctaagcgaacagagacatcggagttacagagttgactaatttagaccaggaaacagtcaacataaataatttagaaagacttattgataacttaacttaaggaggcaaatttgatacgtttcgcctaaaaaatgggaatggcctaatgtgagggtatgagtgtgatgggcatagagtcagagatagagtgacaatgaagacaagtgagaagaagaatctttatacttgatgagctaaccaagaaaactaggctatgttgttatcatttccactctcttatttcatttctttatttattccttaccagcttaccatgattggtcatttttagtaagcttttgatgagaactcaccgatatacctttttgtcttaacaacaagcacacttctgatgtatcaagcaagctatatatatcactttagatttccgttaggtgtcttatagttctcagattagtgggttagtatacactaatttattaaacatatggagaattgttttttttgttcataaaaaacgtatatagactaaaggttaaatttaaatacttaaaattgagattgcgtggtcacactgaaaaagggagaatcggaggtgggtgtgtctaacattccaattgcgacccaccaaacttctccatttgttataaattatactattttaatgtaagataatatattcataatacatatacaaaaacaagagtcagaatttagagtcctgctgaccaaaaatataacttagaaattagaatcttcgagtggctttgtaagcttttccagtttccttaacccccaaaagaagttacatctttatgcctaacataccaagtacatgcatacagtatttaagtgaatttgtatagtttttaaaaaaaaaaatagtttgttgaaatgatcacaaacacataatactttttttttgtcaaacacataaaatactagtattacattaggtttcttactaatgaaatccttaatgtcctagtatatgtgtttattcatattacaattacgatcctataaaaattgaagtttgtttcatgaagatcagcagctttcacaatcaatggattctatatatgcatgcatacatttatatttatgtgtaactgaagatatgtgtgctttagtggctgcgcgtgcagaggtaaaccaggttagctttaaacaagttgatcataagatatcaactttagaagtccaaaagtaaaaaaaaaaggaactcgacactaaataattaatcttcaaaggaaaattcgttggaaaagataaatacaattttggtttcaaaaggaaattgtctggtcaaaaggggaaattgttgttaattcgttctatttggtccatcttgtaattttgaaacgtttatttgtttcatggattttaattactataataaattaagagctttttttttttttatgaaaattaaataggttttgatttatagtttgcacattagggttaaactacgatagcaactcaatcatctttacgtgcaaaacattaacaacgataatttgcacattaaggttaaacggtaacatttttgtgcaagtagctaattgtatgcctgtgtgccctatcaaatttcccacttaaagaatgtgtgtttactatttacaaaagtcttatataaagaattatttttatagctttcaataataataaccgaccgaattgaacactactaaattttctgttggggaaaaaactactaaagtaaaaagatttgattttccaaactactatacctgttagtcttttattacgatgatttgacaaatgattaactggatacatatatattcttgactatgaaagctacacgtcgagagatcgatgaacaatatgcttgagtgctttcaatatacattttccttttcgttgcatttaatataatatctaagtactaagagacaaagacaacctccaaaagttggaatattctctatactttctactcaaagaacccactagtttatatttattctcacattatataattggtcaccacacaattagcttatctaatgttataatagctagatatagagaaaaaaaaaaaaaatctacgacccatttaaaattttaggagttctattgtacaaatatttattacttctttctatttttttgtttaacgtatctttgaaacaaaattaaaatagagaaatacatgagaaacccacgagcaacagctataacaatgaagtcaaacaaagaaaaaagaaagcaggccatatccatggtgacatataacattgaagcaaaacacacatgcagtcttactattaatcactccatcattagcaaaacaacactatagaatcatcatatatgaaaattaaacatgatcatagagttttcttaaaaactattaggagaggtaaaaaaaacgtaccactcctcaacgaagaatcatcatcaaacctatccacattttttctctctaaaatctcgtaaaaagtttagaatactgtctagctcaattacttttcttatctttacgatccgatgtatgaagcaactcacgatgaaccacacttgtcaacaagagatccttgcaaccccttgggaggatcggacatgagacaccaaaccggaggaatcgaaagctcttccgcaattccataagcattccaacaaaacggatccaaaacgatttcgcctttggcaggaagcaattcgatgtcggaaagagttagatttgtgcatggtactgcatcgctgcatccaaaatgcatcgggggacttcgaatatcgtaagttcctttgatgccttggtatgcaatatcagacacaaaaaccgctgatgttttgttagcacaatctttggtcatacaatagtattggtcaataattatcgggttacggactgagtccacgtggatgttgttgaatgtcacgcctgagaccgaaccggacccaccttgccatgttttgatcctaactccattgtcagagtattttatgaccgaatctctaaccgttatatttgagacacatgctcgtgagttgtgattgcccaaacttccgatactgaaaaatagttattaatcaggatcaatgagataattaacaaatgtttttaatttagttaatcatgatttaaaagagagagataataaacctaattccatggccaccgggtccacaagttagattccgtatatcaacgtcgtatgatccggagccaatcgatacacaatcatctcctgcaaaatggatgtatgaatttaattattcagacaataatcattccttccttttgtttcttactttaaaaaaaaaaaactttaattttattctaaataaagacacgttaaatatattaaaagccggttagcccacttaacccatcggtttagttaaccgactttaccaaaatcacggcatataaatatatatatatatatatatatatatatatattttggcggctaccaaactttgatataaaataaaaatgggtttaccattggagataatggaattgtagatggtaacggagttagagttttcgatgtggatcccatcggtgttgggacttaacggtggagcagtgatgtgaagggactcaacgtgaactccttgacatccgtcgaatctgaaatgaaactgcgggctgttttttatctgtagaccttccacccttagattcgagctcataaagaacctcaaagcctgcatgtaattcaattaattatttaactggtttattaataagaatttttttaaattggtctataaaggttacgtcgaacttacaatggggctatcgcaaggaccggtaacaattgctgatttgttgacactctgtatagaaatatagcaaactaattagtaatttaaattctatatgttgatttcattttgaaaacttaagcgtacttttgaaaattaactttaacgaaaatagagtcataaaacaaaataaaatggtgattaattggaaaatattcatactgaaaatgtcgtaattaattagtgtaatttacccggtgaggtttacagggaagatcccaccacttttgtcccctgccgtcgataactccttcgcctttcaaagccattccgttgactctatagaacacaagccattgtctcttacttatattgctcggccacgactctggtccatcgggtgttacaatggtcccatccacctagcaataataataataaaaaatcaaatttacaaacaaaaaatttgacccaattatctaaatgttgaaaattaagcttttgaatttttatttagtagagaactattacttggaaaaattggtaggagcggcaaggaccagtgaaaatggttgattgaatcatgaatgtatagccgtaaggaacaagcaacactgaatcggtgttgttctcgttgttacaagatgagtcccacgccgttttgaatgcttcagtgtcgtcggtttcaccgtctcccaccgcaccatactttctaacgttgtagattccgttgttgtcatctgcaggatcgtcagaaggtgagggtggcagtgacggtgccggtgagtcagggggacccggaggaggagtaggaggctgagagatggaggaagatggtggctttggtttagaggagtggtggttatggttattatgtttgtgtttctctttgtggtgatggtttcgagcttcgcttagagacattaatgtgagaataagtgtcatgaaaccgaggacttggttgcgattataagtagaagttaacatttttcttggcttaaaaatgtctttttttggtggtgattttgaggtgagtgtttggagaaaaaagtgtgtaagaatagaagtcgcactcactaagttaagaaagcttcttggaaatgttaatgcagcaaaagcagacaagtctggttcctttatatatactgcaaggtcgtgggcttataggaagtggaaaccgattccgaaatgttgttttcattttatttttttcaaaatatcaatttttaacaagtggtgtattgataaagcttaccgggttttttgggggtttattgattatgactgttactatggttgtgacttactgtaaaattgcatattttattattttttattgtgaggagaaaaaagtcacctttgtgatgagctattgagcttatcgtggaacaaaaataactctgcattgtgagtgtttttaagtagggtgttgtgagtgattttatgatagtttaagtataattggcttaaaactctgcttgaaaaattgttactttttaattttagaagtcttaacatctctaaaacatacaccatttttttctgttttcttttgggtttctttcattttatacaaaaaatactcaagcaaaacgaatacgttatctagtatgaaattgggctgtattcactattcacaatcttacaatttgttattccgacggatattaatcaatgagtctaaactcctcacggagattattcacaatcttactattttttacagtatatgattttattcacaccttaccaatggagtttagtaatacctgttatcctcttttagttagtttaatttatccccactttgaaagtctttttccggtggatatgtatataggacagtttcttcaatacacgacgaaacatcaaacatataacatgtaaaaagaattattctccactagggataattgggaaaacatatgaaatgcatctcttaaatattttatttatagagtttcgttttttttttttaaacaaggaaaacaagaagagaatgtccacgagtgggttatatctaacttctttcggcttcttcagtggcccaaatcctttttcatgtattttttttatatctacagaaaaggtaaggaacacatgaattgttaaatacatggataaattcattggtttatcactcaaaataaaatataaccgaccaaccattattgattgtatacccagaaaacactattgagtattgtctgatcgtatttgagaatttcaccgcccatctctacacttttcggtggaaaccaattatgtttggtctctcatctcatattcctttctcttttttgccacttttccaaaaaaagagttataatatttgtagcacataaactgaatccattggattgttgatatctaacccctatatctaacccctaaacttaagatatgtatagttatatcttatattcaattacttatctataattgtggttacatttatttagtttgataaattaactaacgaaaaagtggaataaaccatacaacagaaaagcgtaagaaaatgataattacactaacttatcttagttatttctaatctagaaatttgtattaatatgcgccaccacctgaatttaaatttgtatattgcgtattgttgaaaaaggtaattaattttagctagttatttgcaaaactacgattactgatttggcttaagttttgaccaattatcctgatcatcgtgataaaatattattctgttaaacaacatgctggtaaataaaaataaaaattattttactgattaattagtgttataagaagcattattttgaaaacaaaactagaacgcttattcttctcttcatccaattaactttcatattttcaaagaccaactattttatgtataatcaatatttatcaaccaacctcatttacctaatttttcctttttaggatattcagttaagtcactctaagaatatcatataagagcataatgataatgtatttttattttcaacaagagaataatgaattatacgtgcagcttctgacctcatcctccacacagaaatggcggctataatgcgacatactaaagctaatatttattgccaaaagaattgcttaggctaagtacggacaaattataaacatcataattaaattgtgtactaaataggtatatgcgtgtgtgtgtgtatcaaaaggaaagaagttttttcacataaaaaatgtttgtgtaaccaaaaagaaagcgttagaagacaagatagtttgtccaatcaaatttactacatatataattaattagtaatatcttaatatttaaaagtgtaaatataaattttaaaattctgtaatgtccaaagatattgtaaaacttattcttgttatattattctctgagataactgacctatttgagtatttatttatagtctacaagagaaaaacaaaagtggaatctatatattttctcaagaatatgctgtagtaaaactttgaactacactaatattaagatcgtttttcttaacaaaatgagcgtatagatatgttataaccttataatgtatttttggaatagtatgttatttggtcacatctgtcgaatagtgtgttgaaaatagaaggtaaagtcacaatctaagatggaggttgatatgaactagttggtccatatacggcaagaggctatgtcaattgcttaagaatacctataagactctaaatgtctatggctactttaagaggatggaagatattgcatgcttctttacaaggatacatacatagatagattcatatacatgtatgtataacatcgtggggtttgtgaaataggatattatgaaagaagttacatacacatatacacatgtgtttttaacattgtgagtgtgattgtgtgaatagaagatatattggctcttcaaacttctgccccaatctagaggatttggtagatatacactttgcttcatttcgagtgcacgtctccatagtccatactttgctccatcttctaatttatccaacaattttcatctttaagaggtaaatataagtagaagtgtttccaattcattgtgggttgaccaataatattattgactgtgttattatcttcgttctatataaaccaaagcttagtagaaaacttaaatttgaatttcgtttgtgtagtttatacttaaaaaaatactgttcaattgaaataaaatgggtagactaaattaaagttgtggccacaatacaatgtttattacttaggcggctgttttttttaaaataatattatagtgaaataactcaagattttcatgtagatatataaagtatattttaaatggtgcattgaaaagttcatgtaggtctcaaatttttgtgagcttatcattgagtttgagttcttgtttcttggtgtcttggaatctggattcttatttttgtaagcttatcatcgattttctgaacaaaaatttaaatttccgaatttctcaatatcaacaagtctggaaccctatataaattgaagaaacaattatttcaaccgcctatgtttattaaatagagtgtaaaatgatgcactgattttttttttttttttataaatgtaaatagtatcaaaatcacttgtaatgccgttttcgtttttttttctttctacaatgccgttttcgtttaaatcaaaatgattgtgtttaaaagatccttcaaaacaatttaacactgttattctgttaactttaggtgtcgaaatggcggtttttagttagattttttttttttttgcagattcagttttaaatccatttttgcagctaaattgtttaaaacagaagttgcttacattactttgcatttttttcctataaagatttatatatacacagacaaaacaaagagatccgttacaaaattatacacaggagtggagatgtcggctaaattcgaaatgattaaagaagacttgtgacatccgcatgatttcacccacccatttactgtttcttccacttctcaatggctttgagagttgatacactctctatctcacactatcaaggccctttctagaattatcgttaaccaaatcgataacggtttttctttagaccgtagtataactaaaaagctgtgcgaaaacgaaaatttgggacgggataagacaaaacagaacggagtggaactaaaaagaatttgtccgtgactcgtgggccaagcccattagcaactatgagtgatcgtatcaaaactgataaacaggcaactctcaatttttttggttactccaacttgtaataataacacttaacacttcaacaaacaaatgattaaaatcactaaatcttgtaattagttgactaacaatttatactaattattaaaggtgggcctataatccggaagaacaagccaaactaacttttaaaagttaaactctcgttttgtttataaatttgattaggtttattattttcaaaatcaaaaataaaacgatcgaacagtgatttatctataaccatatcaaactgaattaaaaaagatttcatttaatttcatttttttataaaactgaaaaaccttaaaccggatttcttacttctaaagttctactaattgttttaaattgatttttccctccaaaattaaccaaaaatagcaatcgttatgatcttctagaaaagattgactttagattatttacttttcagtaaattagtatgaacaacattacatattcaaaaataaattacataaaaacaatttatttggctaaagcaaaagatgaaagtaagttttctggtaatgattcttgacttttgcgttaaatggtcttcacgaaagcagcaaaacgttccaatcctccacgaataatcttctccataaacggtttcattgcctaaattttttgttaaacacaaataaatacattaacaggtttaattataagtcatgatacacaatttgtcaaaataggcttacaaatgcaactggagcaaaagcatttggaacttcatatgaaaaactaatctgaaaaaaaagaagaagatagtggctaaatgaaacttaacacaatttgaacttttatcatacaagtgaaaaggacaagataactaactaacctctactaaacacgaggaagggcctcttgggaaaaatcgaacactgcctctgtttttataaataaagaaaaaatattgaagttgaattaaacgatcaagcaatcactttcacagagagattgaaactatcgttctgttttctaaaccaaatttcttgagtttacctattttcaaagccttcgatagatctccaatgtatctttcgatctggaattggctgttaggaggataaaaagattcattgaaatgttaaaaatctctaatcaagaaagaagaatctgattggttgattgatataataaaaattttacctgtaaattttttgcgagaaagtgatattcaatattttgtccaaaagactcgagttttaccaaataacgcgataggtctggactaccctccattgcctacgaggaagcaaatgatttgtgagcaacaaacgactctgttttttagagttaaagaacaaaaaaaatacaggaaaatgttatttaatacctgaactttcaaaaaatggtcaaattaaccgtgaattcttgaaatgaccgttttatacctcaacaaatagttgatttctaatttaacctataaattatcgttgattcggccaaatcgactcaccattaacacttcttaacagctctcctaatagcgtaactaacaattgttttcgtccttaaaccaacgacaacggctgttaggccatgttttgtaatggttgttaggagcgctattaagaagtgttaacggtgagtcgatttggccgagtcaacgataaattataggttaaattagaagtcaacgataaagtataggttaaattagaagtcaattttttgttgaggtataaaacgacaatttcaagagtttacggttaatttgaccattttttgaaagttcaggtattaaataacatttttcccaaaaaaatacctcaacagatgacaaaaatggcatccacttggggaacatttctcgatctgcgtataacttgtaagccacggaagctggtgcatccaccaccatctttaccctgcttaatccaaaccaaagaatctctctgaaaagtatgaaacttaatgaaaacaagtatagttttgttgcctggaggaacttacgtgacgtcttgccattgcataacgggtctgaaaggtttaggagaagaggaaattaagagaccattgttagagttcagtagttttgcagagttagctgatgaagaagacaacaataataacattcgtggagaagaagaagaagatcgatgaagcatagataaaacagttgcagactttgggatttttctgaaacaaagtgtcgatctggttgttgaaactgtgccagaagctattgatgacatctcttttgatcttgagagaaagagatttagagttgatcaaaatgagtgttcaaagatttaagatgtaaccttgtttttccaaagagacaagttaggaacagagacttttcagcacccattctcttgaatgtgttaggacactccacgcaaagtgtgttgtcgtgtttagacaaataagttaacattggaaagagaaaagctctctttgccgtgactttgtttcttgtttggttttgttttgttcttttttggtttcactcaaatcaaaaacaagatttctggttggtttattgagtttctctttttcttggtgacctaaaccacacaacttctgttatgatagaaagaaatatttgtcactttaatcatacaaaagttacaatagagatctccctaattatgagatctggtatagttttcaaatcacgtatataccaagagaaagatgcatacatatattcctgcaaaagcaaagtgttgatttttcagataatgaaatggtttaagtggagtttagaataaaaaagctaacctttttaagtagttttggccaaggctgcaaatcgttcaagtccacctctaagcaagctt

SEQ ID NO: 1108 - DNA, 121668 bp, Arabidopsis thaliana
aagcttgttgaagtattaaaactttgctaggtaaatttgtttgtttgttggtaaagaattcacaatcagtttctctaattaccgaaagaaacaaaacaggaaagaatattgacgttttattttatggggggtgcaacactcctttcaaagaaaaatatttgaacaaatatgtaaatgcatgtttggtgtaggtatatttgtacaactgacttattaggtgttaatttatcgtttttcgttgttgcaaacttgcaatatgttgacaaattgttcaattatttgtcagcattaaacattttctcaaattatttaacggataaaatcatatcgatggttccaagttccaatctaactatagctctctttttaaatacaattagtccgctttaaagttttataatcaacttacattcaatgcattcgtgactgtatctaattgctaatgatctaacgtaattataattttgtctgcttaatatgtcaacacgcagtcacgcacgtaactaatgaaattgtagccgttgacatttgatgacctcacacacttcagagttcagagtaaaccgttttaattaattactagttatcaataatttattggaatgtcagaaatatggaaacgttaaatcaaaatgttaaggaacacagtttcacggcagaacggtccgaaaacaaccgactctggcctagatttgtataacataatatctagttgcattttttattccagattttcttaaatcttaacgtggtacatatgccataggctcacagctccttcacaccaatctaatccgtaaacaacatttactttattttacttttggtcaatcgtagacatatggcctagaagaaaaaaaagaagaagacatatggcctatgggccaggtgttgcgattataatagcccaactactatattgaactgaaaggaataaatgaaggtgcaaggcttatcgactttgtaagttgggccctcaaagtttagcccattttcaaggagatgaatcatgcgtatggacaatagcaactttaccaaatattacgaaaagacccttaatttattcttacttttacgattttcaccttgatttgttattagtttggacacaatgcccacaactctcacatttgttctttcgctctccaagctccatctctttcttcttcttttttggtctgacaaagcatatgcatatctcattattattattttggtcattaccacgtaaaattgactggacgtttcattggatttttatttattttatttttcattttttaccatatttgatggacacttaaaatgtttccactgaattcggtatggagtgattgattacaaaacttttacgatttcgagattgtgttaacaatgagcaagcaatatttacaagatcccttcaaacttaactttttttacaaagctacgtaaacaacttaaaaaaaatcaatcacacaaaaaaaacaaactaaacttatcatgttatttaacaagtataaaggtgtgtttagttttttcgtaatttccaaatattaatgattctgtttgtttggttcatgtgactaactaaccggtttagctaggaaagagaaaaccaaatctttgctctatataaatagctaaatctcctctgctcacctagcagcaagcttcttcttctgcatactggtcattgattggttaatcagagctctctcttttcttttcctatctctagagactagagaaatggctctctatctctcttcttcacgactcatcacctttctctctttcatcttgcttctctccaatggcttctcgtcctcttcctctcgccctagcatccaccatcgtcaccacctggacaaccacaattacaaagacgctctctccaagtccattctcttcttcgaaggtcaaagatccggaaagcttcctccaaaccagagaatgacttggagaagcaactctggtctctctgatggctctgctctcaacgtaaatgacactactttctcttgctttgttgttgcttttatggaaaatgtgaaatgggtctgttctcgattaacatgaatgctagcaatctaggttaaaacttaacatatatcatcaaaaaaggttcaaactttatggggttgttgcataaaacagaggaatcgaaaccctaaatttgtttattatggtttttaggttaaatttctctatcaaaatcataaaaaaattcaaacttaatgggactcttgcttagaacagaggaattgaaaccctaattttgttattatgctttttaggttaaaacagagaaactaagttacatattttcttggaaagcctaatttgtgtgaattggtttaattttgtaggtggatttggtgggaggatactacgatgcaggggacaatatgaagtttggattcccaatggcattcacaaccacaatgctctcatggagtttaattgagtttggtggtctcatgaaatctgagttaccaaacgcaaaagacgctattcgttgggctactgactttctcctcaaagccacttcacatcctgataccatttatgttcaggttttttactttgctctaaattctctcctcgaaaaaaaaaaacaagactttgggaaacagagtggtttaacgttagcgtgttcataggttggtgatcctaacatggaccatgcttgttgggagagaccagaagacatggacacaccaagaagtgtgtttaaagtcgacaagaacaatcctggttctgatatcgccggtgaaatcgccgccgctcttgccgctgcttcaattgttttcagaaaatgtgatccttcttactccaatcacctcctccaacgagccattacggtactgtaaatgtgtcatttttcacaattaatattcttcatttagtaaacctatatttttcaagttttataattaggtgaaatattcttcatttaataatcatttggctattaattttttttttttaaatctatatgagcattaattaaaaagttgcatttgtgggtttttaaggtttttacatttgcggacaaatacagaggaccctacagtgcaggtctggccccagaagtttgtccattctactgttcttactctggatatcaggttcaacattttaaacttttgaagttggatctatattaatttaaagtgtaactgtaatctcggaaaaaaaaactgaaattgaagtcatgtttttggttttggtttgttcaggatgaattgttatggggagctgcttggttacaaaaagcaacaaataacccaacatatctcaattacatcaaagctaatggacaaatccttggagctgatgagtttgataacatgtttagttgggataataagcacgttggtgctagaatccttctctccaaggttatacaaatctttgaaactaatcaaagattccaaatttagaccattggttcttgaattcttatgaaacattttttgtgtgactttgttttgttttttcaaggagtttctgattcagaaagtgaagtcacttgaagaatacaaagagcatgctgatagtttcatttgctctgttctacctggagcatcctcttcccaatatacaccaggtttttgcatatataccactcatcttctcattgaaatttaaaaatcaaggaatttatgatatatgtgtatacatatttataggtgggctattgttcaagatgggtgagagcaacatgcaatacgtgacgtctacatcgttcttgctcttgacctacgccaaatacttaacctctgctcgcaccgtcgcttattgcggtggctccgtcgtcacccctgcccgcctccgctccatcgcaaagaaacaggtttgtttcaaaaccaatgtatattgactctggtatactttggatgtcaaaatcaaacttgactatcaagtaaattttcagttaatgcacataataaatgtgacaccatctgcaagactacagcataccaataaaagaattaagaatctatactttattataatgataattagcaaaaatgaaataaattttgtattttgctaaagcatgaattaattaatatcccaatataaaatggaaagagtagtatttgcttaattaattgattcatgtgatatatgcttcaggtggattatctacttggaggcaacccgttgaagatgtcatacatggttggttatggtctgaaatatccacgtcggattcaccaccgtggctcatctctcccctccgttgcagtccacccgaccaggatccagtgccacgacggcttctccttgtttacctctcaatctcctaatcctaacgacctagtcggtgcagtagtcggtggtccggaccagaacgatcaattccctgacgaacggtccgactacggacggtcagagccagcaacttacattaacgctccacttgttggagctttggcttatcttgctcgatcctaaggccaactttaactaagcttaaaccgcatttaattgttggtttacaatgttaattagtagtaatgattttataaatgaatggccaagattgtccgatccggctgaatgaatgttttagatgatgtggtatttgattttaattttctaataaaaaaaaaagtagcatttagaagtgggaatgggtctatgaaatgagattacgtcaatatgagtgaaattgataaattatccaatcccataaacgagatggtgaacaaatataaatttacatttactgctagtaaatacaactacaattactttttaccacgcaaaaggagagaggagagatttttttttttttttttacttcgtaaggataatatgtacttagaaaataatatacagtgacgaaggatgatgaatgctttcatgggaaacgagcaattgaccaggttgagagagatatgggccgattaaagctgtcactgtctctgttatgacagaactaagttcacgtttacgtgatttaaatttttattgatagaggagatgattgtgtttacaatcactgaattgttactgattttactgtgaattgcatatcaattggtaaacctgtaaaattgtcttatcattttgtggattaccaatcatatttatgagaaatctcaattccatttacataaatatttaaaagacaattacagaataatttagctatgacgctccgacataatcaacaaacaaaacaatattttgcatctgtatatatatatatacaaaattttgttacacatacacataattttgaggaagaaacaaaaattattatttggttgcaattttagactgttttataattaaccgagtaatattgatcattctcaaccacttaatcaattgattctttttttttttttttttttgcttgatataaaaaaagttacggtaaaattggaaatcgttactacctaagattggggtcaacaatccgtaaaagaagatggaatcacacactgtaataccaatacttttctataaggaatcaaatctataaatagcatactaactagcactataaaaacattatgaatcctcctatgagcaaatcacttttaaatttgttaacactcttttaaaagaacaaaaaaagcaaaaaaaaaataaagatattatcaccatggctaacgcaagaagtttggtcgccaaggcaaacaatattaacgtaggttcattgattctaatggccttggtgtttggttcttgcgtggctaatggtgaatatctcggcggccgccgtggtctcgctgctaattccggtaaccccacggtctatgatattactaagtttggagccgtaggagatggttccaccaatacttttaaggtaaagtttagtttcattttcgatccataacctttttgagtattttatagtaaaatgcatgtgacattctaacgattgatccaataacattcatgcaggcgtttttgaacacatggatacaagtgtgtgacagtccagtaccagcaacgctactagttcctaagggaacatttttggctggtccagtcattttcgccggtccatgcaagagcaaagtgaccgtcaatgttataggcacaatcatcgctacgaccagcgggtacgcaactcccgagtggttcttgttcgagcgtgttgacaatctcgtcctcaccggaaccggcacattccacgggaaaggtgaagctgtctggaaagcagatggttgtggtaaaaaggtccaatgcaatcttcctccaacggtaagaccaaataactatatattatttcaaatcatgtatatatagatacttgcaataactaatcacacatttgtacgcatacatgcagtctctcaaattcaggaacatgaaaaatgttgaaatcaatggcataagctcggtgaacgcaaaggccttccacatgttcttagtcaaaactgagaatgttaacatccaaaacattaagcttaccgcaccagctgaaagccccaacaccgatggtatccatttgagcaatgcagacaacgttagcatcctcgacagtaccatagcgactggagacgattgtgtttcagtcggtcgtggctccaacaacgtaaccgtcgaacgtgtgatttgtggtccaggacacggtctaagtgtcggtagtcttggtaagtacaagaacgaggaagacgttagcggaatccacgttaacaactgcacgatgattgagaccgacaatggtcttaggatcaagacatggggtgggtcagacccaagcaaggctgtggacattaagtttgaaaacatcatcatgcagagtgtcaagaacccaatcatcattgatcaaaactacggttcaagaggcggagtaagtatatacatcactgaaaatgtctcaaaccaactattcttttgaatatatgcgttaacaattccttttttttggcatgttttgtaggattcacaagttgctataagtgatattttgttcaagaacattagaggaacaacaattacaaaagatgttgttcagattatgtgtagcaaatcggtgccgtgccaaggagtaaacgttgttgacgtgaacttggactatgtaggcaagacaggaggagagaagaagtcgtcatcaggcggtttggtcggagctctttgcgataacgccaatgttatcttcggtggaaaacttagtttccctatgtgtcccaaataagctttttggtataaataatttaatattaaaaaaaaaaatcaaaagtttcacaaacattgttttgtttgtgagttagtttgggaatttatcaacaagaaataatcagtggaatatttgacttttgataatgttttttttcccgattttttttgattttttttttggttttatgtataaataaacagatccttcagctggttgcttaatagtttctggttagaaaatttggtctgtgggtattagtgtgtacaatcattttattgctctatctaaagtcatcgatttctttctttctaagtggcaaaatatctctttcataaaaaaaaaaggaaagaataataaataaaaatatctctttcattctaacttggcattaaaatttagcaaaaactatttgtggaacttgaaaaaaatattactagctcagacttaaacttaaatagtaacaagcatattaaaagtcatgctaactgagatattgatttcctcatctcaagaaactatcttatgaatctgtttccgattattttagtttcccatcaatcatctttaatttctaggaagtttgattttttgaaaatttctccacctgcttaaatttcattacaatttttaatcttagataaacaactgtaatttatgcaaaatgaactgattatataagtcgttatgaatatttatattttttaaaaacatttcagcaaaactgatatactttttttttttttttttttgcaagcaaataaacaaacttccttgaataaaacgtgaaaaataataagagtctttaaagataaacgttgttcatatacattacgtcatataatatatataacaattaagacaatacaaacatatatacaattctcattgggttgaaacattataaagataagataaacatctgtatatatacattggtatacaatatttttcataaatttttttttctctaatcgacagttatatatatacagaaccataatttttaaagcatgctttccaaagcggtttttttttttttttttttttttgtaaaccaaagccgtgtttctaaacctcaatttataaatttggtgtagcttttcaaccttgatgaaattattacatagaatcattcgttaaaagacttataattgggtttagaaaagcccattttaaatttaaagcccaatatactgctcgaaaaggaggaaaccctagaaacattgtggtatataaattcttttcgtctcgttcgctaatcagttctccgccacaccaatctccagaaaaggggagaagcaaaaatggtttctctgaagctccagaagcggctcgccgcatcagtgatgaagtgcgggaagggcaaagtttggctcgatcccaacgaaagctccgacatctccatggccaattcccgtatgttgttgcttttttcttcatccttttacttttattgttgtcctgtgtttgtctgcgacggtggtagacggtcttaggtgttgaatcactgtgtttgtttccgatctgaaaatttagagcttgtaggtgttgttacggtttcatttctctagttataggccttgtagaactgtgatttgtctcgtgaatcaaagctagaggatttgatttctgatattgcttcttaatagactgaggatttgaatgatgttccatttcgagtattgttgttatatatttgaagatctttgtagcttcaaatattaagaatgtgatgattggtgttgaacttattgtaggccaaaacatcaggaagcttgtgaaggatggtttcatcatcaggaagccaaccaagattcactctcgttccagagctcgcaaaatgaagattgccaagatgaagggtcgtcactctggatacggtatatacttcacaactctgaaaatccctctatttaatcgtgattttgaagaatgattagcgttgtttactcttgccttttttcctgtgtttatgattaaataggtaagaggaagggtacccgtgaagctaggttgccaacaaaggtactgtggatgcgtaggatgcgtgttcttaggcgtctgttgaagaaatacagagagacgaagaagattgacaagcacatgtaccatgacatgtacatgcgtgttaagggtaatgtgttcaagaacaagcgtgtcttgatggagagtatccacaagtcaaaggctgagaaggctagggagaagactctgtctgatcagtttgaggctaagagggcgaagaacaaggctagccgagaaaggaagcatgctaggagagaggagcgtttagctaaggtcagagcttaacttcttacaaactttataaagtttttttttaattttgatcagagattcttatgtgttgtggattgtttgcttgtagggtcccggtggagatgttgcgcctgtagctgctccagcacctgctgctacacctgctccaactgcagcgtaagtgttatttcaattttgttgtgaattgaatttgtttcaaattggttaacatctatctaaatcgtgtatgtgtgtttttttgcttgtgcagtgtaccgaagaagaagtctaagaagtgaagaggatatatagtgtgaagctatatcgatcatcagttcacggattagactctgaagaaggttttgaatgttttatcgaatgcgtttgtggaataacttttattttcgcaaagaacataacttatgtcagttaatctttatgctttcagatttttagcttacagtgtttcaacagacctactttgcaagttgttctttttttggtttcttattgtttttcgttcgtcatacgcaattacaaaataaccatccattaatccatccataaattgttaaattttagaattaatatatgcaataacaaccatcatctatttcgaagtgttgtttattttcttttgactttcgttttgttgattcttcactctactcctccagatgatccaacaagtggtccacctcttctgtctgctgagagcttttagtagaagcgttatttgataataactgtaatacatcaacccaaacgatactgatatgttttcatttcaatcctttacattaatcaaacactaataacaaattcacagtaacatatgaaaaacatcactgtcattaaatatcagtggaggtattacgtaccaacctgtaagcgccaattcataaaacactactaaccaacacccactcccatgtttttttctagcttttactatacatggtatactttcattttcttttagataacagctaaagctttttacaactcgtatgcgagtctatgttctccttgttgtcttattactataacgagcaaatatgtgtttgacaagagaataagacaaagaaaaaggtctcacattgacacgacttctatacacacaccaataaaccaatgtgtgtgattttggatatgcgttggagatattaacgtatacatttatttacatgtaggaaatacatagctgtatcaccaatatctccaacacattttatcacgtttaatccaaaaactacaattatctttctttttttttaattattatcataagaaaatgtaaaactataaacacatgtcaaaatcaataatgttacatatatcaaaatccaataaaaatattatgattgaatatgcgtggtgaattgattgacatgtgtcacaaaaagaaattacaaactttgaaaagtctagcttatacaataagatgatatattttaataaataatatatgtgattcttttctttttagtattataaatctattatattatcttatttcaattgatataatttaatacactttttcaaaaaacagtgattgtaatacttttattattatactatctgtaatttattagataattttccttttatttatataataaatgttctttttaaacttgtattttgggttgacaaggcccaacaaaagcccataaatgaatttcggatggatatatagaagagaaaggacatttcgcctgcatgggtaaaaaactcaacaaatcctgaaaacaacaaattcccgaatcacacagcgaggaggaagagaatatggatatgagtgtgattatgaggtatggggatgataaagccgaggagttatgccttgaagtggaggattactgggctcgagtggatgaatccgatgtatgtaattctttcattttcttaattgttaatttagaggatttttacctttgggttgttcaagatgacgactgttgttgcatgttgcttaaatttgtcacaaagattaactttaatagatctgcttaatctatgattgttctgtttttttgaacgaaaatttctcttcttgctaagtgatttattattaattttttcgtaattagggtttcgatgtcgagggaatccaagcaccaccagggggcactccattgatacactacgactgtcatctgcccaatagtaggcatcctgatcctgtattggtcaagctttatgctagtgcggggcttcatcgctacaatatgttggaggtaaaaaaaactccatcgtggtaacagaatgcttgtgtacatacatgacatttaattgctctctttttctcaggggacgaacttcaagctcgttgatgtaatgaaattcaacaagttaatgatgcatttgtcccctttctacataactttacttgcacaagatccagttagccgttcgcagcaaacctttcaggttcaagttgatgaacactgtcttagcactatggatttgacggttctaattgctagacctaaaggtaagtaaacattgttgttgttgttgtttttcttcttctatatatatacaagtagactataaaagtaggtagtctcatcacttgctgataaatcatgcatgttgcatatatagctgtgtccaccaatgagtccgtcttagctccgcagagtttttcagtggaagaatcgcctgagtggccgtcagatttcaatgatggaaaacgattctaccgggtaagacacagcatcatcagttttgttttgttcatgatcgattataagcaggactactgatatgtttttttattatttttattattgctttttcatttaggtgaaggaatctgagttgcgtaacaatgattggatttctctatatttgcaacttgtactcgtatcacatgataggatgagaatctcagatgtaagtcttgactttttctttaattgtatcttttttgcatatcaatgacacaccatgagttggtgataatcaataacttttggttttgtttctcaactgttgttggtgcagagcgatctgtccaagctgaagattgtggaagcggtgatagaaaccaaggacgatatgctgccgccgaatgagagactactcaatgccaaaactgcaattgtgtacataacttttaagggcttcaccaagtgtcggattggtgatgagcatactgaacgcaaaactatagttagaagaatattcgatgaggatacaggacacctttctatcaagggtgagttgattggtgagtacaagcttggaggggactttgaccctggttgttatttcaactctcccgcgattctagaagctaggcgtatttgtcagggcctgccgccacagccgttttgatgccttgatggactatatatatatatgctgtctgcctggtagcaagagttacattttcaaatatggatgctgttattttgtggatttttaagtgtctaatatattatcgaatatgcagtgttttgtggattttgaagtgtctaatatttattgaatacagtaagttaatatatatatatattatatagacaaattgacatatatttttggccaaagtatctcccttggattttgatcatactctgcgaatgtgattcctttcggttttgatcatactcgccaaagtgcatgaagaaggttttttgaatgtgtttcgtggaataacatttattttcgccaagaacataactttatgctttccgatttttagtttacagtgtgttacatactctgcgaatgggcccctatttactctgtttatgaagtcaatttttgaaatgttggatgctctcgaattggatttgcagttacgaacagagaacacttatacggacaaaattctgaggttcgttatataaagcagtgggaagttaaacaacgttgtagtaactgggttcgttagcgtgttaaaacagcatgctttcaaaaagttgcatcgcccaccgtggggctcgaacccacgaccacaaggttaagagccttgcgctctaccaactgagctagacgggcttgttgactatattgcacactattgttatactcatataaaaaaaacacatcccaattttaactagatgcaggaaagaaatttgcaaggacggtgctctgcgacaaaagattcttgtgaagaaacaaactgaaaactcatcagcttatattataaggctaaagctagtgttatgtctgtaaaaaagatgcatatatataaatagagctgaataaaattacaacaatgacaatcacctgcctttcccattggcgacttcacatctttattttactcagaagagtcacattcatcatcaaacatggctgatgacaacagtccctgtacaaactcacacttctttgccttctccaatttatcactatccgataaaggacacgacgatgtaccctcttttgctgctgacgaatccttaatcggattcttgtcttctacacttgaatcaggcagcacaagcttggtctgatttggtaatgcagaattgttgatgaacgataaaaattgatcggaaacatgtttagagggatgctgatgatgattcatagatggtggcaactcatcaagatgaggttgaagatatttatcagataaatatggatcttccctgtaagacatttccttctgctcactgtaaaattatcggtcaaggaatttcaaataaatcacattcattatagcgacggaaatttgacttgaaaggttttgaaaagaaacaaaaaaggatatcttcaagacatctctatgatgtgatgttatatgatccaccatatgcatcttcacccttttgctacatacaggacatatctacaaaaaccacaaaacaaccaaaacgaattgtaagatgatgctaccacatgacaattcacggaaccagattaataatgttccatcatactacttatatattcatttctttagctcgtaaaaccaatctatgcttcaaaacagagagctcaagtcacctactctctatagcaagtatgtaaagccaaaaaaagtgtcaaaagtattaatatcctaaaaccttaaactgatcaatggagagttatgtaaaacccaaagagtaacttaagataagagtggcatgtttctctattaaaactatttgcaatagcaatcagattctcaaacgcatcaatctaaaacaaatcctaatcaaaattatagattgaagttatgtttcccacaatccgaataactaagctgtgtaaaactgcttcatgtgaagcttgagtgtgaaatgaaaagagcaggagagataggaagtgaattcacaaaccccattgttagcttcatgacgatgttcttcgtcgatatggtgacacaattcaactaaatcataatcacttgcgcaaaacgggcatggatactccactgctatatcgtcgtcaacttcttcaaactcttccaaatcttgataaggccctgaaatattcaccactaattaactcgagagcaaaagagaaaaaaaaagtcttctctcatctaaaaagcaaaacgtaaagctacaatttttaacttaaacgaccaactacaaaaagtcatcaaaacagaactcaactcaatcgaaacccaattaagaccaatcttcaatcataaaccctaaaaatgaagtttgaaagaaaaattgaggggatttggataataaacctgattgatacttagcagcagtttccgatcgatagcttctagaagaaccagatgagctaacgcaccacatatcgtcttccatctgctttgtcggagcctttcttatgtaaaaatctcagataattgatgagagaccttcttcgtcgtgtcagctaaatacccaattgtgtaagagatagcagaaagaaaatgtcaagaaactactccacggaaaggccaaacctttttttaatccgccgagtcttaatggacaagaatacttcgggtggtaagagtgaactactattatacccttacattgcactgagcctttttctcagctaactcaggggtgtttttgtccttttcttgtaaggatgttactgttattgcattgctccccaagttaattatcagtaaaggcctgacttgaaattatataaatgggcttaaagtcaagattttgaaatgatataaatgggcttgaagtcaagattttgaaattatttaaatgggcttgtaggcctaataataaaagcccatgttaaaatctgagaatttttagattctgatagacggaaaatcccaattttcccggaaattttcagacaaaatcgcgttgagattcaacaactttgagtgagtttttttttttgtcatttacctttgtcgcttcgacgtgagacgagccgtggaagaagacgaaagggctcttaagctctctttactcttttcttctcctcctctttttgagatgggaagccctaacgccgccgccgagacggatctaacaaccgatgatttcatcggagacacacgacgggactctggttctgatacagagaccaacaccgattgtgacggagaagatttgcctcttcttctgctacctgctcctcccggccacttcgaagaaggagagagagttttagccaaacacagtgattgcttctacgaagccaaggttagtgaaatacactctctgtattcttgaattagagtgttcttctctgcttatgctttatgtctctgatcgtttccttttttttttttataataatattctcaggttcttaaagttgaatttaaagacaatgaatggaaatattttgtgcattacattgtaagtagatactgtatatgtttaaaatcattcttttgagctattttgcttctatctttagttttgaagatgtaaatgatttcttttggcagggttggaacaaaaggttagagcttcatccaatatagttactggcttctaatcggtttgaaatcatttgaaactatttataaataagagaattcttcatatggtgatttactgatttgtttgccaagtctcagttttttgataatgtaaaaaagtctttgactcttgtatctcttctatacaatgatagttgggacgaatggataaggctggactgtctgttgaaacattcagatgagaatattgagaaacagaaagaacagggtttgaaacagcaagggattaagagtgctatggcttggaaagtgtcaaagatgaaacctagaagccctaatggtcagtcagcttcttcttttgtttgttttgcatattcttgtctcgatggatatcttgctgcttttgtggatattcagagtctctatcagggactctcatttggtcttgcttgctttattctatgtcgactaagtagaagttgttgagattaaagtatacatacacatctttcgttgttagttgagatattgtgtcagttgagatattgtgtcagctgagattttgttcaatattttcttaatttttgcagttgctagaggaagaaagcggaagcaagattctgttgatacggtaatcgctcctttagtggatgtatttgcttaatctttcagcttccaaatatccagggatttttttaatcaggggagtcttactcatgtcttgttgtttgctgaatacaggagaagaatgtgcttccctctgacaaccttttaagtttcaatattccaccagcattaaggaagcaacttcttgacgattttgaatttgttactcagatgcagaaggtatttctatcagcctgttatttcttctctcaattctcaaacggtcttttctgtgtgttttgacgcagttgaccatagtcttttgattcatttagtcagagaaaaaatattcttgtagtcgcatgaatatatttgttgtgaatgtcatatttaggtgcatatgttaaggaatttattttaagtcatttttgggaattgtctgagcagcttgtgcaacttccgcgttctccaaatgtggatggcatcttgaagaagtacattgacagccaaatgaagaaacatggcaggtaagctctttgtggattatagtttctttctgctgtcagtttccaacagttacacttgttaatctcttttgttgctattctcatatacttaaagagagtataaatcatttgtatatgctccatggataatttggttgacagataaagcgtattccaagcttctgatatatctagtactttctttggtgaatctatatagggtaacagattcattagaggaaattctgaaaggcttgcgttgctactttgacaaagctttaccggtgatgttgctttacaacaatgaacggaagcagtacgaggaatccgtatcagggggtgtttctccttcaactgtgtacggagcagagcatttgttgcgactctttggtaaggccagtttttgtaatctgcaaatctgcctttatcatgtggtttagttgtcaagataagactatataaatattgagttttgcagtgaaattaccggagttgctagtacatgtgaatatggcagaagagacattgaaggaattgcaggacaactttgttgatattctcaggtttcttcttcttgttctcctacttaactctttttacaagtatttaaagacaaataacaaaaacaaaatgataaagcaggttcttgaggaagaatcagagtgtgctttttgtatcgacatacaaagcagtggaagaaatggagaagaaagaaggttaggaaattgtgcctaatgacgtgttcttgtaagtatgtgcagcgaatcttctctttgtagtattttgtaacgagacctaagaccatcctgaccatccttattgatggtctcttaacataactcttatgttaagagatatgtcttataattaacaaaagtgacttaaagtctcttatataagaaattttgttagttataaaacatgtctcttagcataagaattgttttaagagatcatcaataatgatgatctaagaactattatactatgttccgtctcgattttgaaagtacttaaacgtcgttatcgtgtttgtctcggcgttttaaattccactgtattagtaagaatttatttttaaaataactttagtcatttttaattatctcttctcccttttcaattattaatgatcatagtaacttctcttgatttgtaaatatgctacatagttgatcttttgaatatacgaatgaaaacatattataatagtatgtgttcaaaatcttttgagttttatgagtacagaactatatgtttaatgggcagattagtatataaaattaccagtgcatcagaaggaataatgatctactcgagtagtatatcaaaataatactattcaaatgtataccaacgacaatgagttcaaaatcatcaaaccccatgggatgatgagcaaataatatttttatcagctactctatacatcatttgatgataatatgcaaaaattgtataccaatgagttcaaaattatcaaaccacatgggatgagaaaaaagcatattactatttttaaacagcttctccaatataaatttatttgaccgttacggaaagggagagagatacacacactctttctcttttattattttccgtttatttgacttttcttctttatagatcgacctggtcccacgtaatcttttcaaacttaccgtttggattcgataatcaccgtccgatctcacatgaagcaacgtgaataaaatgaacggtttagatctatcgaccgtttatagcaatacctttctcctttataatctctatatctctctctctctgaatttcgaaaattataatgctcttctgcttcgtactagctgcttcagcttcttcttcttcttccttagattcaaaatctctcttcttctgagtttctgattttcaagtttgagaactactcttttccttctaaatctttgatttttttctctcgtgatttttgtggttcactgctaattgtgaaccaaagatggtgaaatcagcagcttctcagtcaccatctccggtgactataacggtgacaccatgtaaaggatccggcgacagaagcttaggattgacgagtcctatcccacgcgcctccgtcatcaccaaccaaaactctcctctaagctcaagagccacgcgtcgcacttccattagcagcgggaatcggagatctaacggtgatgaaggaagatactgttctatgtctgtggaagatctaacggcggagacgactaattcagagtgcgttctgagctatactgttcatatcccacctacgccggatcatcagacggtgttcgcttcacaggagagtgaagaagacgagatgctaaaagggaattcgaatcaaaaaagtttcctctctgggacgattttcaccggtgggtttaaatcggtgacacgtggtcatgtgatcgattgttctatggatagagctgatccggagaagaagtcaggtcagatctgctggttaaaaggttgtgatgagaaagttgttcacgggagatgtgagtgtggtttccgaatctgtagagattgttactttgattgtatcacaagtggtggaggcaattgtcctggttgcaaagagccttatagggatatcaacgatgatccagagactgaggaagaagacgaagaagatgaggcgaaaccacttcctcagatgggtgaatcaaagcttgacaagaggctttcggttgtgaagtcgtttaaagcgcagaatcaagctggagattttgatcatactcggtggttgtttgagactaaaggtacttatgggtatgggaacgctgtttggcctaaagatgggtatggaatcgggtcgggtggtggtggaaacgggtatgaaacgccacctgagtttggggagagaagcaagaggcctcttactaggaaagtcagtgtctctgctgcaattatcagtccttacaggtaaagaacttttgctttagctgtttcttgatttagtatgtttttcttagaggcttactgaattaggatcatggaatagatttactatgtcgtgaatgtgctaatgtgttttgttttttcttgtgtgtgacgaaacagattactcattgcactgcgtctggtggctcttggtttgttcctgacatggagggttcgccacccaaaccgagaagcaatgtggttgtggggaatgtcaacgacctgtgagctttggtttgccttgtcttggcttttggatcagcttccaaaactctgtccggttaacagattaactgatttaggtgttcttaaagaacgctttgagtctccaaacctcaggaaccccaaaggaagatctgatcttccgggtatcgatgtgtttgtctcaactgcagaccctgagaaagaaccacctctggtcacagccaacaccattctctcgatccttgctgttgattaccctgtggagaaacttgcttgctacttgtcagacgatggaggagctttgctaacatttgaagccttggctcaaacagctagctttgcaagtacatgggtgccattttgcaggaaacacaatatagagccaaggaaccctgaggcctactttggacagaagcgtaactttctcaagaacaaagtcaggctggattttgtgagggaaaggaggagagtgaagagagaatatgatgagtttaaggtcagaatcaactcattgcctgaagcgataaggagaaggtctgatgcttataacgtgcacgaagagctaagggctaagaagaaacagatggaaatgatgatgggaaacaatccacaagaaactgttatagttccaaaggccacttggatgtcagatggttctcactggccagggacttggtcctctggagaaaccgataactctcgaggagatcatgctggaatcattcaggtaacttcttttgtcaaaattgtttgctaattgtctaactaatttcaggtttgtattgaaaagagagttctaatattttgtgtgttgctgcaggcaatgttggctcctccaaatgcagaaccagtttatggagctgaagcagatgctgagaacttaattgatacaacagacgttgacatcaggctaccaatgctggtctatgtgtcgagagagaagcgtccgggttatgaccacaacaagaaagcaggagccatgaatgctttggttagaaccagcgcaattatgtctaatggcccattcatcctcaatcttgattgtgaccactacatctacaactctatggctttgagagaaggaatgtgcttcatgcttgatcgtggtggcgatagaatctgctatgttcagttccctcagaggtttgaaggtattgacccaaatgatcgttatgcaaaccacaacactgtcttctttgatgttagtatgagagctttggatggacttcaaggtccaatgtatgtgggaactggctgcatctttcggagaacagctctttatggatttagcccgccaagagcaactgaacatcatggctggcttggaagaagaaaagtcaagatatcgctgaggagaccaaaagccatgatgaagaaagacgatgaagtttctttgcctataaatggagaatacaacgaagaagagaatgatgatggagatattgaatctctgcttctcccaaagagatttggtaactcaaactctttcgttgcttcaatcccagttgctgaataccaagggagactcatacaagacttgcaaggcaaaggcaagaacagtagaccagctggctcacttgctgtcccacgtgaaccacttgatgcagccactgtagctgaagcaatcagtgtgatatcttgcttctatgaggacaaaactgaatggggtaaaagagttggatggatctatggatcagtgactgaagatgtagtcacgggatatcgaatgcacaacagaggatggagatcaatctactgcgtgacaaaaagagacgctttccgtggaacagctccgatcaatctaacggatagacttcaccaggttctgagatgggcaacaggatctgttgagatcttcttctcaaggaacaatgcaatttttgcaaccagaaggatgaagtttttgcagagagtggcttacttcaacgttggaatgtatccattcacatcgctattcctcatcgtctactgcattctccctgcgatttcgctcttctcgggtcaattcatagtccaatcactcgacataacgttcttgatctatctcctctcgataacactcacgctctgtatgctatcactccttgagatcaaatggtcaggcataactctccatgaatggtggagaaacgagcagttctgggtcataggaggtacaagcgcacaccctgcagctgttcttcagggtcttcttaaggtaattgcaggagttgatatctcatttaccttgacttccaagtcatctgcaccagaagatggagacgatgagtttgcggatctgtatgttgtgaaatggagctttttgatggttcctccattaactatcatgatggtgaatatgattgcaattgcggtggggctagcgaggactctgtacagtccgtttccacagtggagtaagcttgttggaggagtgttcttcagcttttgggtgctttgtcatctgtatccgtttgctaaaggattgatgggaagaagaggcagagttccgaccatagtgtttgtgtggtcaggtttgttgtcgattattgtgtcgttgctttgggtttatattaaccctccttcagggaaacaggactatatgcagtttcaattcccttgattcttaagagttttttttctttcgtggtacaaggcatgaaagttcttctttctaggcttcagccttcatgtttgtaatcagatattataattacgatttttcaaagtaaagtctcaatttcttactttgttgttaattaatggttcaagtcttgacgaggatagaattatttacacagtcggtatatcttcggttaagtcctcatgggtggtcaaaagtcaaaacaaacaactaatgggccactattatagaagcaagcaacttcggtttagtcctcatatgatctcattattcaaaccacaacactgtcttctttgacattagtatataagtcttgcatcttatttagagtgtttgtgtttggttccggttgatctgtaactgagtttatgtaatcacacaagtatgctgtttggttttagtcagagatagtgtaagaagacatcatacacatgaaattggagaattataaggtaaaatctttaaccatagatttctaaagacttttgagaaccaaagtaaggactagagtctgcacaaaattacttataggaccaatcataaacaacaaaaacgctttaacctgagctatgtgtgaatgacctaactatatttttattttttttcttcccacaagaacatatttaaccgccggtacaacacttaaaacgaagttcactcttctaaattgtgtctacggtctggttgaactgtccgaagcaacactactatagcactctgttccggcagggtttactcaatcttcaacatagttgtttccagttgaaaaccaccattgcaactctgctatcttcggtttagtccccatgactggttgaaacaaacaaacttaagatgagattgtgattctgaacaatgcaattagtcaaatgaatatgcaagaaaaagttcaaaaaccgttttggttcccacaaaagctgatgataaccaacaagtatcttatgcatagctgtttctcaatgcagaaacaaggtaaagattcgagatccttttagagtaacccaactacaatcatacgtgcaaattctctgaaacccttttgcctttataagctaaatgcactaagaaactacataagaaaaggttaaacaatcactgaatcagtggtgttccacaatgcatcaggtccagtacggaccaagaaatatgccctaccactaacccaatccccccactattacaatctccaccaattggccaacaatggagtatttaactataaaggaaatcataaagcttctatcttttttgtttatgtaatgttatgagtgccaaaaaaaagccatacccagaaatggtaaaaacttcacatctgcttaaaagagtaaaaaaggcaaccccaccacgaacacaaagaatgaagattcctattgcacctttattgatgaacaaacaaacacaaacatgacattgcaattgaacagagtttttgtatagagagtttacccatgaatatgtcgaactcgaaattggcatcaatgggagtgtttatacaaatcataaggtgcccacaatgtgtctaaaggacatggaagcttggaatcgagtcttaaccatggcttaccactacctgaccagtgaagcaaactcacaggaccagaatgcaaatcacggcaactacctctaacattatcaccaccaagcccatgttgattccaccgatgtgaaatcggagctacatgaccagcaaataccagaagaaacggaggaagagaaccaagctcataaatcctctctatcttctgaatctccatccatttctcaattcgtttcgtgaacctaaattgtctccacttcttcaaatcaatcaccattacaccagtattgaagtaacaagggttcctccctttgaacgtcccgttaaacctcttatctgaccaaaaacctccggtgaagtatttcgtgaaattcgcgtgacaatactccggagctccgattgttctctggcctaaacccgttttccaaagcttgacgatatcatcgacgacgacgagatccgaatccaagtagatgactcgcttaacgcaaggctcgagcagatccgccaagtaatttctggcgtaattcaacggttgctctagggcttgtctcacggaagatgaaatcaaagactgtacggtctcaggggcaaaatagtaaattttgagattcgtcaatttggggaaagtagaacgaatcagagattctaggttttgagactcggaggagacgaggaagtggaagaagacgctttgagggcacattgagtgctggaggatcgaattgacggctgcgattgagccacggaggtaatcgatgtcgagagtgatggctacgtggacgagattagggttacagacgccggaatcttcgccggaagatctgcattgttcggcgttacggaacattggagattctctgaaggaggagtaatcggagttttgttggggtttgaattcgtcggcgtaggggtgagatgatcggatagctgccgccggagaaaaggattggagcgaaggagaaaggagaatcatggctaatgcggcggagaagaaagcagagaatctcgtaatccaatgcattgcgaggaatgcagaagaaactacgaagcttcaaaatttctgaggaaagagcaatcagaaaactttcatggtggagaagaaattgaaacaggcgtaggataagaattctgagaggcacatttcgcatgtcaatgctactctgcgccgtctctcttctcttctcctctgcttttactggagtgcgctagtttaagcttcaaggacgaaggagatgaagaagaagagataaatagttaaaaatgtttctgttttttcttttttttactgcaaaaaaatctacagataaaagtgagagagagaggggagtgtaacatttgtatttatagtagttgaatataattattttaaagtgtgttttaaatatatattttttgataattaaatgtggattatttaagcaaaagttgatacgtgaaagtaaagatgatcaatttatgtattgtgaagagcaaatttcattgtcgtcatttgaggctggtgatgattctatttcaagttattttctgttacttatcagtcttacataagattttgtacaatgtgtatttacattcgaattcctattagatgtcacttacataaaaaaacttggttaggtattgtgctctaaaaaagataaccacgtttagattactttttatggcgcatgtttaagcagtttaaattttaggatagtgagtatataataacgaaaatggatgataatatagaagaagcttcaccgaaacgtcgacccaacctaaccaaacaccgaccacatttcgtgcccgataaatgatctaacatgataccctatataatagtattaaacatatcttctttttgctgattaaatataatattattacttttggggggtcgaataatgctttctataactaccgttagctaccaaactcgagtgtttgctgattagagagagcaacattatgattaaacaaatcttagcgttaaaagtaagaacttttaagctctttttaaatcacgataaattaggctctctctaatcagcaaacaattattaaagtgattactgaacggtaatgagttaatgacgattcttgtcttggaaatgaggtcccgcgagatcatagaccatttaaatacggcgtcgttaagactgcacagtctcacacttgaccaaatcgaatcttcattatttacttattgttctgcttcaagaatctaacacgtaccatatgaaccatgaacagaagcttttttgtcactttcttcttttacttttttttttttttcggtttatcgattactttccagcacttaataaccgtcattaatcatccgtcatgtgtctatctcaagtccattaccattaattaaaaaatcaataccttttatttaaatttttttgtaaaaatgcatggttagaaatattttagtagttaaaaactgacttttggatcttaatttcctaacatacatacgatttttcatgttacttaataaaacttagattaagaacgttgaacatgatttacattatcagatagttgtcattgatttcaagaagttcataaataatcaatcactacaatatacctcatatctcattgatcaccgggttacaagttcgcacaactgtcttcatcgtggttaatatagtttgtcaaatcaaagtaactaccaattaaatttcgattttcttggatatttgcgatttttgttatagtttgtcaaaccaaagtaattagcacttaaaatacgattaagacagtaaaaatcaaagtaatggcacaactatagctatttgagtatcctacttgctccatatattgagaaaaactcgtttatacacatgatttattcgttaagataatcaaatcgtagagataaagcaaaactgaaaactaaaaggtttacttttataatctcactattgttttatatcattctgataaatactagagaccttgctactgaaggagagatcaatgggttacagaagagtaaacatatataatttcctagaaccagaaattgaatttctttatgaatgtaagaataataacggagagacaacaaatagctgaagatcaatcgctacaacattattgaaacagagaggacactagaaagacgagagcaataactaaactgatggaagcagaaatcgtcggggaagcttctgcggctgtgataatgatcggtggtctcggcttattcggaacacattcattgcaagccggcggcaacggcggtggaagcggcaaggggcagtggttacatggtggtggtggtgaaggaggaggaggagaaggaggtggtggagaaggcggtggcggacagaaaatctctaaggggggtggaggcggtggtagcggtggaggacaaaggagttctagtggtggcggaggaggcggaggggaaggcgacggaggaggtggctgatcacatggattctcacactctaaacacattgcacattcaatctcttgtttctctgttatactcaatgcaacaacagattgtgatagtaaaaacagagtgacgaaacagagaaacaactccatttttaagaggaagagagaaaaatttgccatctatcaaatggttcaagaatgaagaagaaagtctatggtttttaaagaacttgacttttttaagaaccttcaaaagcaataactttggaatctgataccatttaaattttacagctttgattcaagaacaaaacccttttttggaccataccataactgtaatccataatgtacgaacaaattcttttgattttagggtttctagagatttgggacataaagaggctttgttcactttcgtaaggaaccaaaatgtctcaatgaagctaattgacaaaagtttattcagacacttcttaacattttattgtggtctttagtttaaaaccactcgcctctcatttctcttaagattctagaatgaggaaacgtttcaggatcgccacgttctgcgttgcgtttgaatatcattgttgctttcatcaaagattcttccgccgtgtctagctgctccggtaaccatccgatcacatctttcccggctgggtaggcagttccatcggtagcttgcgtaataggtttccgagtatcggcgaattcaatctccgataacggagaagctttgtggtgtttgtaaaactcttggtcactctctgtttcatcttctcttcgcctttgctcttccacttctccttcgtctctcggccatggtgaaccgtctaaaccagcacagctcacggaatcaagcgacggcggagaagcggtggagttttttcgtttctgttggaaatgaggttctgacgggtgaccaacgggagtactctctagcttgtgcgcagtggcgcgtggagatttcggcggtacaagcggttgctcttctaaactcggtcggggagtatcgtctacgatttcttccgccgccgttttagggtttgcaacatcatccataccctgaaacacaagcaatcaccaaaaacttaaacaaagttgatttctttgtgtattttagaacatttttctttattttcaacatggtctaaaattgaaaacaagagaaaagaaacaattattacttcagggtctctcggatagatagctggatcggctccatcgttaccggcatggatctctggatcagctgtgcgaccagacgtggatgatccaaacgctaaacgcctttgagcgattggtcgaacacgtgaacgcgccgctgaagcaaacgctaataatcgggattgcatcatcatctagctttctacacaatttttgttttctgcgtttcctcgctgattaaagaaagtttgtactttgtagtagccatttttagagagactcgtgtcgacacgtgttgatggcatgcctcgttgttaatgacgtggcggatttagaatgactagaaaaagttagaagctgctcgatcggtgtctccagatttgtctgtcttaatttttattattttcttttctttagaaagaaaaatatgctaattgcattaccttcttggtaaataaaattcaacagagcctcaaataagattttgctgtcaaaaacataaaaacagactatttattatttgtcacggattaatctatatatacatttttacgattattttgcaaaataaattaatagaattgagatttatttacaatggctgccattaaattttattgtttgtttttgatcattaaaaaaaaatctttaaattaaatatttaatatttaacaatcttctctaaatctctccacattaactacacgattagttactaaaataaaccttccaaaatattaatatcatttaattactacaaaattatcatttttgatattgcttttctccatgactataacaattcagttataatcatcaaactgcagagatatttgatagcatataattactacaaaattacaaaataattagacaataattcataaacatatcagaaataagattaacattaataaaataaatgttttttttatgggacgagttggcgggacgagtttggcaggacgttacttaataacaattataaactataaaataaaaatattttatagataaatacaatttgcaaacttttatgtatactaactttaaaaaataaattgatcattaaaaaataaatagtatatagttattgtgatcgtattaaaattgcattataacgcattacctaactaaatatttgcaatttaattcgcgactttgattgtctattttccttcttattttgtcacgcattaacattaaactgatttttgcgtaaataagacatgtagatgttgattctgcataaattttgaagctttaagaagtcatttttatcgcatttatttcataattgtttttagcaggagagcttaaaaagcacatagcagagcagatagtgaaacactttaatttccgccttaaacgcgagagaacaaaatatccaaacttctaaaaatacaaaattcactcaaaacatgacccaaaaaagagaaaaaaaaacctaaactgtttttagaaaagacaacgagcgacctttgttcttaagttcaagcaactgagagaatactacagaaaccttcaaccaaagttgaatccacccgtaggagcattaccactttggtttccgaattggaaaccggaagactgaacattctcaggagcatccacaccgccaatatcttcctcctcgtcatctgcagcccaatacgactccaggattttgactgctttctcataaatctcattattatcgtgactctgaagattctcaatcttgtccaaaccatctgcgtcttcaatcatctgcgcgtacagattatcgtttcctgtgttgcctagattcttctcggcttcacctactttgagaatgttttctagaccttccaaagtcactgtgacaacccttggatcgggacacggtaggagatcacacaggggtctgatgcagccttggctcacgagaaacctgcaaggatataagaggttctataacaagaatcactgaaaaaaaaactaaaaagagacagaaacaatgagatttgttgtacttgatttggtcatgattgccaccagaagttgcattagagattgcccaaacagcttctttcttaatttcgaattcaccgatctcaagcaggttaatcagaggccgaataatgcctgcctgaaacacttcctgcacaacaaatttatcgatgttaaatccaaatgtatatacgacttctggttttaaattataagaaaagatattggtttttgaacattgttatttgttaataatgtatataactcacttgaatttgacttgtgttcccagctgtaatgttagagatagtccagcaagcttccttcttgatactcttcttgtatgtgttcttcaaaaggtttaacagaccaggaagcgcttgactgctaataaccgcctgttatggagaaaacagagatgatttacttaagtaaacatcaaaactataggagatataaaaggcagacagttacggataatagactacctgagtctgaatatcatctccggttacaatgttaccaattgtacggagagctggaatcagaactgagggcgatggatgactaagaagacacagataacgagatcaggtcaagatatatgtgaatgatatagaattggtagctaaaagaaaattacttacgccaagagctgaacaaggcgagggatgacaccagcgtcgataacagtttgtattttctcgtttgtaccatcagagagatatgagagagcccaggatgcatctgtgagaacttcttcgtcggttgaatgcagaaggcgctcaagagctggtaaagctgcttttgtctgctcaacaaatgcaatgacacattctcatattaataaacagttgagaaaaaacacttcaaattggtttatatatcttatatgcaaggaaacctgttcaaatgcaggctgcggcttccctctgcagaaatttgataatgtccatgtagcattcctcagcatggagagctttgaatgctcatggaattgagccagaagagacatcatagcctcacaacttaggacatgatcacgacattttggcgagtcaccagcaacgtttcccaatgcccatacagcctataatcaggggaaaaaaacatagaaatcaggatgttaaaacagtcggaatcgagtcatcagcaatttgatctaagagtttctttgccagaacaatagaaagaaaattgatattgaatctaaattgatacctgttctcgaacttcctcacttgcagaactaagaagtttgacgaataaagggacagcaccactatcaataatgaccctagtgttctcagatgtccctgaagcgatattggtaagcgcccaagctgcctcaaactatagttatacaagcaaagcaaacagcaaaagccatcagcatatgaatcaaagcaccaagctacacttagatataagaaaggcaagctcacctgaagttgagtgaagtcatccctggaaagaaattgcacaatgtgaggaacaacaccagattgaacaacttcattgattggaggatttcgctctacaaaaaattcaaccaaccacaataagcaaaaactaaaacccacaaaacaatcaaaccctaaacgccatgttaagagatttataaatcacgtaccaattgaaagcaatctcctgaagctagccgtcgcctccaattgtaagtctctatcctctgacattactccagcaatcatctgttgtatattctccaactgcaattgaatcagggcaacttattatctaacctcaagcaatgcagattctgaaattagggttcagtaaaccccaaaattcagtactcctgatccaattatttatctaggtaactagatcagaagctttcaatttcattctaattcaccgagataccctaactagttctcaatctaaattcggtaccaaacataaacgagagaaacacaatcaattagatatagaacacgaagaacgtactctcgtttccgtagggagagacgaggagaaatcctgccctggctgtgacgccatggaaggattaaaaccttcacgccgcttcttctgcaagttctcctctctcttgttcttccggatctccaccatgttatcctcccgtctccggcgaccttcatcggcgtccacagatactttatacctgttccggcgaacctcagtcttcgcgcttggtttgtaagacatggttagcttaatcgaatcaaccaaaacagaggatcactaggttctgaaggaatcgatgtagacgaacaacgaattgatcgatcgagtttttgatttctcagaggaagatgaagaagacgaaggagcaggagaatcagggttttggagtgatgcgatataatttatacaacgtgacgtcgggattcgaggaggctacgggtaaaagacgatattgggcttaggctttagtattaatcacgatattgccacaacttttgaatttgaaatcgcaacgtctacaaaaggtatagcgcgattttagtaatatagtgattactaatgctgacctgtcttttgactttaataaagaggctttattatataaattagcccaatatcggcccaacgtttgctcagtaaagtaatgttttatgaatctgattacaataaattgggcctggtatttaagcatcttaaacgctatttcatgacaaacataagcatcaacggacaagaacttaaccacctctacatcaagaacttcattagccaagtctctcggacaaatctccctcttcggtttccacgaaccaaatcccaacaactcacaagccatacccttcaagctaacccttgacctctcaccataactaaatggaaaatttacctttaccagatcacgaacgtcaactttcttaaccactactctaactagcccaccgagcttagcgacagttttagcaatacctattcctacaaaaacaaacctctcatcacgaaatagatcactaaggcattcgccgagattggtattttgtttcatatgaagtagttggagtatgaggcatttggttttgatgcatagttgaagagtcgagatttttgcatcatcttgaggattggtcttggagtttagagagatgatcaccgttggttcatctcggtaggttaatcgtatggcgaggatccaattcttggctatggaaacttcatttgtcaccgttgtttctatgagtttttcacgaaatggaatcaactgtgtaattgttaccatcgctcagtatgatttttcacttacgcatatgtccatgcataatataaacggttggtattatcaaagtcttcaattttcgaaaagaactcgattcaatgaattggtcaaatgtgctattaatatgaccaatttccgattgaaaacattgaacataaaatatttaacgagatctttaatctgcaaaccaaatttaacattccccacaaacacaaatagaatttagtagatatacttcattctcctattttctcattaatgaattcaaatacactcactaattacagaaacaaaaatgaagaaaaagttaaaaggaattaaattaaattataatacaaaaaccaaaaatgaccaagaaattaaaacctgaatgatgatgacgtaaacttgatagatgatacgaaccataattaataagatcattaatgcatcactatatatccctttggctttgcaacgatcagtgtaaacctgattttgcatcttcattattgcatagaacctcagctttctcatcaatcatatcgtctcctccttccacatcactataacattcatcttcttcctcatcaatatcatcatcatataaggacatggctgatccatatcccgagattcctgatgatgatgaagatgaagccgccgtgaaaacctccatagtctctgataaacgaccctcggaatcatcatcatcttcattatcattatcaccatcgtctcctcccatttctgtcgctggcagaggaggaggagccggagggagaacaattgtgttagtaaaagttgacgatggcattatcgtaatttcgaaacggagtttacgtacggacttaacgactcgccgccagaacctggtgttgaagggttttctccccggcggcgacgaagcatgaacatgacgacggagaacatgtgcatcccacgtgatgactttttcttcttcatgctcgtgttgtttatttgctctatctctaattgatcacaatgattttctttagttggtaattgatcaccattcttatttattgtttccatggtaaaataatgaatcaaaatatcagaaagatgacgaaaaatttagagaaaaacaaaagtcttataatgatgactaattttataattattgcggtaattaatttaatgaaagaaacaaaaatcgggtggttattctaaatttttagggtttcgaaattcctgactcaagaaaaattaaaggtcgtccgtagatatatacgggatgctagataatgggctttcttctaatgggcctacatttaatatgagtcggccttgtgcaagattttttttcaccttttttaagtcaacacactttttttttgctactgtgcttcgaattctgattacaacctaaaacgctgtccctagtccggcatccatgaggttcctcttacctagcatttgttcctcccgttgaggaaaagcaagatcaatcaacgagttccttttcgtcgacatcaaaagctttgcgtgcttgtttcagctcttcctgcatcgccaacagttctctacagcggttcagttttggcaaatcctgcataaatcaaagacgccaaagtttcggatatagaatacaaaaccataaaccatctcaatcatcgattgtgtactttttaaaaagaatttttaccttgcggataagatacaagaaatcatcaactagaagtcttcctcgctttgaaccaatttcttgagctttatgtgtctgccattgaaacatcacttgttagctaatatctctccgcttgtaatgtaaaacatgaatcattcacaaaaagaaaaagctcactaccaaatctgtgacgtattccacaacaatgtcttctacaagcgccacagactctggaagaggctaaatacagaggagttttggatcagtttcaggtggtaaaacactaaaagatgttacacgaccaagaaccctttaaagcaaagattctctacctaattcgttacttgtattggaatgaaactatatctacaaatacggttcatatggcaacaaaatagtaatgaagaggatagcggcttacgttttgctcgtcgccaaatccatacatcatatgctgcactgaaaaatcaacaaaagcaccaaaaccattgttaccagaagaatcacaaaatgaagaatacaaaaatctggttttaactaaagactttacattctttttgaaagagagttttgcgcttttcctgtggctgagaagttcccgcagctttcgatttagacgatgatgacgccgccgctgctggtgtgttactcatctcttcttcttcttctgataatcaaaatccaggagagcaaaataatagaaaaataagtgaaattcctctaccgacaaaatccaattgagtcaaatactaaccctaggtgaaaattttcaaaaaagaaaaaacagtgtaatctcaactagaaaatgaaattccgagcctatattctagatttctaccgcaatcaaaaccagagagctaccggaaagttgtattccggtacagtacaacaaccaacggagttaaatcgaataaggttctttatccaaatatttgtcgtcatggaaaaggaatgaaaattgaaaagggaatagtgagagcagagagctcaccgtagattgatcgacgggagtagcagaggtggtcgttgcaaaatcggcgatgaagatgatgagaacgaagaaacggggacttgttcactgatctctctctctctcgtagaagaagcacattgcattacatacgaagtaattgggcttaataaataggcccatttatattaaaccagcccataatctaaaccagaaacccgtacactagtcgaccgacattgtaactaagttctcacggtatggctcaaaccggccatggcctcatgctcaatattcttcgggagaaggaaaagtttgtgatccgattcatatacaatctatccggtgctcatcatattacacaagtatgtatcaaatcttttagcttgagcctaattttgtcctgtcaagactcttttttctatctatacaaattttctatcatgttcttcatctacaagatttggttatgcgaacagggacttgatatcgtcttctcccagcttttgtacaacggcctcttcagagtcacctaacgtactgtaacaaagcaaatatgtcttcatataggcttcatacagttgacaataagaaaccagcaaagttgagagaagcgtatcgtttaaaataagaaacctttcaaacaaatcttccttcttcttttgaagcgttagtatcttttcctctactgttttctccattatgaatcttacaaccctgtcacacaaccaaatgtttcttctttcttcccccaccaaaacaacatacagtatattgaaggacaactcaaaaatataacctgacaggcttgcactgtccgatcctatgtattctgtcctgtgcttgcctctcaaccgctgggttccaccacgggtccatcatgaacacctatacaatcaaacacccgaatgtcagtgaataaaacatgttctaggagcaactgttttataagttgtacacttcttacatgcgaagcggctgttagatttagagcaacccctccagcttgcaagctcattaataaaactctgcaatctggctcttctttaaaatttttgagtgcagcatctttagctgccttggacatgcttcccaccagttgaacacagctaaccccagactgcgttgtacaaaatgagtcaatcatttttattcaatgtctcattatgattaaagagaatgttaaaggagcacagatatagtagtagtagcattttgtagttggttgcgcttgaaattaccttccccaaggcgtaacttatcaggtccaagaatgatgtgaactggctgaatactattgctttggcagaccaatctctttcaaccatgaacctgatttcttctctctgcatacaaattttttttatcaccaaatggttagataaagcctccaatctccaaagaaactttaagcgtgggagagacagaagctgtagatctcaaagggcacataccaaagcctcaatctttgtacttgttttaaaatcatcgaggtttatccgatttaaaatgctagaggctctaaatcctttaagctttgtcttgcttgcctgatgttcactagaagtcaccttcaaagtaagagaaccaaagacatattaaccgaacaagttaagtccaacattagtcatccgatgattctttaagaaagtgtaaaatggtggcagctatttccagaagatacagttactgagaaacaagagtcgagatagtatgaaatagcaacaatatatcgactggaacacttacaaagtagtccttggaagggtcatggccgaaaccacattctttctcatttttgttcgcatcaagcaagttagcgttagcgccactaggactagaataactcaccaggtatggatgatcaacagcctgaaaaaattgcaagaaaatgcatcagaaatctatatacctatatcatccaaaacatgcactggcttgtaaatagaacaacaaaactatcgataccactcacttgtctcagtcggataagaagaccaaatatatgtgcatagttattcatcaatgtcccagcctgaatatacctgcagaaacaaatgtacatgtcagatttaataataaaattcagtttacacaaagcatggagcagaaaccagtgaaaatccatagaacaaaagtaacttacccatcaaatgttgtcttgctaactttgtatagtgattcatagaaatcagcttctactacacttagtgcatctcgcctcagagagatctaaatttatatgtagagatcaagctcggaagcaactataccaagcttcatttatatcagacaagggagagaaaggaacatacgattctagaaggaagagcaaggtcagctgcccggcccaatttagtacgtcttagtagaatgtcctttagaacattttgtttaaggaatatacaggctctgtttctccgtttgtccacattctagcaagattggaaaatataaaaaccaaagaacataatggtgatcctgcttttaaaatgtttttaataatggcacctcaaagttacctctttccaccaagagatgtgttgatttgcattatgaggacagctgggacattttcgatgcgcactgcagtcaccgccaaagcccaaaggcaatggacaaaggaaatgaaacagcaaagattgttatgaactatcaaacagaagtatgggaaaggagaaagtaaccaggaattgagagtggtaagatgttacctccgatcaagaacttcacagtcacatttcttgcaaaagtaatatgagtatggcgaaacgcgaaggaagcgtatctgggacaaacaatcagcaatgttgagatatcattacgtgctatagaaaaagttgaggaaagagtaactaaccagggagtagagctcgtcaacatcattctggagaggggtaccactcagagcccatctgtaggtcgcctccaaagcaaaaacagctttggcagtgcgactacttctgtttttgatatcatgagcctgatatgaagacaaacgggaattatatcaaatttgcagtgagcttcccctgaaggataaaagattcacaaaaagcaaatttgcagtgagcttcccctgctgtggtttactgtacaataaatctcacagtcccctttccttacatgcttgaaaatggaaaagaagaagaaccagcaggtcttggtactgacctcatcgacgatgatacgattccacttaatagagtgtaaaggagacattgtttcgtccactccttcatccttcctatattcattctcaactatgggagatgttgtcaaaacaaagtcgtaattcattaacttttgaacattcttgtctctcttcggcccatggtattgaagaaccctggtgcttcccggggatgtcaaccgagaaatctcatctaaccactgagaaagagcaacaggaggaacaagcacaagggtgtgcccaactgcttccctagatttggctctgtcaacttcccgtctggcaagaacgagagagatggcttgtattgttttccccattcccatctcatcagcgagaatgcctcctcttacggctgatagttcctgtattgtagcccaagccaaaaactccttttggtactttagtagcggtataatcaaatctagaggctgctcagcagcttcagcaatgactgcattctgctcatcaaaatcatcatcctctgtcatctgaaccttttctttcatgatctgccattttcttttagtgtttgcaggagcggcaggatttggtatatagtcattagcattgacctcacctgtgtgagcaagacatgatgaaaataaacaggtgtgagcaaatcgagcatcaatgacgcctaatagaaacgatgcggtaccttgaacttcaccgccgactgaatcatcatcatcaggaacttcttcttctttgagattctcgtctatttcaaacaaaccaacgaataattttggtaaggaaacatgagataaattacagtttcccacaagaattgcattctgggaaaacaaaaattggagagaaattatcgatccccaacagatcaattgagcccagaaatagaaaccctaattcacttttccggcaacccgaagattaagaacgaaacccaagaaagatcaacacggagaaatgtcaaaggattgtgaagaagattaccttggctactagacggaagaatcgcattcttgtggtgagagtgtggctccatcgcgacgcccaaatctcaaaaatctcagagtgagttaggttttattgatcttccgctttttttatttctcttcactatcttgttcttatacgagagactgattttgctgtgcaatctttccagaatggcgggaagcaccaaatcacacgtgtcgatttcttcgtgctggggtgaagttttttttttttacgggctaaaaaaccaacacatttttggtttatttcggttttttaaaacatttctgaaataatcgataaccgaaccgaaatctcttttagagaagcaccggtatttccacatcagagaattaacgaataaaaacatatgacaatgtaaacaaattcgtaactgaggatcgagaacagagaatcaatctcgaccttagcgtgtgagtaaagctatcgtaacgtgttgacctccttgggccgtccccgtccacaacgtaacgtgtgcacattcgttctttgagacgactttggtctcagatccaacatggactgatcttaaaccagccatcttgtaagacaataatattcataatcttagatcagcttccacacatcatatatacaatttagttaagcttattaagcacgagaccttacacccacaaaactcaagattctgtatttaccgtaataattatgttcttaacagaaaacatatatctccgttaaagctatagattgttttcacatatataatttgaaatgtatcatgataattacgttgttgatcagaaggagaaaaagaagaagaaagagttaatagctgttagtttcgtgcaagaagctgtagatttcatttttggatttaagctcacgaagaagcaaccaacatgacatgcaatcacacaacactacaacagtagaagacaaggcgcgtgagcatcccgattacgccacgtgtccaattggatagagcccaaaatcttggaacacgtcacatgggttgtccacctatatccatttacaccttgctacgactctgacgtggcagtcctcttccttgtcgtccccacgtggacattcttcgaaacttccattttacaacttgaaaacattttaagtcatatacgcaaatacattaaaactgaataacattttttgtaaataaattttaagattacgcgtaatattttataatgtttcctttattaaattattaaaattaaataagtattatgtctaaaaatattaatttcgaaattctttattaattattaaaattaaataacatgaagtatttctgtctaaaaaaatatgaatttcgaaattccttagctttaataagtcggcaaattttctgtaccaactcgacaaacccatttctcagtgggtcccacgtggggtaacacgtgttacacagataagtcacacgcattacacgtatgtttaaacgacgacgttccaacattcgctgaggaaattatcattttaataatttatttcttatactatttatcgtcgggaaaatatcgtaaaaaaaaaaaaaaaaatcacggaaagcaaaagaaaaatgaaaaaaaaaaaagtcttctttttggctatttatttaaaatagggaaacgaaaatatagcattaaatagatctctctcacacagaagtttcttcttcggcgatctgttcggctgataaacaattttttcttctttgctctttgctaaatattctcaattctaaatctttctgtgggtacaatttcacattctaaacaaaattttaagatcgttaatagttttaaattgtgaataagaaccccaaagagacaaagagacattcccaaaagcaaaacagaaaataagttttctttcgatggacagtttgtgtttgaatagcggtttacacggtgtaattccagcgatcactgcggttggaaacggcggttgcggtggagttgttgaagtccgagcaactgcgtcggcaccatcgcaaaaaagaggacctttcgggttctcatttaagtacccactgacgccgttttggtctcgcggcggtggaggaggaattgcgtcgaggagacgaagtggattgtgtttagacgacgccgttttggttgattccggcgattcgagaaagccgatcgcggaggagacggcggtggaaatggatacggagaggcgaaatgggagctgggttttgaagatcttggatgtacaatctacgtggaaacacgaagaagaagaagatgatgatgaagtagaagatgaagacggagacgaagacgaggaggttgaattagacgacgccgtagtatctgaagatgatggtggatgcgatgtatgttcagttttggaagatgatggcaacgaagcaaacaaatttcaactcgatagagaatcgttctccaaattgctaaggagggttacgttacccgaatcaaaactctatgcccaactatcgtatttgggaaacttggcttattcaatttcaaaaatcaaggttcgatttttatttcttacttcattagattttttgaattgaaccacgaatatagagattaatatgatatctaggtgttagttttcacaaacttgagaagatacaatgtgtaaaatttgcaggatcttcgattttgttgcattaatttgtgacattttccttgcagcctgcgaatctgtcgaaatattacggcctgagatttgtaacttcatcagctgagaaaacagaatcggcgttaaaagctgagaatggtgaagtttcaggtgagactaagccaattgtggaagcagaagaagaagttgaagaagaagagaagaacaaaagtcgcaagattagtgcttctgctgcatatgagattgttgcatcagctgcttcttaccttcactctcgtaccaacaacatacttcctttcaactcttcatcgaaagccgagaattcggacaaacatgatgtaaatttgactaatgcggagtcatcatcagatgttgcttattctgttacttctgttgttgctgctgaggaagatgtgaagcaagcagttgcagacgatttgaaatccacgatttcgtctccctgcgattggtttatatgtgatgatgatcagagtcacactagattcgttgtgattcaggtaagaataggaaagagcttcaaaagctagttcatttttaaattttcattatcttatgtgtttgttgatgagaatgtcaaattgcttgtagggatctgaatctctagcttcttggcaagcaaatttactctttgagcctattgaatttgaggtatttgttctttacaatcccaactattttggaaacagaaatgtgccaacttataacttacaaagacctgtttttgatctattagggccttggtgcgatcgtacacagaggaatatacgaagctgcaaaaggaatgtatgaacaaatgctacctgaagttaaagcccatattaaaacccatgggaccagcgctaaattccgtttcaccggtcattcattaggtggaagcttatcgctattactaaacctcatgttactcgttcgaggcgaagtacctgcgtcttctttacttccggttataacatatggtgcaccatttgtgctatgtggaggtgaccgtcttcttaagaaactcggattgcctaaaagccatgttcaagctattgttatgcaccgtgacattgttccgagagctttttcttgtaactatccgtaccatgttgctgagcttctcaaagctgttaatggaaacttccgtagccatccttgtcttaacaaacaggtactacaactaccatcccttataaatcgctagctatgctgcagaattcttgtggttaatgacattttccttgcagagtatgttgtattctccgatgggcgagcttctgattcttcaaccagatgagacattctcccccgggcatgaacttcttccttccggaaacggtttataccttctaactagtgattttgaatcgccggatattgaagattcggatgaggagcggttaagagccgcgcagacggttttcttgaacaccccgcatcctctcgacattctcagcgacagatcggcttatgggtccagcggaacaatccaaagagaccatgatatgaactcgtatctgaaagcggttaggagtgtaataagaaaggaagtgaatcagataaggagagcaaaaagggagcatcgccggagtctttggtggccaattctggtggctagagaaagtggaagctcagggattgcggtcagtaacggccaaatcaacggtcaggatttctccgggatgatgcagacaggaagaaagtcgttgcagaggtttagccgccttgtggcgtctcaacatatgccgttgatcgttgttatgttgtttccggttaagttgttgttccttggagctttcaacgtctttagtttccgttgaaaagtttcttttggcgggttatgatcatttgcttataccggttcagaccgaattttggtttgaccggtttagatcattctttattcatatagtatcttgtttgattgtttgttggggccattggaggctttctatgttagatacattggtttcacgcataaaggttgtgaaaaaggaacaaaaggggccagtatttaatatttgtaattataaattgtgcaaaagtattgtcttaacaagtgggaagaaccaatttgattacactctattagtcaacaatcatgtatatattgtaattcacaattatatttgagatttcttctttgtaaccactgattgcttgtgagttgtgacaaaaaaaaaaaaaaaaaaaaaacactgattgctaagatttcatatattaaattttcaaaaaccatgcaaatccatagaagaagaaaattacaattcaccttattaagacagatcaggaaattaatattgtaatttgaaggcttatcaaaaaaaaaaaaaaaagcttatcaatctgacttcaattattttcaaatggcgaaattattttgaaaactgtctaatcctagaaatgacttttggatcatcaaattgttaatttcttcacagcaaataaatagactggtcgcatgttttttttttggtttctttgttaatttatttaataatgttttacgaaaagaaaaaaccagttgggagagttgtcaagaaagtggcccaatggagagttcgatgtttatccaatccaacaagatacgttgtcaccaatcacaggcaggctaattatacgaccacaaatatttagctggaggtcttaatcaaacgcgcatgttatgaacgtcaagtctaatcgctttcgattttttcattttactttatttgggaatctagaaaccctaatttgatcgtattaggaacctcttttgttaacttttccattctcttttatggtagcttttatacaatttcctcaatgatctgaatggaaatgtagttggtgtcgtggcaatagcttaatgtatgttttcttaaatattttgattctttattgttggttagttgtgtatcatgccagttcattaatggtcggacaatggttgttctgatttggtttgaccttatatgcaactgggtatttgatgttttactcgaggctttgcaactgttaacttcattaacgtggttgtattcctgtgaatgattcatgtaacttttgaaatgtcatatctgaaatagatatcaaacaagattcttccttttgccagttttcgtatttgactattgagtatcttcgattaaagcttgtccaaatttttttttttttattcatcatatttacttttccacatgaaaaataattacgagagctttgacttaaccaccaaagtaggtgaagaaaaatactgacttttacttgggttgtttcaacttggtcttgaagtaatggtaatttactaacttcgtttgagaaacaaatatgattaatcaaatcatttacgcgcctgacgacggcaacattgtctcgattttgtcatatttagttatttacatgagtcggttaatcggtttgtcgtaaacgagcttaataatgtaaatgtcaactatcacttttatatgatgtcaaatctcataatacatatagtgagaaaaaggttcgttttattttccaacgtcaaaaataaattttaactcttttactcagcgacaaaataaaaaacgagagataaatctccaaaatgctatgacatgcatgcaactaaaccgtaattggttgtcttaaaccggcacgggaaatcaaactcccaaccgccgccatatctctacaaaacactcctttaaccaccacatctaacttgtcgttactcttcctcacaaccgtcattgccaccgctttattaccatccatcggcgtttcaatccgtcgattatcgattgcaaccgctttgtccgcttctacggtttcaatgtcactcaatacggcgtaatatcccttctggatcaatctatagagtaacaacgttgacattctcgctcggttcttaaccgaaactaattcttgctcatcgattatatcgaaccggtctatagacgtcattgatctctccgatttatatcttagattcagtaacaagtaagccctgttcagctccgatctcgagcacccacgttcaattcccatcaatgagtaataatcctcattgccgttttctctgtttgtaattttctccttcatttgtttgatattagtggtcaatacacataattttcccgggatttctctgtaccggacattatgccgtttccaaaccgggccggttaatgaccggtcacgtaaaattgaattgaagaggagtttcaagtgttcgagatcgtgaagcgagtcggggaaacaccgtatcgatcggaacaattcagctctggtttctaaagcttctatgcacgacggttctagggctaggattaagttgcaatcggcgatggaatccgcgattcggccggcggatttataggcgaaggcgcgacgaattaagcaatagacgaggaaactctgcggtgcaccacgacggctgtctatgatcttagagaaatggcggatggattcggagtagagaccggcgtcaagtgctgcgagcgccgctgtgcgccgtcggaggaagagcttggtttgggagagcatttgcgatacgatctcggattcggtgattggttgtggctgagattcggaggtggaaaggttgaagctatcttcggaccagcaaatgctttcgcggcggagctccgccgtggctaggcgtttaccggtttggagtaggatgatcgcgtcatccattaaacccagatggtaacaagcttggcccaaaaccaagtatctgccacagagaagggaagatccgaatcagttacggtcgggtcaacacaaactcgggtcataattaaaaagaatgaaatacctccattgcccttgtacttgagaattattacttaaccctgccatgaccttcttcttcaagtaggaataagagaaacacttgaacgacgagtcatgactcggtgagccactcggaagaagaagcatgagagaggaaagctccgatgaagcggcgaagacactgctgacatcttcgttatcgattctaagactgggaatgtaattgtgaagcaaaacggccacgtctttgaaacgacgaaggtagagaagcgatctggctttgagttccagagcgagttcgtggtgaggagagatagaaagcgttgaattcaagagactgagagctgatacgatgtcgtttggatcttggctggttatcaaatccttcgcattcttcatgtacttgtccactttctgaatcagatacagttttgtacacattgaagatgatatatatttcgataaacctaagagcaaaagtttgatttatgggttgaagtatttacctttctgttacgtttccaccaaggatgaatcgccattgcagtagttttctggttctcaaattctccggaaaagcaatgagaagacgaagtctctgtttttttccttaatacacagtgaatttaaaggtgagagagataggtgggaaactggaaagatgatagagagttgaaaatcatgtgaagtcaatcatcttaaatacgagagggcttttgataacagaggtagataaaagaaagctagactgacggatttgcccttgaaagcttatagctaaattaatcttccttcaataggtcgaatgtggacaatgtattgacgaccattgagtgattacaaattctacttaaaagtaggattgacaatttgaaattatcgtaacgtttatgcaagaaaaaacaaagtctttctctcgaagccaaaaagactcgtgttttctactatttgtttattgccccgtcgtagactagcgttacttgtttttgtttttgttaaaagttctgtttaaattaatgcactttgcttttggatttaccaaatgtctatcaatgaatgcacatgtgtatgttgacaaaaacacaaggctcatttgtattttttatagatttctttcatcatactctaagaagattaatgacaatctttagacataattagcaaaagtgtttgtattatcatatacttgtgtatatatttccgtagagtagtccacagaatctgcaatacatagatccaactaatacatttttcaaaaattaaatctaagtagattatatgtgtgtacaatatacataggaataggatccatgtaaattaaaggtttgaatggtgttaaaatagtaataagaggaacatatagaagtagatagaaaaaaaagagaggagaatatgttacacatccataaactagttgaaaattttcttctacttttgtatttgtgctttacattgttaatgaacaagaaaagaattccgaaaacaacctttattttaaaaaatccgaggccatacaattcaattttaaatacatcttttgaattataagaaacagattttcttctagttttgtatttcctttttcaaattcgtttcgttagaaacattaaaatctcttaaaaatattttgggaacaacaagaaaagtgaaaagaaaaaaacagagtcaagacttgatgactccaagagtagaagcttgaagcgacaccgtatgactctcatctccaatatgaatcccatgatcaccgatcggaatccttcggttcccggctcggtccactacacttaaatacttacacacgtgtatattcacctgcacacgcttcttctccccaaccgccacgtgtactctctcaaaagcaaccagctgtttcttcggagcccattctccacccggcggagccgagaacacaagcattgtgtgcgtcccatctctcgagccaacgttagtaacttccacgtggactccgagagagagacgatcacacctagcgtgcgtcacacggattgatttccctgaaacggtgccgtttcttccacgaacagctataggaatcacttttggcgcgtcggctatgttgtgagtaaagcgcgtgtaactcaaaccatgcccgaacgggtaaacaactggaccgtcgtagaaccggtaagtccgacccgggatccgcttcgaatggaccggccgcatcgacatttctgtcattggtaaattggttaaataatcttgcggataccaagtcatcggaagctttcctccgggattagcactgccgaataagatatcggcgattgcggtaccaccttcttgacccggatacccggcccaaacaatcgctggaattttccgatccttctcagcaaaagatatatcgataggcccaccagacatcaatactaagataactgggcctttagcggccttagcaactctagagacaagctcttgttgtttcccaggcaaaagcaaactgtttctgtccttgaactccgcttcaatagactgatccaaacccatcacaagaaccgtcgcatcagctccacgagccgcttcaaccgcggcatcgaacaatctatcatccatgcagtgtacgtccacgcaacccttttgatgaatggttcgagcataaccggtaataccttgaaccggactggtatatccacaagcaacccctgcataattaccaatcattgtgaccgtagcgtctgaattaggtccaattacggcgacagttcggtgacgttggcttgagagaggtagagacgagccgtgatttttgagtaggacgattccttgttgagctgcttcgagagctagtcctttgtgaaccggtgtacacacgtgtgccggtccaaggtgtccgtacggttgagccgctatatcgccatcaaacattcctagtctcatttggactgttagcgtgttgattaaggcattatcaacatcggactcacgcaacaagtttttcttcaccgcatcgattgtatgggctcctagaaatggcccacaatctaaatccaagcctacacaatcaacacacaagattggttagtttaaggaaaaatattcaattttaattttctactaaaaatcaataattttatttaccagctttgatggaatcagcggcagcttcttcaggagtaccagtgtaatgttgggtatcgtacaaaacaccgacagagtcacaatcagacacgatatacctgtttgcagaaaaaaaaaaaaatcaacggtcaacgaaattctaaattacatatacggaatgttttgagctgacgtggcgtgatcttacccgttgagaccccattgattgcgtatggtcttcttgaggagattaggatcagcacatgtaggaacaccattaacttgattgtacgaacacataatgctcgcaacgttaccttctttaacacacatacggaacggtacgtcgaacgtgtcttctatgtcttgcttgcttacctatcaaaaccaaacacgtgagaacaaagaaagaagttgaagcaagacaaagaataaaagattaaattaaaccttagcgttgaaatggaatctgtcgacgccgttccagttatcgagatcgtaagctgtgaaatgtttgcaacaagcagctacttttaaccggctacggtcgtttccctgtaaccctctgacgtagctcgctgcgtatttaccggctactactggatcttcaccgggagtttcctgtccacgtccccaacgtgggtccctcaatatgttaacgtttgggctccaatacgtaagcccaccaactccaccgttgtacatggccctggcctcatttgacacaacctgcgaatccccaagagcgtaacttagtcgtggttaattgttaatgataaaatgcgcatgactaatgttgcaagttgagagcatcgtatgcaacttgcggcttgcctcgattttagcgaaaagcgtacgataagttcatattcatttcacctttttaataaatattaaaatagagcagtgttattttttaatatgttatctgattaactataaatatcattaagtattcaaattagttaaaaattgttagaatcagatctttgtcgtaaattggagatggcataaaaacgaaaccaagagcagaatgtaagttactttaaataaattagttttatttaagaaaagttactttcaatagcggtaggctaataagagattcgtgcgtatgtttatttgcatgaagtaccggacaaaatcagaacatgagaagtgtcgaaatatcacaattgtatataagttattttaaaaataaaaaacaaaaaacgaatattagttccgataaaagagaatatttcgatacagtaaaagtgttttacatataaatcgcactagaggtaattaaatacataataaatgtgagctgtatatatatataattaacattattacttacgtcattttcacagagaaaatagtgaaaagtatttagtagttagatcgggggcacacacaaaaataattgaaataggtgtttttaacttaatggataaaagagagagaaagaaataatctgacccgtccgatggattcccacaaggaggcattgaaagaagcaacggtggtgatgacttgagggaaactggtggctgcagggtaaaccccaccgaacttagtaccgggtcccacatttgaaacgccgtgtaaagcctccgaccaccactcgtaccctttgattcctagacgtggtatcgccgccgcagtgttccctaacaagctcactttctcggccaatgtcaaccgtccgatcaaatctctgactctctccggtataggaactgaaagctggcagaatctcagtgtagctgttgctgcgtcctttgtatcgcaagcaaacgtttcacggctatgaacgcaaacgctgctgctgcttatcaagaagaagagaataacggccaagaacgccattttgtggagaatcatttctttaaaacaaatattatttactcctcttcctagtttcttttgggttttatggaagagagaaaaatggaaatgtgatgaaagacttgtgagagtgaagtttgcgtgttatgtttatatagagaggcaatgataatggtatgataaagataatgagtagagctctcttcgtgaattttctttactctatcaaggaaatatcatttttctttaatatatatgaatatttcgaaaccaaacatatttagatataaagaattggttttatatttaaatttacatttaatttgaggagaagacaagttgagagatttgatgagtgaactaacctgccattttggatatgtaaatggttagaaagtgttggaagacagttgtcactatgtgggtcctggttcttaagagacttttttatgtgcagttaaatagatttgattataattcgactttgttaatcatataattagttacttgaatttcgttttattatgttaggttttcatcgtaagaaagaaaaatgttggtttatatctgaagcaatctgttttgcaattagttttctttttttctaacagaactttttgtttcccacttgacaggtaaacaaattaacttggcttgtacgagatgtcacaccattctaaattccttaacgatctttattttatttttgttcttttttcttacatacatgtggccggtgaagtggaattgcacgaatcatttcttatatagatgtagatatgcgaatatttataatagaggagtaatttttttgtactattgcatcctttgagcagagtaaatggatgtggaacaaattttgcggataatcaattatatacaatgttagaacaagtatagatcgaatcttttctggttgagtattaatgttttagtcaatacatactgtttaatttgtttaattacccttgtaagaatctttttctggttgaatattaatgttttagtcaatatatatagtgtttaatttgattttttagaaaagtttagtctggatttaccgttttcattgcatatggtttgtatgatccttttatacatattttgaataataaaagatgaccacaatttgaaaaacaaaaccgtgaataaaggcagataaaaaccgtgagaataggaaaggataaattaaattttattcgagcgactaagaggtcacgaagaagaaggcaacgtaataagtaattgaaaaaagaaatagtagtataagtatgggcatggtgtgtcggaaacagacagcaacttgtgctcttgttacttcggtgtcccaaatctcacactctattggctcatatcttcggtgttcaactgttcattatgaaattattactactaaagtaataactcattattggttattgcgatccttgggaaacacctaatcagcaataaaacttccaaaactttatttttaccatataattaaaaacaaaacgccacggactgtaacttaattaattagcaccacagaatttgtatgttctaagttttgagtgggaaaacccttgagtaacgcattgatcataagaagaaatgaaagtagtcaatggaatataagggtactgaaaagaagagtcccgaccaatttcatgaacaaattaaagtagtaactttaatcctaacccatctgttttgtgtcccaccaaaaaacatacagtcttgtgtgtctttgtactactagctatgatctctagagccatatcaaagaatcgtaatcccgaatatataatgctaagatgtgactcgtgttggtcttgctaccaccaaatctcacaaccatctaatcaaatccctatcacactcacttgctttataatgaaaccaacatcggaaagatttcaagaacgcaaagtagtgagatcaagagagaaaaaaggggagttacaatggttgatgagaaagtgattgttgatgaagttgagacaagagacgcttatagagttgcgtacgtgatccatttcttgttgggtgctggtagtttaataccatggaacgctttgatcactgccgttgattactttggctacttgtacccggacaagcatgtagagaagactttcactgtggcttacatgagctgttcggttcttgttttggttttgatgatgacttggaacacaaggatgagctacagagtgaggatgaacttggggttttccatgttcatcatcgccatgatgatttctccccttatagattgggtctggaaaggtgaaaagggtgagaatgtttcttacatgttgatggttggatcagtcgtactctgtggtttagctgatggagtggttggaggaagtttgattggttcagccggaaagcttcctagacagtacatgcaagcaatttttgccggcactgcctcttcaggtaaacctagtttcctcttatgtaaaacgttagtcttgtaaattaaacagaatgacacatgttttgtataggctagtgttggtttcttcacaattccgatttgaaatcctcacaactttgagcttatacttagatatatagttaagccaatgagttgagtcattgaacttgtcaaaagcttattaggttatctctgtttttgctaggtattatcatctccctccttaggattgcgactaaagcttcgctgccacaaacaccgcaggggatgcgaaccagtgctcattcctatttcatagtcagctctaccatcctcctatgttgcttcatttcttgtaacgtgctacacaagctaccagtaatgcaacaacacctcaagtttcatcaacctttgcattcgactctgacaatatggatggttgggaggaaaatcaagtggccagcttcgggtatgctaataatctactctgttaccttatcgatatttccaggatttatagctgagaatttgaagtcccaacttctccaaagttggtatcccattttgctcatcactgtgtacaacatatcggatttcgtaggcaagtcactcaccgcactctatctatggcaaagtataaaatcggctacatgggcttgtatcgttaggcttctcttttatcctcttttctctgcatgtctacgtggaccaaaatggttaagaacagaagtgccagtggttgtcttgacgttcatgctaggtcttaccaacggctacctcactagcgtgctcatgatcatggctcccaaaacggttcatgcatcagaagcagaacttgcagccatcttcatggttgtttttctaggactaggtcttgtttgtggctctgttattggttggctctggctcatctgaaccttatattgaaattcatcagaacttattttgtcaaaaagtcgagcatatatgaagctagcacaatgagtttcgcaaactttttgtttcactctacctcatattcgagtactatagactactttaatatattgtgaaaaagtaaatactactactttgcctgaatcaatatttccccaaaaatactttagcgagcacaatgtatgtgccagtgttctgattagtaattacaaaatcaataaataagaaagggggaaaaaggagtcaaaagtccacttgcggtgtgtccttaccttgtcttgattggtggaacctttttttattagagtctacgtgtgaaatattataaatatatttacctgtataataaatcgtttaatgaatttcttggatatacattgttatattactgtcttcttggattttttttcttttttttggattgtaaacttaatactatacttctcttagttaatatttgtatgttgcataaattcattgtcttatgagattaataaccatatacatattttgtctttatatgtagtatgtttaagaaaatttaatattttattattcttccgagaatatggataacaagtgtacacccattacttttgagcacgagatatcttgcatatatattttaacctcttctgtaatactaataaggtgtatatggcgaataaagtgtttatattatgaaatttaaatagaataacagagtacaataatgaaatttatagagtattattggttgattgtgaataaagcaaagtgttgaaaacaaaggaggggctaataatgaacattggttgggtccttaagataaaaaggagggagcagttataacgttaaacattatccaccaccatcatgttcatatgatgttgacattattagctgataagatcttcattttattgcttgttaattcccatcattttatgtaacagaaaaagtacttaaatcacttcaaccaagaaaaaaagctcaacaaatatacgaaatgaacatttcaacagaattcagttccactatgatccaataaaaagttatgtttggtttttctaataaaaaagaaagaaagcgaaaggaaaaagatgacacagagaatgggcattcttatccatattacacttgcatcatcgaccgagggagggataaggaatgaaattgtcatttctttttgtttcttctacataaatttatctagagattgttcatgtcagtggaccaaccagaaaaggtgaaaaaagatagcatataaatataatcttatttcccataatatgttcaaatgtctattgattttttatatatattcaattttcattgataccaaacaccatcaatggaacaaccaaacaagtgcatgcatacacatttcttgttagccagaaatacctttcatattcatccctttctagaataacatgggttctattatactccctctgtttctaattaagtgtattttaaaagtttttttttttttttcaatagaagtgttgttttcacttttctatgcaaatattaaatatatttaatagtttttaacaaattatattttacatcatattttttattggttggattagttgtaattaatgatgtttttataaaaaaaagataaattaaataagatttatatgttttcttaatttgtgtgcaaaagccttaaactagaaggaatatgtataaattatggtgttttttgaatggctttgaaaacatatcgttttagttcagtggtcatgacatccttttcttattcaaaaatattcagtcagattttaattcttttagttcaatgcgaacaaaatttaaataaaaaatattcggattttttgtcaagcaaatttctggtcgatcaaacagatcatgattctataattatataaaacttcgagctttttttcctcatcatcacaacacaacgatgttggttttataggttacgttgatcaaaaggtcagaagaaatctttatattattaagtagggagtttgtgtttttttttgcactttacgttgagaattaattaatgaatttgttgcttgggagttaatgtaaaccgaaccaaaatttgttttataatgatttagccggttttactttacataaaaaaaccttaagataaatgcagtgttgcacaaggccgactcatataaactgtaggcccatgaaaacgaagcccatatatataaatgggacgatattcaaatttttcttcgatttaggactttggaaaccctaggcgtcctagtcgattgcgagatccaaccttatctctctggtaagtttcttgctcctgatctctctcgctatttcttcatcggaaaatacacgatttcggctgtgttccaatctcttttcctaggtttggttaggttaggtttttagaagaagattcgtcttgaacgatgaagaagcctacgaacaagcaggctaaggcttaacattggtcttttgggacatcattaactctccggttccagatggttgtgaccctcgtgtggtccgtccgagtattaaacggcttttggagaatgaaggctactgtggtcctctcaccgtcactgctgttggcaaactagcgaacgtccctactgacaccctgagagcactctattccagtggaatccatcttatcatctcccccttcggcggttagatatcttctcgaaacagaggattctgccttgtggcattgctctgtatgctgccttgatcctcctgcccacggctttgaaaatttcatcacacatctatcaacgggagattataaagtgatggtaattaatcaagtgtttgtttcacacatctacctgtttttttttttttgcctttgtttgacttgtccatgttcatttaatgttccagctgagtttacctaggaatactgtgcctcgtccgccggttgatctctccagggggagtaagctaccaaaatcatgttttactttgtttgcccaccatgctttaccacaagcttcactttctcttttatagttgcatgtgactgcttatctgatggagagcgatatgatgagtcgcgatcagccctggacagacgagcggcctccacttcctacagatttatcaacaagactcgctaaattgaaagacttggaggctgtgaagtacgagggtgagtcgtttgtctattgggacatcaacttgtgtccgcttcccccatactgtgatgctagtctggtcggtccgcgcagcaaacgcttcctgaagaatgaaggcttctctggtccaagaagaagcaaattatggaaaaacagacatatagattctatagagacacttaaagcgatagggcgatcttatttgatgtattgagagagccacttgaagccttcaccatatcccatttttctaacaatgctgcacataaacacctccaatggtctcacattcgaatcagttagattcactttgcctttaccagttgtgaaattggagaggccaagatggaatcgaagctcgtcctcagatgcagcgtaaggtatgtcgattttgtttcctaagatgaggaatgggacagtggctaaggattcgtctgagagaagtgcatcaagctccttttttgattctgcaaatctctcctggtcataagcatccactaagtagaccagagcatcaacctgtgaaaaccactcaacaagaatcaataccctttagcttcgagagacgacgagtaaagagaaaagagacaaagaggaagaagaaaacttgtgtggatattctaagcaagtattaaaacggcaagcagcgtgtagattctgaagttattgtctgtacaaacggcaagaagtgtgtagattcctgtaataatgaaacggcgccgtcgtgttagcccacgcactattgcaagcttttggaccgagtgagagggcccattgagaggagatatttgcttagcaagtggaatggtctctttcaaatactctcttatcttttatttttttctacaacacacataagtagttcaaaatcgaatggtataatattagtgattagtaaccgaacttcgggatttaaaaattgttctttgtttacttcaacctacaaatttttaaattcagacgaaaagatatttctatttgtagcattttttattaatttttgtcaacgtattttctagtaataatgggaggattttgccgaccatcaatattgtttttttttcttttcttttgatttttgtggatgttaataataatcagccgaaccaaaactccaacgtagtagataagatcagaacagaataagataagcccaaatgtctgcgtccaagtgtactttgagagtgggaaaaagttaaaagaattcttatgtgtgttcgcatttagtcttctttatctcaacgtgtgcaaaaagttttgcatcgccatacaatacataactctctttttttttcatacaaatacaatacatacttaaacattgtgaatgactataataaatttttgtatctcttagaaaatttgaaaataattaattgtttaaatacatataacgtatactatatttagaatgttatactaaacaaaagataggtgacaaaaaaaaatacagcgaatgcgttgacctgtgtgatctcgtaaccatacaaaacttttttttgtatatatccgttgttccagctttcacaatttcttaagtaaaatcagtctttgtgtttctaaatacgttgttcaactaaccactaagataattcgaaatccaagtattttaaaagtaataaacagtcaaaattcaaagtgacaactatagtatttatctgaacagccaaatcaaaccacagcacaaagaaaagtcaaaaacatttggtcaaagcttcaatgttgggaaattgttattacagcttacattattattagtaaaataatgattatatattaccgaagagaattaaaacaaattaaggaacaaaggaacagaataaagggtaaccttgtaaattctaccttttaaagttgaactctttctcttctcattcatttgttctttcttcagagaaaaacaaaaaacagagcattttttttggtcaagagcaagaaaaaacagagcatacttttgcaaaaagcagagcttggagcgctttcttgtcatctaaaattcaaaggcagagacgatgggagatgtagttttgttcatagatgaaacatatttgaaatcgagttttaatcgctgtagaatctgtcacgaagaagaagctgagagctactttgaagctccttgttcttgttcaggaaccatcaaggtaaatatcgaattctagatttatttttttgtttgattcttttgaaaaccgatattgattgttttggtttcgttggatttagttcgctcacagagattgcatacaacgatggtgtgatgagaaaggaaacacaatttgtgaaatttgtctccaggtttgatttctagtttatcaataatttctctaacatttactttctctttttttaaggggttttgcttttttgatgttagattataatttgttttcatcttctcctaaattttgaattggttttgaatttacgtaattggttttttttttgtttcttctaagtttaatctgttttcttgaataacaaacgatacgtgttacaaaaactttctccttcgtgtcccatattttttttggcataactagaaaaggaaaaatattcgattctcgtaaaagatcgtaatcaatgagccaatgccacgctgttcatgatatcatattctcgagttttatttgtttatttgtgtaatctatacattaaatggattacaaaaagagttaggaacaaaaatggtaactggattcatccatcgctttatgggacccataacagactgacaaaaaaaagagttaggagcaaatgcattagaaaaatgtatcttcaattgaaaaatgtctccaatataatgaagtttttcaccagcttatttcagtttcggttcggttatggttggttttctttattggggtcgatttttgtattggtttacttgacatattaattcagtaaacatcggtttaaccagcttgtatactttctataaatgtatttagaattaacactataatggtgacaaaaaaaagtgtaataaattttgtaatattgcaggagtataaacctggatacaccacaacttcaaaaccatctcgatttattgaaacagcagtcacaatcaggtaatgaattttctttaaaaacaaaaatttcaggtttagtttaaactttgaagatttagaatgaaaaatagattttgaaaacatagtccagcttattgaatgattcctcttcctttttccccagtttttataataaacaataatccaaaactaatgaaaataataatttaatttatgaacagagataatttacacataatgagaagagaaaatggaagaagaagaagaaatagaagattagtgaatagagaagaatcagattttcaagaatgcaactctggtgttgatagaggcgcctcttgttgtagatacttggctctcattgtaagttctaaatccatcccccttttatttaaaatgttttacgtaatatatttattatattcgtttgagattagaaaacataatggatgatatatatagacattataaaaattagttaaaattaaatggtgggtgaggaaacgagaaaccttggtttagcaaggtccaaatcagaaatggtggcaaccacttctatagaatcgacatttaaggttcgcatgattggtaaccataaataataaatatgtccacttgattatcaatcgtttagaattttttaaacaaaagttagtgaaacaattaaatgctaacaaaaacgggtatatacttgttaacacgaactttaatatgttagtttcgaaaacaaaaaattaattttaatagttttgcgttagaaatggttcaagtttggtggtgctatgaaatatatatagagacaaatataatgacattagattagaatgattgttaggattcttttcacatacatgcatttgtggtaagtggttcggtgaggttgtttggtcgaccaagaaaacctaaagaaagtaaaaggtttcctcttttggaaccaaaagaatgtctgtttactaaattaaaaaattgttcatagtggtaagtggtaacatagcccataacgtcttttccaagctttaacccatattcaagccatacccaaattcaaccaaaccaattttatttgagctaaatatcatatcataacatatccatatatgggtacatcttttacggcgtgactctaattaaattgatataattttttctttttgcagttttcggttattttgttgataaagcatgcatttgatgcggtttatggaactgaagagtatccctatacaatattcacggtaaattgctcttctttttcaaactatgattctagagataccaagttgatttactatttagttttgtgtgtcttcaaaactaaaaatggataagtgaacataatggcaggtcttaacattgaaggctataggcatactattaccaatgctcgttatcattcgaaccatcacagctattcaaaggagtctccgatatcaaattctcgtaagctctcaatatatgaattgctgattttgtcccttttttctcattccaaaatttacttatatgattttaagttagatctctatatattgtctctatgttgacttttaatgttggtcatttgtttcaataggaatcagaagaagatacattgagctctgaagaagaagatcatggtttggaggaggaagagcaacaacaacatatagcttgaatttttacttcctttttgttcaaacctctattcagaaatataccccacaaaaataggaatatgaaaccattagcaaatgtaaattatgttaagtattatacatagattttaattaaatctccaaacataaattacagaataaaagacttcagcattatcttctagatgaagtgtttctgtgttcatggaaacttatggtaaaacggtaaaccaaagggaaaatgaaagatcttacatgaagagataacgattcggcccagtgggaatgaataaattggaatagcccaagtgtatttttttgggttcacaaagcccaatttgatttgatttccgttgcgtcgagttaatcaaaataaagatagcgtgaggacaggtggatagatggacggtcaagatctactgacgatttaaggtcataaatgacgaaaaaacccttgtatgaaggaaatgatgaaaaaaacttaaagtgtgtggctgctgggattcgagcccaggtctccacggccacaacgtggaattcttaccactaaactacagccactttgttgatgtttttccatgtattaattaataaacgttaataatcatgttgatctaagttggatatagattgtcactgagtgaaaaattcagttgagaacagactagaaaattcagctcgaaccttttataagccagagtcctcttctgcagaatatctcaactatggaattggagcgagtgaggtgaatctcatagccaatattttaaaccattccctgagataaaatcagtaaaatttgaatatatatatgtaaaaatgtgcaggtggaggttgaccttgtgacaggaaaaacagaatttataagatcagatattatctatgactgtggtaaaagccttaatcctgctattgatttaggacaggtaattagcttggttttggtccggattctggatgtgcacttaatgttctatcacaggttggttaattggcgtttctgtttgtttactttaagaagattgaagctgctgccggtggtgaagcagctttgtggccttgaaagcgtagagaagtacttagaatggaaaacatatccttaaaataacagagtcactcagagatgatatatggaagaatcaaaataatatctgttgttttttcttatgatataccacaaacaaagaaaaatcctaaatcaaggaaactgaaactgcatatagtcttaaccggaatcgaagcaactttaaagtttgcgttttaatcttggcctttttttaaatcatctgcagtaatcaattgtttgaatctctaattaactacaacaaacgcaagtcacctcaattcacatcaagggcagtaaaaaataaatatatgatatgattgttgtaacggtcactttttattatcgatataaacaatttcctttttctatattggtatgagtaatttccttttcttggaacaatttaacccaacctatctttttttttccgttggcaacctttctctctatatataacaaaagtcctctttcttcgaaaacaaaaatccaccttcttcttcttcttcttcttcttctttctttttagtctctgtttcttcttgatcaagttctattcctctcttacaaagagaactcaccgatcacgagaacgtcaaaagctcgatgaccatccgcgccaatgtcatcggatccgtttgatcacacgattaaagatttcaccaccgttcttattttccgtctctgtttttttgcgtttcacgatctttaccaaatcatggaccgacagtcggaggtggtgacgcaaaccatggatgatgcatcatatgcgtcgttatgacgagattcaggtttgttgcttctattttgatctcttggaaccttggatttataattttagcgcaacttgctgctgcaaaaagaaagtctctttaggttataggtcaatcaataataaacgcaatttcatgagaggaactagggtttgctcttgaagtcagttttacgaaattgacctaatttgcggttttcttgtctgttatcactttgtttgttaaattattttaattaacctttagctttcttcttattattattgtaggttcatattcttgattcgccaaatcagtgggtgcagccgcaagattgtttggattcgtgatatacaccatattttgctattgcttggtaacgactttctatactctctttcttattcttttttacaaaaaataaatattgattttagttgtaaaatgttttttatttatttgatgatcggattgtttcaaaatcttttattttattttttaaaaagttttataaatgctaaattaatatgacgttatgaaatctaattggattttggatcccgtcatttaaccgtggtcattagcgattccacaaatccaacatgtttttcacatcttcatgtatattttagcattttttttttttataaagattttcaactcagttttttaaagtttttacataaatactaaattaatatgacgttgtgaaatctaaccgaattttggatcccgccatttaaccgtggtcattagcgattccacaaatccaacatgtttttcacatcttcatacatttagcatttattttttattttattttcttaaaagattttcaactcatttttttaaaaaagcttttttataaatattaaattaatatgacattgtgaaatctaaccagattttggatcccgccatttaaccgtggtcattagcgattccacaaatccaacatgtttttcacatcttcatgtatatttagcatttattttttattttatttttttaaaagattttaactcatttttttaaaaaagtttttttataaatactaaattaatatggcgttgtgaaatctaaccagattttggatcccgccatttaaccgtggtcattagcgattccacaaatccaacatgtttttcacatcttcatacatttagcatttattttttattttattttcttaaaagattttcaactcatttttaaaaaaagtttttttataaatattaaattaatatgacattgtgaaatctaaccagattttggatcccgccatttaaccgtggtcattagcgattctacaaatccaacatgttttcacatcttcatgtatatttagcatttattttttattttatttttttaaaagattttaactcatttttttaaaaaagtttttttataaatactaaattaatatggcgttgtgaaatctaaccagattttggatcccgccatttaaccgtggtcattaacgattccacaaatccaacatgtttttcacatcttcatgtatatttagcatttattttattttttattttcttaaaagattttcaactcattttttttaaaaggttttttttataaatactaaattaatatgacgtaatatgacattgtgaaatctaaccggattttggatcccgccatttaaccgtggtcattaacgattccacaaatccaacatgtttttcacatcttcatgtatatttagcatttatatttagcaatagtcgttcgcgattccaaacatttaagtttataatttagattttttgaaaatagttactttcggattttaaagagcttttttctttttttttgtttttatttgtttagatactaaatgttagatgcatcaaatacatatttacattaaagtaaaacctttcgtaagctacagccactttgttgatgattcttccatgtattactcaatagactacaaaattaaatctcgaaaaacgttttaaaaccaaacgagctaatacctaaaattctaactatacttcattcataaccaatatttttttttaatgataaaacccattattttgacatttttgtacattacgtaccacagacttgtgttatgtgatttttcgctaaatgaagactaaataaatgtaaagttgtgcaaagctttttttttccaaaggtctatgcaaactaacaacataaacattgtttttaaattgaaatacaaaaagaaaactttgaaagttaagacacatatgatacaaacaaaacaccctaaaacaaataaaacagaaacttaagttttggtttagtaacacaaaatagcattacattattaattgatataccataacataaaaaaaggactgcttgaattgctgcttctcctcagatcaaaaactaacgagctggacgggcttccttagaccttttagaagcaccagtctttctaggttctcgaccacgcgaccaatccgcatgttctggtccatagcagtagtcgaagaaaagctcctcaccttcttcgattgctctctccgcaaatagaccaatcctctgatctcctctcacaatcatcaactgcacacgaaaccataaattttcgtaacctaaattttctcgacaagaaaaaatcatttaaaatgagtttgagtttcttggaatatcttcaatatgaaaaccaatcaacgacgagtaaagttgatacacgatttaactaaagaaactaacataagtatttttgtttgtataatgttagtatttgttcaagataaagtataacggcttagtaccttggcgtagcagttaggtcttgctgagtgattgagaaatttgaactcgtttcctttacggcgagcatcgatttcgagctgtaaaataaatgttactttgattcgaatagatgtgtaacccgcgaatgattaaaacgttacttcaaaattattctgaagttacctgatcattcaaggtaaagaggtaggaagaaccaatccgatcttctattctcccacgctcattagcttcatcatgagtgatcagttctccagtatattctccgagatactcattctttttaagagagtcctgacgggtcaaaccatatcacacaatatatttaatggtctaaagtataaaacattattaaaaaaaaaaaagtgttatgaatgcaccaataactattaaacttattcttatatttacatgattgcttacccatgtaaatgcaccccatccatgaacatcagactttccaatgagaatctagtaaaatacgggaaatgatagttaaatgtctttcgtataattagttttaaattttcggtacggatttgacgttgattacctttttattggtttgaaggaggaattgcatgttcttgcattggatttgcactggtgtctcaccaagagtgccatctccacagctatatataaagttttttttataagacttttggtttgaattactttgattatagaatttgtataaagagatattgaagtgaaagtgttacctaagaggacaactccgacaaagatctggatcgcattcacgattagcagcaaaacaaggacattgtcgatttgtgcattggccaattgcacaattacatcctccaaagcgattgttgcaatcctttgagcacctgaacaaaaaatacaaactcatgttcaaattaaatctcatggatcttccggcttaggaaaaattgaatgacatacccgcaatatttctcgcagcaattttcgtgagttaaacaagggcattgctgtccacattttgacttgcaagtgcatggtgtgtagtgcttataaaacttagcttctccactagttgttttctttaaagcaggcggataacgagcatattttcggagtctcgattttttgcggaccgacctactactttttcgagatacttttttggtaacctgtgataaaaccatcaacacatataggaaacttcatgtgtttttaacatacatgtcatgagaataattacgacataggttagtgtacctgattgtgtctttgtgtagttttgttaaggtctaatgacatagtacattgatcttgttcgcgcatgtaattgtaaatctctaggcacgtcttaagcccccgaagtatgtttaatgcaacatcacaactgcgaaccagcataatcaaggaatacagtgtaagtatatatattaatgcattaaatctatttttatttttttacctgtttctcccaaatatctcaattcctttcaagtaaagatccttctctacaggcgtccacatagtgttgtttggatctgagaccacaatcttgtttgatatagagttatcattatccatcacatgatcagcttctgtcacactcctcacctatttaatattaaaccagtaactaataaacgtaattaaggaatagacaaaaaaattgagagagagagggagagagatagagaccttgaggtaacaatgctcactgcatggttgtctatcttcatcctcaaacaaactagatttgtcttcgctctgacaagccaaagcaatctaattaagttaatcacttaaccttatatataagggttgtgaaactaacaaaataatttaaatgaatttaatgcttacggatctagactcgggctcatacttctcatgcatatgacaatcgaatatctgtaaaacaaatgataaaataaaataaaaacatgtatgatcatctcccttttttgtggctaaattaaaaaagaaagattcaaagttaccatgcaacgacggcaatgacgtctatcagcaaaatcctggaaagcagtagttattgtcttggatgtcaaatcagaagcctcaccagcagttccatcattcttaagcttgagttcattgtatctttcctacattagatttgaaaatttaaaacatttctcacgacgaaaaacaacaaaaattaaataagcaggaaagttattgatcgacgtatgaagtttttattcgaatattgttaccaatatgtccgaaacatccacttcgaggtacttggcgagagcacgccgcacgaccagatcatccaaaccatagtcctgcccaaccgtcctgaaaatttcttgagcagtttattaaatatggactacaaattaataatcaagaacatatgtaatgcaaaaactaaccatataaatcggtctacatcttcagaaaattcgcatttttctttcttgatttcttcctcatcttcttcttcatcttcctcatcttcttcactgctcaattctagtgcctcaccattcaaataatagatttgtctcttaccaatcacagaatcactttcagccatcagctggctactgcaatgttaaagaaatgtatatatgcactatgagtgattactatatagtatatgattaatattttgaaactagtacgaaacaaaaaacacacatgccttttggtgaagacccatgtaatggatcgtggtagcttctcaacaattggaagcttgacacttggtaataatggtacatcttcatcaagaaataatggtacatcttcttcaagagcataatcttgatcctcatcaagaacataaccttgatcttcgtaagaattataatcagatgaggcactgaaatgacgaagtgggttttgcattctcgacaaaagtgatttgttgtctcctccattatcatcctctgcagcgggctggtttaagtcaaacgattgatggtgtgaagcatgagtagccacacttggaatgtatctcagctcgaattttctctgttaatcaagtaatatataggtaaatgattttttaaatttcagaaactggactctatatatagtgaaactagaatacttgaatacaaaagttttgatttcgatttcttgatatatgcatcaatcttggcttttttggctgaatgttaaaaaaaaaacaatttggacctatttagtttctttgtactaaaaaaaacaaattgtattactattttgtttgacaaaaacaaaaaaatctactattattttcaattttattttataacctaagttccagctttatattataaatatattaattatttttttattctaagttttggatacccgacagatctggatgtcgttatcgattcgctggcattttctaaattctgtttttaatttaaaagtttggaaatttctctttttagttttaaagattatgactaatgtataactgtttattagatgtatcttaacatctctttggaatcgtatagttatgagattaagtcctctcctctccttaattttcagaaaaacatacagaagagaataaaatattaaagcaaccaaatgtctcttaccttgatatgcagaaatctctccttttcgatttgctcttttatctgatttagttcgggtggcaaaccctcaccatcgtcctcatggttttcctagacaaattcaaaaataaaagttttatggatcatgcatgggacgaataacataatagatcacaagaaaattcaaccctaaatgttattgatctatcataaacacacaattaaaatatatggatttcataacctagtcaattcatatatgtttggagtgaaactaaccttctccattaaccactcgcctcttctttttttctcgtcttctctgatgttggtgaaaaggataatgcaaagggttttttaaataagaagttgatttttttttgtagaaaaccttattaaggaaaattataatctggaagaaacgtatttggacttgcttgctttaaaaggaaaataatatgggaaatttaagaaaattttaattttcaaaatatagtactatatgtatgtagatgttgggtttgcttgacgtttgacagctcaagtttaaattcatatacaatattataaaaaaaaaggcgttaactcatatttatgtgacaacttggtttagtaaaccaatgaaaaaatgttgatagatcaatatatacattttggagtgtccggtaagacttatattaatgtcattatatatattagtattcattcctagctagttttctatttaagcttatatattatgcatatatggaagaaacaaaatgagtttaaatcttcaaaaatatatatatggctatattattcaattcgtaaatttaattatacgcatttaaaacttctacgtaaatccgatattttttactatttataacgttaattaaatctccaagtttttcttaaaaagggtgtgttataaaaatataattataaaaagacttaaattaatgttcaatggttatttttagataaaatatttttgctttctgatattctactatttttgtgacatatatacgggttaaattcctagcaagaaatagaaaataaaaataaaaaaatctcaaaaacattcaagagatgagtataatatgtcaaatatcttacacatgatcatcattacacatatcatcaaaaacacatgattcacagccttttctcgacctcttaatgctcaaagtcaacgtattcacaaaatccaaaaaccctttgaagatcttcattaaaccaattccaacacagatgtaatacatacaccagttcacaaaattgagaccctccaaacgaatggggaggttaagtctatccgccgtaaccaccaccacaagactttctacctcatctcttagcctccaccaccacattataccaaaggtcactgccacaacggctctctcggaccacctctcctccacgtagaccccatatatagtgttgtcaaccacaggcttaaccacgactctaaaccacatcagcatcacttcgtgtagccccaaaaagaacaaaaccctaaccaacatccatctttcatgtgtcgcaagaaacaagtttttgtctggatttatagacatggtcgtgctcatggttcttttgatcccaaaggcacaagcttgggcgatgaagagaacgatccagcagatgtagagatgggaatggagaacagagcattctggttttcctgagagactgtggattaaagtgaagacgatgatgagaaacaagatcgtgtataagactccgacatctgcctggtgaataacagaggaaacgccggagacggtgaccggagttgaggaggtatagagagagagacgtgaaagaaagaggaaagatagagggaggaggaggctaagaaagctaatggagatcatttgaaatggtcgaatcagggaccagctgtttcttgtgttcttttgtgtttcttcatgttccatcttaattcgcaaagattgaaacactgagaagaagaaagaaaatgggatgatactgtttcttgaatgtgaaggaacagaggatgtaagaaagatctatataaaagcattaagactgtaattggcagccacgtctatggtcatctagctacaaaggtttgatcttttcgtcttttcgaatgattcaatataatgatttctgttttgttacaatcaccacaaaggttccctttcttatttctctattttttggtctacactatacatcaaattataaaaacatgtccaaacttatggtaatgaaaagcccaccagttttaaaatataggtttaccgatgaacacagccggcagatggataatcgtcgtgtgttttttttttctttgaaacaaataatagatatgaaaaaatttgatttttaaaaataatggatccaacgttcccaacatatctagtgtttgaccattacatggataaagttcattgatatctttatttttttaagattaaatgtgtgttgtacataatattataaatagattaaaaataaaataattttttggaaaagaggataaattcaagctctcgagagttcgttataaatccttgtgttaaaacgtaaattactctttactctaatattttaaaattttttactctttataacgttaactaaatgtccaaagttttcttaaaaagtgactacgtatatatattatgcacgtgttataaacataactataaaaagacttaagatccacttaaattaatgttcaatgattatctttagattataaaagattgctatttgatatcctattatttttatgacccaaaaaaaaaaaaggtttaaatttataacaagaaagaagacatttaaatgaaaaaactatatatataaataaatcaaatgagtttgagtataaaatgtcaaatttcttacacatgatcatcaatattacacatatcatcaacaagacacgattcacagcattttctcgacctattaatggtcaaaattaacatattcacaaaatacaaaaaacccttgaagatcttcaccaagccaattccaacacagatgtaatacatccaccagttcacaaaatcgagaccctccaaacgtatctgaaggttacgtttaacctctgcaaccaccaccaaactttctacctcatctcttagcctccaccaccacattagaccaaaagtcaccgccacgacagctctctccgaccatctctcctcctccacgtaaaccccaaacacagtgtcgtcaatcaccggcttaaccacgactctgaaccacattagcatcacttcgtgtaggcccaaaaagaacataaccctaaccaaaacccacctttcttgagcagcaagagaaaagcttttgtctgtatcgatagaaatggtcgtgctcatggttccttcgattccgaaggcgacacaagcttgaacgatgaagagaacgatccagcaaatgtatagatgggaatgcagaacagagcactctggtttcccggagagaatgtggattaaagtggagacgatgatgagggacaagattgtgtataagattccgacatcggcctgatgaagaagggagaatactccggagacggtgactggagctgaggaggaggaaacggagagacgtgaaaggaagaggaaagagagagggacaagaagactaagaaggctaatggagatcatttgaaatggtcgaaccagtgaccagctgattcctgtcttcttctgtgtttcttcatgttccatcttaattggcaaagaagaggtagagggagaagaagaagaaaaaatgggaagagactgttgcttgaatgagaagaaacagaggaagtaagaaagatgtatataaagctttaagaaagtgtgtttggcaaccacgtctatggtcgtctagctacaaaggttcctttcttattcctttattttcttaatctactatacatatatttaattaaaattgtccagattttttctaatgtaaaacccactaattttcatttatttgctcatcgatgaacacagccggctgatggaccatcctcgtttttttaaaaaacaaaatatttgattttttttttttgtggcttttaaataatggttactacatgttggtaataataagttatattcaaaatagtatctatatatacatttttgcagtcattttgtgaaataaatcctgtagttgagacttatttacgatggctgccactagattttaatgcttgtttttgataattataaaaaaaatattcgaattaaatatttgacatttaacaatcttcctaaaatctctccacattaactacacgattatttactaaaataaaacttccaaaatatttaatatcatttaattattacaaaattatcatttttaatattacttttctccataactataacaattcgattataatcatcaaagcgtagagatataatttgatagcatttaattactataaaattacaaaatatttagacaatgattcataaacatatcataaataagatcaacattaataaaataaatgagtttttttacgggacgggtttgacaggacgttatttaataatatttgtaaactataaaataaaaatattttataaatagatacaatttgtaaacttttatatatactaactttaaaaaataaattgttcccgcggtacaccgcaaattaaaatctagtctttcacataaatgcatccgacggacccaacatatcttagtgttcgaccattacatgaataaagttccccgatatcttttttttcttctcaattagatcacaaatacgtgtgaatatgtagtaatactataagtagattaaaggttatattaaacatatcctgatttttttagaaaaagaggataataaattaaaggtctcgagtgacaggtaataaataactcaatagaaaagttagttataaatccttgtgataataattgacaaagtcaggattagtggagttgtaactttcagtttgaaaatggaagtcagataaaaatgcatcaatcttctactccttaccactaaagacagtcaacatcaaaagccttattatgaatgttgctacaaagctgggtgtaactaccagattcagtaaaacaaattaaaagatcataggttgttcaatcaaacagcacagtaagaaactttactttggtcttcatgtatgtatcaactacagagtttgatcccaaacaaatctgattttccttgtagaatagaaacatatttcatggaaaatctcagttcatcaaaggcccaaaaaagaacaagtgctaaagctgaaccactacctttaggcgattaagctgctgcaagtggctggagagctttaagagggttcatgataacaccgtcgataagtccatactcttttgcttctttggcactcatgaagaaatcacggtctgtgtcctggtttatcttctccaggctttgaccagtgtggtatgcgaggtaaccgtttaggtttgccttgtgatgcagcatttcatttgcctggtttcagaccatgaacttgtgtggttaggtttcaaaatcatctgatattcaaatcaatctagtcgctccaagaacttaagaagatgactgggattaaaaaccgaaatataaaggcgaggatgaatgacctgaatgtcaatgtcggtttggccaccttgagctccaccaagcggctgatggatcattatccttgagtttggtagactgtatctttttcctacagttttacgaataaagcatgactcacatcagaaaaatgaaattcataagacttcactaaaagatttttactaatgattgaaaggattaagagactacctttggttccagcactaagcagaaaagctcccatactgttcataagaaaaccaacacagaaaaagaggaggatgtcataatctaggaaacattcaaccacacagataaaaaaggattccgtgttttcgagaaacactatgtttttaactggtaacttttggtcatgaatccaacaaaagatcaagaacagttaaccacattgaaaagagaaattatcaatttaccaaggaacctaagaaaatcaagagataatgagagtgaaaggatggtgaaagttttacctagcagctagaccaacacaaacagtggacacatcaggccggatgtgcctcatagtatcgaatatagccatgcctgggtaaagtaagagatgcacgagtcattaaccataaaaccggaaaaaagataaagagtaagctgacaaagttgttattaccagctgtaactgatccaccaggagaattaacatacatgacaatatcctgttcaacataagcaaatatcagaatcctaaagcaaaacatctgaatcaagtaacaagacatgaattagaattcaacaatatctgaccttagtaggatcaacagcatcaagatacaggagttgagctacaattatgtttgccatatcgtcatccacagcaccaccacagcgaataatcctctaaaagatcaaaacaaacgaaaccattcattaacactaagctagaaactatgataatcaatcttaaagaaagagtagatttcataagtttacatattggaagagctgactaatgatactctggaaacgttcttgcaccataggaggtggtccttgtccttgagcataagcaggaaaatacggcgaagaagggacttgtaaatcatctctgcaaagtaacaaatttatccagacttgaccatcaaaaagagttcaaaatcacacagttcaagaacatggttaaaagctcaagtttcacctaatggaccaaactccttgaggagacggaatctccggtgtccagagattgccggaatatacagctttcggagttgaattcttccaattctttctatcgctaactaacttattcgtcttcctgcaaacacaatccctaagttaatctaaagaatccatagtttcgagagtgaagaaaagtggaaaatggcaaaaaaaccttgaacggagaggctcgaaaggaagagaaagcttgggagaatcgaaagaggagccattgggactagcggagacgaatccagctgtgaatctgagagaagaagccgatgtagagacgcaagcatgagccattttcttgttatcaatttggggatgaatgaaaccctagttccgttcaccggcgatgagcttccggctcttatccttgttgaaaatttggggattttgttttgcttcttcgaagtgagactaatggtggtgatatctgtgtgtgtgttatcgggtcgggttttgaacccgttaatttaggattgggacgggtcaattttaggtccgattatattacacgctaacgcctttcggtacttacaaaacgcgattgtcacgtgttgttttcaaagaggaaattttagaattaaagcattaaacaataaatatctgttccagaatatgtgtttatgggctttgtgtgaaacagagaaatgggccaaacataaatatgcatgttcgaaaattatgtgtttatgggctttgtgtgaaacagatataactgggccaaccataaatacctcttccaaaattcttttataaagtttatgatatgttgaaaaatatattcaaatggatcataattctaaaatggttaaatagtagtaatttgatttcctacaattctcatcagaaaatttaagaagaaactatacatttctcttctgaatcaacttactgactttaataataatttgtacattattaataacatttacatttttgaactcattaccatacacttttttttttctcaaattcaagacttcacattttgataatttggaagaaatttttttttgcgtaactttagtatctatattatttttttcgttgtactatatctctttatcattaatatacttacgcatttacatgtggatcatctgagaaatagccaagacattgctacaaagtttcttaagaaaatcatcaacgttagccatcggcgactcaagctccgacgactcagcgaacgcgtcagagcaagtcaccacatcagcgatcgcagcactgaccacactctcgagccgttcaaagtctccatcatcgacggctacggaagcatctttaagatcatcgagaagcgactcgtagttatcgacacacaagtccaatacatcagccacgtcacgcggcgttgacttatccacgatgagacgcttggctaagtcaagcgtggcgttagctttctcgtagagcgcactcatctccattcgaaggacgtcgatgggttttggctcgaatttgcggaagtcacggaggagtgggaggattgagacgatgcattcggcggcgtagtcggtgttagagcagacggagccaacggcgggtgacacgtgaagggatgagatgttgagcttagagaaatccgggaggtttttaaaggtacttttaaggtccgttaggtttaaaatgttccattgcgtgaaggcggagaaatcgttttcgtctacgtcgccgtcggtggtgggggctacggcgggagaaggagcggcggaggggacaatggaggagattatacgagtggaagaggaaggagatgagaggagagaaaacaaagcaagagagaaacagagcaatggtgatgacttcttcatcttatttcttttgtttcgaaaaagcttaaagagagggttattaagaatgaagattttagagaaattgttttgtttataaacactaattttagagtaacatttgttatctaaaattttcagtttttattttacaccgaagtagttcatggatggttttgttgccagttaatgttgttacttgttaaatatcctttatcattatggtaatttattaactaaatatagatcatatcagagattatttagtaatattagtgccgcctttgaattataccagaaatgaagtagactgtttaatatattgcagcacaaaacagagaatacaagagctttttaatttgttaacaagtttatcgctatgcaatcaaatcgtataaaaatcaccaagtttggatatgattagccactaacttcttatgcacgtaaccaatcgtatagggttatagataacaattttcctataatcttgaaatatctaattaactcctttgtattattagaaaaggaaaaaacattacaaaaagtttacttaaaaaatatcgataaatctgtattttgattaagcaaatttgaaatgatttatcttttaattttattggttgataacctcgtataatggaagaaaaaacccttttaatacatagttagttagggagattaaaaaaaaccttctaatgctaagttttaggaaaattttaggaaaaaattaaaactaagtttatcaaaacaaaaaaataaaaataaaaaaataaattataagagggagaagccactggttggtgtatgactgagtattggctagcgagtgagaacgatgctgaattccaagaagttgccttgtgtaatatccgtatgaagaagaacgtccttgaccaatttaagttcccgacagagaacaacaacaacctcgttgagcaaccaccactacacaacaatatggtttcaggatccacaatggatcaaaacatggaggaatatgcggatgagctcgaaaatatgcttgatgaagaacaagaagaagatgatgatagggccattcaacaacaacatccagagtttcctcttcaaagtcatgattcaagatccacattggataaacatatggaggaatatgcggatgatcttgaaaagatgctggatgaagaagaagaaggagatgatgatagtgccattcaacaacaacacctagagattcatcttcaacttcaagatcatggttcaagatccacaacggatcaaaacatggaggaatatgcaaatgagctcgaaaacatactggatgaagaagaagaagaagatgatgatgatgataggggcattcaacaacaagattcacagattcctcttccggttcaaagtcaagattcagggaacccgcttgttgtaatcatggaagatgaacgtgttgaccaagatatgatctttgatctggttaaacaagaagaagaagagaggaagctgaaaacgtttactgagatatgtttcgcaggattgaagacgcagaggaacctccactttcaagactcttatttcgcaggaggtcaagagatgtctccatgggacaacatggtgaccaacaacaatccttttgggctcgtgtttaatacccatgggcacgagatgcaagaaccacctgtcattaatggggtcaattaataaagatttatcttggtatggtgcagggaaagagcagatgataaaaagaagaaagcaatgttgagtgctcgttatttttcgttgtttgagtgtgtttgtacatattatctctgtatttggtagtggagacgatggtttagagcaaaaagtcaaataaagacattcattttataactataaatttagagagaaagggaaagaaaataaatagtgacagctacataaacttgcatacaacaacataaatatatttttgctatcgtaaacaaaacattatatcattatcaattagaagcagtcatgtgaagctgaacaagggaagcataaaccccaccgtctattttgatcaacgtttcgtgagtcccattctcagcgatcacaccgttcttaacgatggcaatgacgtcagcgtttttaatggtcgataaccggtgagccaccacaaccgtggttcggtttacaatcactcggtcaagcgcatcctgaaccagtcgctctgattctgcatcaagagcactcgttgcttcgtccaaaagcaatatcttcggctctttcacgatggcacgtgctatagctacccgctgtttctgtcctcctgataactgaatccctttctctcccaccactgtgtcgtaaccctacaaaattgtattgcttgcatcgtaagaaactttgaaaaacagagttcttacaaatttgttctgtttttattccattacctgttgtatgctagagatgaatttgtgtgcattggcaagttctgcagcggctatgatttcagactcggttgcggcctcttcacttcctttgccataagcaatgttggctcgaatcgtgtcgttgaacaagacaggttcttgtcccactagtcccatttgttgtctcaaccatttcaattgcagcttcttgagctcaactccgtctaaagttatctgaccggaatctggatcgtaaaatctttgtaacagcgagatcaccgtcgatttccccgacccactttcgccgaccaaagcaaccgtctgaaaaaaaaaagacagaacttgatcagaaaacttgagtgaaaaagtttcttaatagaaagtttgggtttggtccaaagatttgttttacctttcctgcgcgaatggttaagcaaagatcacgaaagatctgaatgcctggtcttgctggataagtgaagcttaagtgacgaagctcaatatctcccttaacgttctccaacactgtccctgtctcatcgctcgagtctatctttgattttctatcgatgatcgcgaagattgaagcagctgcgaccttggctttgcttgaatctggagcgaaagtactcgactgagaaattccaatagctgccatggttaacgcgaaaaacacctgtaagatccagagcaagatccattctacttcattactaggcaccgagatttccaaaaatattttagtcttgccatcaatgacagtagacgaggacatcaattcacctggaaaacatcaatgaaagtagttttgccatcttcaaccaatctagctgccgcgtagaagcttgtcgcgtagacacaaaacagaatgaagaaggagaatccaaaccctaatccgctgatgaaaccttgctttactccatcttttatcggaccttcacattgcttattatacatctgcatcactttctcctccgcgcagaaagatgcaactgttcttatactccccaccgcgtcgttcgctacctgacttgcctcctcatactttgactgcaaagttattcaaaaccagagtaagtttcttgatccacaagaaataaaccctagaaagccatgaacagacctttgcgtcggcgctgaatcctttcataaacttgacttgaagaaagccattgataccaataagaggaagcatcactaagattataagcgccaattcccaactcgcagtgaacgctataatcaatccagacgcagcagatgcagcgttttgaaccgctaaagacaatgcatctcctactagagctctaatcaaagctgcatcagtcgagagccttgcccccattgtaccactcgagttctctggctcatcgaaccagctaacctccatgtgaaccgctttctcaaagcacattgactgaattcgtcgtataagttttcctccagctactgcaaacagatacatttgagacggtgagacaatcaacgaagttactcccagagctacaaatataatcgcccagaatcttgaatctttctttaattggtcagctggtttgaagaacgcttcgatgactcttgaaatcagaatcccgaaaagcgggaaaatcgcgccattgattgctgctactacagttccaagaaggagaaccgggatctcaggtttgtttagagctgcgattcgggtgagtgatacttttcggagcggttcttgactcgtcgttccagtttcctcttggcctactctttggctaccgctaccaaggtctagtccagcgaataaaccaaggacattcaaagaatgatgacgactgctatttccaaaagacgaggttccaccactgataaccgatccctctcttgatatgttcaaattcgaattccggaaagatgatcccgaagccatgtctgatggttttgcatcatgacccttgtttatctcttgacaccgaatgagctgcgaataagctcccacggaatctttcaacaactcagaatgcgaacctttttccaccatttttccgctgtgaattactgcaatcatatccgcatttcttaccgtgcttaatctatgcgcaaccaccaccgtagtccggttaaccatgactctatctaaagcctcttgaaccactctttcggattctgtatcgagcgcgcttgttgcttcatccagaagcaaaacccgcggatctttaagaatagctcttgcaatagctatcctctgtttctgtcctcccgagagctgtgtcccgtgctctcctacctttgtatctaacccctgaggtaagttatttatgaactttgctgcatttgctagctctgttgctactttaatctcttgaagcgttgcattttctttcccgtaggcgatattctccatgatgctcgacgaaaacagaacaggttcttggcagaccaatccgattttgcttctgatccatttcaactgaaactccttaagattaattccatcaatgagtacttcaccggctttcggatcataaaacctctcaatcaaatttatcaccgtagattttccacttccactttctcctaccagtgctgctgttgcaccgctcgggataaacagagagaatccatcaaatatctcctcgtctggcctcgcggggtaactgaaatgcacatctttcagttcaatgtctcctcggatatctccaagaacctttccatttacgtcataagcatcaatcaaaggctttcttttgatcgtctcaaacatcttatatgctgcagcttgacctgctgcaaatgcggttacacatggagatgtttgcccaagcgacctaaagaaaaacaaaacagaacacaactcttaggaatctcacatttataaacaaagaagaagacataatctgatgtatatatagaaccaatgatctaggcatttacattgaacccgcaaccacaatgatgatcacgttgatcacagagccaccggtataccctttttcgagtatcatcttcccaccaaaccaaatagccaaagcatagctgctgaagaacacatagatcattactccaagtcctaaaccagtggagaaaccttgttgaatgcttgatttataagccgatgttatgtacttcttgtagctgtttattgcttgcttctctcccgtaaaagaagcaaccttttaaaaaaaaatggaatttagcaactaatcttacttaaagatttgttctgtagcttagaaagactgatttttaccgttcggatagacccgattgtctgttcaacaacagttgctgcttttgcataagcggcttgtccccgagaagaagctcgagtcactaaaagcgccatggctgcaccagccatagccagaaaaggaatcgaagttaacataaccaatgttagcaaccatcctttagcaaaagctaaagcaaatccgccaacgaaagtagataccagctgaataaacttccccacctgcaacattcaagaaaagtgtaacaaacttcaaaaacgaatccaatcattatatctaagcctgaaatcgcaatacggaagtttctctgttagctgcattaccttctcacccatggcatcttgaatatgaacagtatctccagacattctaccaacaacctctcctgtgtttgtttcaacatcgaagaatccgatgtcttgtctcagaattgttttcagatagttacttcttatctttgcggcttgtctctctccagtaatcatccaacaagcaacctctacaacaacaagaacaaaaataccaaaacatcacatcctcaattctctaacccttaagcaaaatgcaatggagaaaccaaaagaacaaaacttttcttcctcaattctctaatccttagatgcaattgcaacagagaaacaagcaaatcgcgggtaatgacttacgaagaaaggctgctccaagtcttccaagtccaaggtagacgaatttaagacaaacctatataagaagacacagtattagtactaaaatgtgatctaagaacacaatcaaaaagttcaaaaaaagtttggatttttacctttgagacaacatcaacaatgtctttgttgttctgattttttccaaaggaatcgatgagatcaccaaacaacaatgtcataagaggtaaacacactccattcccaatagctccaagtgagccacatatcatcaaaaacacatcgaaggaatctgcaaacgcaaatagcttgtagagaggaactgtcttggccttttcatcggttttagatgttgaatgttcgtgtgaaacagagtcgccttctccggcgccgtcacggttcattttccggcgctgacacaaatcagaaggattttaagaaatctgatcattctcagatcgaactcgacggtatataatgataaagttaggagctttcttcttcctaaaacccagacaaaaagagagcttttttttaactttttcctaaaacccagaaaaggtcgagaacattaaagaatttaaggaaacatttcagaccagtcgtagttgagagttttactgatataaatcccaaaaccccccacttgtgatttctattaaattttacctgagagttcacagaaattatcaccatattaattaaaatactaatatgtaatattagattagtagttaagtataaagatttagtgaaaataaaataagattaaacaaaaatgaaattagtcaaatttatattagttacaaagttgtatagttttacactttgatttgtaagtcaattttatattagtaacaaagttttatagttttacactttgatttgtagttgctcggcaatgaataagattcttttttttatacacttttaattaatcgtaaagacgtaaacataattagttaagagaaagaaggagaatttaaaactgacagatggagagacaagagttgttgtagttattaaagaagtaaattgtgatttataatagtaatcggatgaaacagataatgttaattaaagggaaaaggagtccccatgcttaaatgcttttgggctttgggttactcgtataatcagagatcaaattaaaacacaaaccccaatcataaaaaattttaaaaaggaaacaagtatagaacagacaatattaaatggtacatgaagacaattccgtagataatttacacaaattaacagtctgagaggattttcatttaaccggaagttgactaagcacaaaagtcaacaaagatattcaagaaacaggtatgcatactttcttgaaagacaagatatatatatcagcttcgttaacttgtatacaaacaacaacaaaaaaataaatacaaaacctttagtacattggctagtttttgactcaagccaaaactgaagttttagcttttcataaaaccaaaactatatatcacatcaattagaagcagtcatgtgaagctgaacaagcgaagcataaaccccaccttcgattttgatcaacgtctcgtgagtccctttctcagcgatcacaccgttcttaactacggcaatgacgtcagcgtttttaatggtagataaccggtgagccaccactatcgtggttcggtttaccatcactctgtcaagcgcatcctgaaccactcgctctgattccgcatcaagagcgcttgttgcttcgtccaaaagcaatatcttcggctctttcacgatggctcgtgctatagccacccgctgtttctgtcctccggataactggatccctctctctcccaccactgtgtcataaccctaaaaattgtattgcttgcattgtaagaaactttgaaaaacacagttcttacaaatttgttctgttttttttttccattacctgttgtatgctagagatgaatttgtgtgcattggcaagttctgcagcggctatgatttcagactcggtagcggcctcttcgcttcctttgccataagcaatgttggctcgaatcgtgtcgttgaacaagacaggttcttgtcccactagtcccatttgttgtctcaaccatttcaactgcagcttcttgagctcaactccatctaaagttatatgaccggaatctggatcgtaaaatctttgtaacagcgagatcaccgttgatttccccgacccgctttctcctaccagagcaacagtctaagagaaaaacaaaaagagtttgtttaatagtctaatcgaagattaaaaattcctaagatacagcttggtttaagagtttgtttacctttcctgcgcgaatggttaagcaaagatcacgaaagatctgaatgtctggtcttgctggataagtgaagcttaagtgacgcagctcaatatctcccttaacgttctccaacactgtccctgtctcatcgctcgagtctatctttgattttctatcgatgatcgcgaagattgaagcagctgcgaccttcgctttgctcgaatctggagcgaaagtacttgactgagaaattccaatcgctgccattgttaacgcaaagaacacctgcaagatccattcttcttcattactaggtcacagagattttcaacagtacttgagcagtgattaagacagttattcacctggaagacattattgaaagtagtcttgccatcttcaaccaatctagcccctgcgtagaagcttgtcgcgtagacacaaaacagaatgaagaaggagaatccaaaccctaatccgctgatgaaaccttgctttattccatcttttatcggaccttcgcattgcttcttatacatctgcatcactttttcctctgcgcagaaagacgcaactgttcttatactccctaccgcatcattcgctacctgacttgcctcctcgtactttgactgcatagtaatccaaaaccagagtaagttcctcgattcacaagaaaaaaaacaaaggatttttgcagagcctaaaaaaaatggaaccaaaccggttgatgtacgaacctttgcgtcggcgctgaatcctttcatgaacttgacttgaacaaaaccattgataccaataagaggaagcatcactaagattataagagctagttcccaactcgcagtgaacgctataatcaatccagacgcagcagatgcaacattttgaacggctaaagacaatgcatctccaactagagccctaatcaaagttgcatcagccgagagccttgctcccattgtaccactcgaattctgtggctcatcgaaccaggcaacttccatgtgaaccgctttctcaaagcacattgaccgaattcgtcgaatcagttttcctccagctactgcaaacagatacatttgagtcggtgagacgatcaacgaagttactccaagagctacaaatatgatcgcccaaaatcttgaatctctctttaactcatgagctggtttgaagaacgcttcgatgactctagagatcagaatcccaaaaagcgggaaaatagcgccgtttattgctgctgctacggttcctagaagaagaaccgggatctcgggtttgtttagagccgcgattcgggtgagtgatacttttgggagtggttcttgactcgccgttccagtttcgtcttggcctgctcgctggctatggctgccgaggtctagtcctgtggttaaaccaagaacattcaaagaatgatgacggctactattaccaaccgacgaagttccctccattgactttttcaaatttgaattccggaacgacgatcccgaagatagctctgatgttttaacatccttgtttatctcttgtaatcgaatgagctgcgaataagctccctcagaatctttcaacaactcagaatgagaacctttttccaccatttttccgcggtgaattaccgcaatcatatccgcatttcggacagtacttaatcgatgagcgactataactgtagtccggttaaccatcactctatctaaagcctcttgaaccactctttcggactccgcatcgagcgcgcttgttgcttcatccagaagcaaaatccgcggatctttaagaatagctctcgcaatagctatcctctgtttctgacctcccgagagctgagtaccgtgctcgcctaccattgtatctaacccctgaggtaacttatcaatgaacttcgccgcattagctagctctgttgcagctttaatctcttcaactgttgcattttcttttccgtaggcgatattctccatgatgctcgacgaaaacagaacaggttcttggctgaccaatcctattttgcttctaatccatttcaactgaaactccttgagattcactccatcaatgagcactgcgccagattttggatcataaaacctctcaatcaaactgatcacggtagattttccacttccactttctcctactaatgctgctgttgcaccactcggaataaacagagagaatccgtcgaatatctcctcgtctggcctcgcggggtaactgaaatgcacatctttcagttcaatgtctcctcggatatcttcaagaacctttccattaacatcataagcatcaatcaagggctttcttttgatcgtctcaaacatcttatatgctgcagcttgacccgctgcaaatgcggttacacatggagatgtttgcccaagcgacctaaacaagaagaaagtagacatacctgttaggattaatctcacatcaaatatataaagttgattgtctaggcttttacttacattgaacccgcaactacaatgatgatcacgttgatcacagcgccaccggtataacctttttcgagtatcatcttcccaccaaaccaaatagccaaagcatagctgctgaaaaatacaaagaacattactccaagtcctaaaccggtggagaaaccttgttgaatgcttgatttatacgccgatgttatgaacttcttgtagctgttaatggcttgcttctctccagtaaaagaagcaaccttcaaaccaaaacaaaacaaaaagtcaagaagcaactgtcagttaaagattgttttgaaacttatagaaatgtttgagctttaccgttcggatggacccgattgtctgttcaacaacagttgctgctttagcataagcggcttgtccccgagaagaagctcgagtgacgataagcgccatggctgcaccagccatagcaagaagagggatcgaagttaacataaccaatgttagtaaccatcctttaatgaaagctaaaacaaaaccgccgacgaaagtagataccagctgaataaacttcccaacctgcaagattcaagaaaagtaacaaatttcaaaaacgaacccaaacattatatataagcttctatatccattgcattaccttttcacccatggcatcttgaataagaaccgtatctccagacattctaccaacaacctctcctgtgtttgtttccacatcgaagaatccaatgtcttgtctaagaattgttttcagatatgtacttcttatcctcgcggcttgtctctctcccgtgatcatccaacaagccacctctacaataacaagagcaccaaaaatgcaatgaagaaaccaaaaagaaaactttccttcctcaattccaagtaaagtgtaaacttacgaagaaaagctgctccaagtgttccaagtccaaggtagacaaatttaagacaaacctattagaagccacatcattaagtagaatgagatcaccaaacaacaattgtcaaacaactaattagtaaagtttggatttttacctttgagacaacatcaacaatgtctttgttgttctgattttttccaaacgaatcgatgagatcaccaaacaacaatgtcatgaaaggtaaagacattccattcccaatagctccgattgagccacatatcatcaagagcacatcagaagaatctgcaaacgcaaatagcttgtagaaaggaactgtgttggccttttcttcgcttttttcctctttcttcgtctcttctccttctttaggacttttagatgttgatggttcgtgtgaaacagagtcgccttctctggcgccgtcaccgttcatatttcggcgctgacaaaaatcagaaagcttttaacttttaagaaaactgataatacccagatcgaaatcgacggtatataaccaaaaagaactataaagttacgagctttcttcttcaggttttgaaaaataaagcttttttaactttttttcctaaaacccagagaaaaataaagaatttaaggaaacatttcaatccagtgccagtcctatattgacaatctcagagtttactaatataaatccaaaaaacccacttgtgatttctgaaaagatttgtcctttatgttaaatttcaatctagagagttcccagaaataatcacaaatgaaacagagtctgttaagggaaagtgtcacatgctttttgcttgcccgtaaaatcagagatctaattaaaaccctaaaaccaatcagaaatctgaaattaaaaaggaaagaagttaaaagagaacagacctgaaagatgtggcgagaagctgctaaaagcgaaaaggtttttgaaactctgtgggaataagacagacgtgagcgtagctgttgttgttaatctaatctttgtttaattcttaatatattcaacttttctagagtcaaatttgtttctgcagaaaaatatgagaattttgcctttttatatgcaactcttgtttcttggggtttgcgataattgcttgagaagcaaggagagtgggaataaactattgtcatggtcaaaaaacataataattatccattttcgaagtgtttactaaaatatcataaatcttcttctttttaggaagacattctctaaattcacatgttataaatttactcttgttcactagtacttgtatatgaaaaatgttaggcagacagaattgtgtagttggttttactttttccgaacaatgaacatgataatttcacaaatctcatattatggaatcaccaaaaaataaaaatctcgtgagttaatatgaaaacttgtttattccaagtaaagagagcgtggagtgtggttagtaaccactgtaagagattggaagattcaatgatacaaaaatcgaaatcttacgttaatttagatcgatgatcaacacttgtagtttcaataaaccagatcagattcgcaattgcatgttggttaacaaacataaaaataaaagatataaacattttaatatttaaaataaagttactatctggtttttagaaataaagtacattattttacttaatttgctattgttctaaaaccaaaaaccaaaaacaaaaatcatgatgatcaaggaaccacttgcatattgatttatcccctccgattattgttaacaaacagtgtttacaatattaaatggtagatgaagacaattccgtagataattcaaacaaattaacgaagactgggagaatttccactttaccggaagttgactaacttgcttggcaactaagcaaaaaagtcaactttatatattgtagtaaaacatatttcaccttgtgagcgttaagacatccattttcttggccgctaaggctattgattaactcacactcgtcataatgtatgtatattagtattatttttgttcaagcaaataatgaacttgattattattcttctgtttatgttgtcttctgtaataaggaaaaacatgagggtccaattattaaaaaataaagtgataattatattcaaaggtttctaaccaaaaccaacgtcataattaaaagttaattttgtgctaactagtaactactccttataagacaagaacaaataaacttgtcaactaattataatttggcatgtttacatgcaattgtaagtactatagatagtaagaaaagaaaacaactaatgagattaattatagtgataatcggaaaaaaatgttaacatactttttcgataaatctccaagttttgaaaacaactcgaacaaaaaaaaaaagcgtcactgcttgcgtcatcaacaaaacacatcacacatgactgacttaattacatgagaatatttttaccactttgaaataagaacaaataattagtaatttaaagtagtatatccgttgtagtagtagtagtcatgggggccacttaccttcttgcgattcccaattccccgcgagatcttattgtgtacggaagatgataccatttccattaactctgtttcatcttaaaacgcaaaacgtagcgttttacgcacaacttttatgtagtcatgatccctatggaccttaatccaatacaaagctctgacttggatttcgatatttaaagataattgtttgggcctttgatgggcctcattaatcagatgttttacttccctgatctgtggataaatttcttaaccaaacaaaactcaaaacccggaagatagatagagaagcaacgtaaagatcatgaacatcaaaattctcagtcgtcaaaaaaccaaaaaaccttttctttcaaatttgataatctcttcagaagctaccaagaagaagaagagaaagaagagcgttttctaaatggaagaagagaaccttctcaatgagaaccttctccatcccaacgagtcctcaccggaagaaactcaagtcaccaccgtatcaaaatcgaaatggaccattcttgtactagccatgatcctcctcttggtctacttaaccttcggggtttgcacatactcattctttcgagaccaattctccggaaccgagaccaatcttttcgtcgacgctttctatttctccatcgtcacattctctacagtcggttacggggacattgtcccgtcaacttcaacgaccaagatcttgaccatcgtcttggtatcaaccggcgtcgtatttcttgattatctactcaaccgcgtcgtgagtcacgttctaagtcttcaagaaaacgcgattcttgatcgaatcaacaagacaagaaacagagcgattagagatcacattgccgaagatggcaagataaggttaaagtggaaactttgtttagcgttttgcgccgttggtctctgcgtcggaagtggagctttgtttcttcacgttttcgagagattggattggttggattcggtttacttgtcggttatctccgttacgacggttggttacggagataaaacgtttaagacggttgaagggagaggcttcgcagtgttttggcttcttctttcaactattgcaatggctactctgtttctttacttggctgagatgagaatcgatcgtactactgtcatgaaattgcccccgaggtaaacatttgcaactctgtttctttcattcgaaattctgtttttggttactgattgatttttcttgttgttggtttgtgattagtgaatcagagtttattgtgttcaagcttagagaaagtgggaggattagtgaggatgatataaagcagatcgtaagagagttcgagaatcttgaagaagtgccatcaagcggatcatgacaatttgccaaagatcacattgccctaactcttgtctggtactagatatgaaattgcagagatgcacatggttagtttttctttttgaattttagtataaaatgtatagaagaatcacaaaaatgatgatgacgatgctactctgttttgaccttgggacttgaaaaggaagaaaatactctgttactgcagtccaaatgttttttttgtatatgtgtacatcttttggcagtaggtttaactatttcatgacactttagtttatattaatttttcatggttataattatataagaacaacatgaaacttactccaagccgtgtaaaagtcgccataaaaacaaacacccaattgaaatagctcaagtacaatgatacataaacacaataaaccacaaaaacagagaaataaaaaagtgagcagataattggtttgtggaatgaagacagaaacagagtaggtaaaatttaagcttgaggtttgtcccacttgagtggcttgacgacttcccaggtgaagtcagggtcgtctcttccaaagtgtccgtaagccgcagttttcaagaaccttccgtttcctcctctctttaggtcaaggttaattgtcatcattcctggtctgaagtcgaagctctccttcacaatctttagtatctccttgtctggaatcaatccagtctcataagtgtccacaaagacagacaatggctcagggactccaatggcgtatgagacctgaacaagagccctacgagccatcccgttagccacaacgctcttagctgcttgtctcacaatgtaggctccgcttctgtcgaccttggttgggtctttacctgagaatgcaccgcctccgtgagctccccatccaccgtaagtgtcgatgatgatcttacgcccggtgagaccagcgtctccatggggtccaccgatgacgaatcggcctgaagggttcaagtggaagatggttttctcgtctaggtacttctctgggatgactggcttgatgacatgctccttaaggtcacgggcaatttcgtcgttggtcacagtttcatcgtgttgggtggagatgaggactgtgtggacacggattgggaccatggcacccttgtcattgtagtactcaacagtgacttgggttttgccgtcaggtcttagccaggcgcaagtaccattctttctgacttctgttaggcgagcaccgagcttggtggcaagaacatggctcaggggcattaactcaggggtttcatcagtggcataaccaaacatgtgcccttggtcaccggctccaatttcttcaggacatttggtgaagtgaccgtgaactccttgagcaatgtctgggctctgttgctcaatgttgactaggactttgcatttgtcagcatcaagaccaacatcatcagagacaaatccaatggcgcgacaggtgtcacggacaatcttctcgtagtcaacagtagccttggtagtgatctcaccaaagaccatgaccatgttggtcttggtgcatgtctcacaagcaactttgctgtcagggtcttgttcaaggcaggcatcgaggactgcatcagagatctggtcacagagcttgtctgggtgtccctcgtttacagactcagatgtgaatagaaaagtctccattctgctacaaagaatagaacaaaaaaaaaatgacttagccactgtagaatcataaaagaagcatcatgctatcttaaaagaatagtttcaccatatcctgtaagcttttcttagattctcaattctaaagaatgtgacataaaccaaacaaagaatcgaatttcagaagaatcattaagctcaagtgacaaaaaagctaaaatgattcgaaaatcataagtgatatcttttcagcaaaacaagttgactcttatgcttagtgactcgcttcgtatgttacttattgtctatgcacatttaactaacaggttaaatcatatcaagctacaatcacacatacacacatgaacgaattcaaaatctcaaaaatcttgcatactattcaaatcatgccaacgcaacataaactctactcaaatcccacacatctgagaatatttttgagaatctataacgaaatcgctgctgatccaataacaaaatggttaaagagtagctgaaatctaattaaaaaccatagatacagtcaatagtcccttaaatctacttccatcgtcaaatcggaaaaaatacgcacgtcagacttgaaaatcaactggaaaacaaaaatgaacaatacatcgagagagaaacgagaagcgaatacgaagaacaatacctgcttcgatgggagattatgagattcggcgatcagatctcgaagaagagaaactcagatctctgtggctcgagcctttttgccttaaaagaacaagtgttaaaagagaaggaacggtttgagacgagaaagtgagtcagaacacgttggttatttataggccttttacggttcactaatgactggtcaccggtttatttggttaaaccaccctactttggacttgtaaagaaatatatatgtatttggctttggagttggcctaccaatatttactattttttggcattattttcaaaattttctgactattggggaccgattggtccgacttgttatataacgtgaaccaatcggatttttcatttcaaagaaaataattgtgtctgtaagactgtaatttaggaaaaaaggactataaaaattcaaataaataccatatgaaattgttggaccgggttacacatcaaaaattatatcaaacaatagtcttttttagtttcgtttggtttgatacaagtgagataaggaaaacgttttcaatgcaactaagaaacaaagaatagaatagtttaattactacaaaggcattactcattactcactcgcacacatgaaaatacacactttcatgctctgcaagaggtttgtggtaggtgaagattttagacttttaattgtggttgttggtgatgaccaaacaaaaaaaattgtgggtattggtgagacttaatggtgaccgttggattattttgtttaacggctgattaatgaatgatatagagctttggggggtttggtgaaggattttgacatacatcatttgatctaccgtatcttaactttattctttaaaatggattaaaatctctaaacatccttaatattcttcattttattatttgtgtgtgtgtgtgtaattcttcataattttatatatgactagagttaccatttgtcatcaatactttattgttttacttttacatgaaacagatatataaaagctgttaatgaaacaaacaatataagatccttcaaaaacaaaagaaacaaaaagtgcaaacatcttagaaggtgtttgtagccactcctcttttggtagtgggtgactgggtggcgaggtgggtagtgtatttctaactcgctcataatatatcttcataagttacgcagtaagtaaattttttatttatttactttttgtgatttctaatgaaaagtaaagctgattagtgattgagaaaaaagagttttctttgttaagtttataaagaaaattcgatggtgtgcaaaacccatgcgcaattgctcatcctcattgactattgttgtcggatatttttgtaagtaaataaacttgtgtttctaaaagtcaatttttccataaaggattatctttcaaaaagtctgtctcagaaataaaatgatacatagccaataaggcccatttcagccaagtggcccaatacattaaaaagaaccattttctaatcagttaaaaatagcccattaagattccatcactaccaccttccctcagagccatggagttgtagattatgtagtggtcagaatcaagattgaggatgaatgacatgattgctctggccctaaccaaagcaattgattgctccaacattctcataaccaggccgcttctatctcccacacgcagactaggattggttgcctgatgtcaatgtctgttagatcatcaattactgctgcctctgttccagttaacatcatcatctccatttataaacagcttggttcagaaccatcatcttcatctcttctttcgttctccacaaacatatgactgatttgtttgtaacagagaggtgtataataaatagatcgtcccggtcccgcataatcttacaaacttaccgtttagaattgattatcaccgtccgatatctcacagttgcaacctgatgaaactaaacggtccagatctctcgaacgttgtcagattttcttattttttgtcaaccctaacaagaaaaggaaacaatcgaaagtttcctttttttttttgaagaagcgaatgcttataaatgaagacctccaaacatcactcattctctcttcttccttgagaaatttaaatccattatcattctctcttcttcttcgataccataacaaaataattcttcatctttcattatctcgttttgtctaaacagaacgatcgttttagaccggatgctctcgtcttctcagcaaacaaacaatcatcgtaggattgatctccatcctctgttgtgactcatcttcacttaaatccaaacgatttcaaatccggtcaacgacggacaaccgaaaaaataattgaatttttggccacacttagttgaagtgttaaatatttaccacttgttttttttaaaaccaaaatgtcaaaccgaactgaacatctcgtccttttggtctgtagttttgtagtgatatcataaagttttgacatatattagattaaaaacttggctaaattttattttattttcacaaatattattttaaggattcgaattgcgcattgacacgttcttggtcacttatttgtttcaaagaatttgatgatattatcaaccttaataatattctgtaaatctgttattcttaacttagtcacttcgtaaaagtctactgcattatcatttcataatttagttgttgtggcagatctttcgttcatacgggccaaacgcgctcggtagaacacactaaatggacacatatttaaaagagaataaagatccaatgggctttgaataaaacataaacaatattaaaaaaatgcggtgagcgtggatcgaacacgcgaccttcagatcttcagtctgacgctctcccaactgagctatccccgcttttgctttggtttcattaatcactttattcaaaccctaaattcatgattatcttctaattttatacggacaaatcagtaacactcagcaatttgagttcttgtggttgctaaagtttttagtcttatctttccttccaaagacaaaactaaggaagcttcaatgtctgtagtagcaattaacatgaacacgatcaatcacttgtccaaaacctgtaaaaccccaaatatccaatcaccgatttgcttcgatcgcaaacccttttcatattctctcattcctctgtttccaaaaaccctaaatggcttctcctcttactcttcttccgttagtcgcagatcgagattcatcattcccaagagacgacgattctctgtttccatggagtggcaagactgctcgtaaaaatctctcctttatcctcttctctgcttcgattccactttatttgtagaaattgatatgattctgttttcaatctttgttggtttggagaaaacagagtaaagatggaggtcgatgttccagtatcagtagcgtataatttctacttggatcgtgaatcttttcctaaatggatgccttttatttcatctgtccaggtggatttgattttttgatctatctctcaaagtttcaatctttgaaagcttcttgctttagattttaactcggtttgtgttctgttgttaggtgttaaaggacaagcctgatctatcacgttggtcactcaaatacaatgcttttggtcaagacattaagtattcttggcttgctcgtaatcttcaggcaagaatccatcattctgttttagatcaatgctcctctgtggtacttagactaattgtgtaaaactgttggctttttgttgggttgtttattgtgcagcctactcctaatcagaaaatccattggagatctcttgaaggtcttcctaataagtaagcaagagatcataaaggttcaatcttactctaatgtattatctgtttgagcctaacatttggtacttaaccaatgcagaggcagcgttcgattctttcctaaaggtccttcatcgtgcatcgtagaggtaaagaacactccattttatcacacatcatttgatcacaatcctactagaatagttctctaatgcttttccttttttcttgcaaatttgtttcatcttttagctaaccgtatcatatgaagtccctgccctattaacccctgtggcatcggtgcgtatctttttaccttaaagtctctatgtcaagctgaatgtcacagactgtttttcttattaccttaactttccccaattcaggtactacggccttttatagaaagcttgcttagaggtggacttgaacgatttgcagccttggccaaaactacttaaaaaggttagcttttttattctaaactccacttaaaccatttcattatctgaaaaatcaacactttgcttttgcaggaatatatgtatgcatctttctcttggtatatacgtgatttgaaaactataccagatctcataattagggagatctctattgtaacttttgtatgattaaagtgacaaatatttctttctatcataacagaagttgtgtggtttaggtcaccaagaaaaagagaaactcaataaaccaaccagaaatcttgtttttgatttgagtgaaaccaaaaaagaacaaaacaaaaccaaacaagaaacaaagtcacggcaaagagagcttttctctttccaatgttaacttatttgtctaaacacgacaacacactttgcgtggagtgtcctaacacattcaagagaatgggtgctgaaaagtctctgttcctaacttgtctctttggaaaaacaaggttacatcttaaatctttgaacactcattttgatcaactctaaatctctttctctcaagatcaaaagagatgtcatcaatagcttctggcacagtttcaacaaccagatcgacactttgtttcagaaaaatcccaaagtctgcaactgttttatctatgcttcatcgatcttcttcttcttctccacgaatgttattattgttgtcttcttcatcagctaactctgcaaaactactgaactctaacaatggtctcttaatttcctcttctcctaaacctttcagacccgttatgcaatggcaagacgtcacgtaagttcctccaggcaacaaaactatacttgttttcattaagtttcatacttttcagagagattctttggtttggattaagcagggtaaagatggtggtggatgcaccagcttccgtggcttacaagttatacgcagatcgagaaatgttccccaagtggatgccatttttgtcatctgttgaggtatttttttgggaaaaatgttatttaatacctgaactttcaaaaaatggtcaaattaaccgtaaactcttgaaattgtcgttttatacctcaacaaaaaattgacttctaatttaacctatactttatcgttgacttctaatttaacctataatttatcgttgactcggccaaatcgactcaccgttaacacttcttaatagcgctcctaacaaccattacaaaacatggcctaacagccgttgtcgttggtttaaggacgaaaacaattgttagttacgctattaggagagctgttaagaagtgttaatggtgagtcgatttggccgaatcaacgataatttataggttaaattagaaatcaactatttgttgaggtataaaacggtcatttcaagaattcacggttaatttgaccattttttgaaagttcaggtattaaataacattttcctgtattttttttgttctttaactctaaaaaacagagtcgtttgttgctcacaaatcatttgcttcctcgtaggcaatggagggtagtccagacctatcgcgttatttggtaaaactcgagtcttttggacaaaatattgaatatcactttctcgcaaaaaatttacaggtaaaatttttattatatcaatcaaccaatcagattcttctttcttgattagagatttttaacatttcaatgaatctttttatcctcctaacagccaattccagatcgaaagatacattggagatctatcgaaggctttgaaaataggtaaactcaagaaatttggtttagaaaacagaacgatagtttcaatctctctgtgaaagtgattgcttgatcgtttaattcaacttcaatattttttctttatttataaaaacagaggcagtgttcgatttttcccaagaggcccttcctcgtgtttagtagaggttagttagttatcttgtccttttcacttgtatgataaaagttcaaattgtgttaagtttcatttagccactatcttcttcttttttttcagattagtttttcatatgaagttccaaatgcttttgctccagttgcatttgtaagcctattttgacaaattgtgtatcatgacttataattaaacctgttaatgtatttatttgtgtttaacaaaaaatttaggcaatgaaaccgtttatggagaagattattcgtggaggattggaacgttttgctgctttcgtgaagaccatttaacgcaaaagtcaagaatcattaccagaaaacttactttcatcttttgctttagccaaataaattgtttttatgtaatttatttttgaatatgtaatgttgttcatactaatttactgaaaagtaaataatctaaagtcaatcttttctagaagatcataacgattgctatttttggttaattttggagggaaaaatcaatttaaaacaattagtagaactttagaagtaagaaatccggtttaaggtttttcagttttataaaaaaatgaaattaaatgaaatcttttttaattcagtttgatatggttatagataaatcactgttcgatcgttttatttttgattttgaaaataataaacctaatcaaatttataaacaaaacgagagtttaacttttaaaagttagtttggcttgttcttccggattataggcccacctttaataattagtataaattgttagtcaactaattacaagatttagtgattttaatcatttgtttgttgaagtgttaagtgttattattacaagttggagtaaccaaaaaaattgagagttgcctgtttatcagttttgatacgatcactcatagttgctaatgggcttggcccacgagtcacggacaaattctttttagttccactccgttctgttttgtcttatcccgtcccaaattttcgttttcgcacagctttttagttatactacggtctaaagaaaaaccgttatcgatttggttaacgataattctagaaagggccttgatagtgtgagatagagagtgtatcaactctcaaagccattgagaagtggaagaaacagtaaatgggtgggtgaaatcatgcggatgtcacaagtcttctttaatcatttcgaatttagccgacatctccactcctgtgtataattttgtaacggatctctttgttttgtctgtgtatatataaatctttataggaaaaaaatgcaaagtaatgtaagcaacttctgttttaaacaatttagctgcaaaaatggatttaaaactgaatctgcaaaaaaaaaaaaaatctaactaaaaaccgccatttcgacacctaaagttaacagaataacagtgttaaattgttttgaaggatcttttaaacacaatcattttgatttaaacgaaaacggcattgtagaaagaaaaaaaaacgaaaacggcattacaagtgattttgatactatttacatttataaaaaaaaaaaaaaaatcagtgcatcattttacactctatttaataaacataggcggttgaaataattgtttcttcaatttatatagggttccagacttgttgatattgagaaattcggaaatttaaatttttgttcagaaaatcgatgataagcttacaaaaataagaatccagattccaagacaccaagaaacaagaactcaaactcaatgataagctcacaaaaatttgagacctacatgaacttttcaatgcaccatttaaaatatactttatatatctacatgaaaatcttgagttatttcactataatattattttaaaaaaaacagccgcctaagtaataaacattgtattgtggccacaactttaatttagtctacccattttatttcaattgaacagtatttttttaagtataaactacacaaacgaaattcaaatttaagttttctactaagctttggtttatatagaacgaagataataacacagtcaataatattattggtcaacccacaatgaattggaaacacttctacttatatttacctcttaaagatgaaaattgttggataaattagaagatggagcaaagtatggactatggagacgtgcactcgaaatgaagcaaagtgtatatctaccaaatcctctagattggggcagaagtttgaagagccaatatatcttctattcacacaatcacactcacaatgttaaaaacacatgtgtatatgtgtatgtaacttctttcataatatcctatttcacaaaccccacgatgttatacatacatgtatatgaatctatctatgtatgtatccttgtaaagaagcatgcaatatcttccatcctcttaaagtagccatagacatttagagtcttataggtattcttaagcaattgacatagcctcttgccgtatatggaccaactagttcatatcaacctccatcttagattgtgactttaccttctattttcaacacactattcgacagatgtgaccaaataacatactattccaaaaatacattataaggttataacatatctatacgctcattttgttaagaaaaacgatcttaatattagtgtagttcaaagttttactacagcatattcttgagaaaatatatagattccacttttgtttttctcttgtagactataaataaatactcaaataggtcagttatctcagagaataatataacaagaataagttttacaatatctttggacattacagaattttaaaatttatatttacacttttaaatattaagatattactaattaattatatatgtagtaaatttgattggacaaactatcttgtcttctaacgctttctttttggttacacaaacattttttatgtgaaaaaacttctttccttttgatacacacacacacgcatatacctatttagtacacaatttaattatgatgtttataatttgtccgtacttagcctaagcaattcttttggcaataaatattagctttagtatgtcgcattatagccgccatttctgtgtggaggatgaggtcagaagctgcacgtataattcattattctcttgttgaaaataaaaatacattatcattatgctcttatatgatattcttagagtgacttaactgaatatcctaaaaaggaaaaattaggtaaatgaggttggttgataaatattgattatacataaaatagttggtctttgaaaatatgaaagttaattggatgaagagaagaataagcgttctagttttgttttcaaaataatgcttcttataacactaattaatcagtaaaataatttttatttttatttaccagcatgttgtttaacagaataatattttatcacgatgatcaggataattggtcaaaacttaagccaaatcagtaatcgtagttttgcaaataactagctaaaattaattacctttttcaacaatacgcaatatacaaatttaaattcaggtggtggcgcatattaatacaaatttctagattagaaataactaagataagttagtgtaattatcattttcttacgcttttctgttgtatggtttattccactttttcgttagttaatttatcaaactaaataaatgtaaccacaattatagataagtaattgaatataagatataactatacatatcttaagtttaggggttagatataggggttagatatcaacaatccaatggattcagtttatgtgctacaaatattataactctttttttggaaaagtggcaaaaaagagaaaggaatatgagatgagagaccaaacataattggtttccaccgaaaagtgtagagatgggcggtgaaattctcaaatacgatcagacaatactcaatagtgttttctgggtatacaatcaataatggttggtcggttatattttattttgagtgataaaccaatgaatttatccatgtatttaacaattcatgtgttccttaccttttctgtagatataaaaaaaatacatgaaaaaggatttgggccactgaagaagccgaaagaagttagatataacccactcgtggacattctcttcttgttttccttgtttaaaaaaaaaaaacgaaactctataaataaaatatttaagagatgcatttcatatgttttcccaattatccctagtggagaataattctttttacatgttatatgtttgatgtttcgtcgtgtattgaagaaactgtcctatatacatatccaccggaaaaagactttcaaagtggggataaattaaactaactaaaagaggataacaggtattactaaactccattggtaaggtgtgaataaaatcatatactgtaaaaaatagtaagattgtgaataatctccgtgaggagtttagactcattgattaatatccgtcggaataacaaattgtaagattgtgaatagtgaatacagcccaatttcatactagataacgtattcgttttgcttgagtattttttgtataaaatgaaagaaacccaaaagaaaacagaaaaaaatggtgtatgttttagagatgttaagacttctaaaattaaaaagtaacaatttttcaagcagagttttaagccaattatacttaaactatcataaaatcactcacaacaccctacttaaaaacactcacaatgcagagttatttttgttccacgataagctcaatagctcatcacaaaggtgacttttttctcctcacaataaaaaataataaaatatgcaattttacagtaagtcacaaccatagtaacagtcataatcaataaacccccaaaaaacccggtaagctttatcaatacaccacttgttaaaaattgatattttgaaaaaaataaaatgaaaacaacatttcggaatcggtttccacttcctataagcccacgaccttgcagtatatataaaggaaccagacttgtctgcttttgctgcattaacatttccaagaagctttcttaacttagtgagtgcgacttctattcttacacacttttttctccaaacactcacctcaaaatcaccaccaaaaaaagacatttttaagccaagaaaaatgttaacttctacttataatcgcaaccaagtcctcggtttcatgacacttattctcacattaatgtctctaagcgaagctcgaaaccatcaccacaaagagaaacacaaacataataaccataaccaccactcctctaaaccaaagccaccatcttcctccatctctcagcctcctactcctcctccgggtccccctgactcaccggcaccgtcactgccaccctcaccttctgacgatcctgcagatgacaacaacggaatctacaacgttagaaagtatggtgcggtgggagacggtgaaaccgacgacactgaagcattcaaaacggcgtgggactcatcttgtaacaacgagaacaacaccgattcagtgttgcttgttccttacggctatacattcatgattcaatcaaccattttcactggtccttgccgctcctaccaatttttccaagtaatagttctctactaaataaaaattcaaaagcttaattttcaacatttagataattgggtcaaattttttgtttgtaaatttgattttttattattattattgctaggtggatgggaccattgtaacacccgatggaccagagtcgtggccgagcaatataagtaagagacaatggcttgtgttctatagagtcaacggaatggctttgaaaggcgaaggagttatcgacggcaggggacaaaagtggtgggatcttccctgtaaacctcaccgggtaaattacactaattaattacgacattttcagtatgaatattttccaattaatcaccattttattttgttttatgactctattttcgttaaagttaattttcaaaagtacgcttaagttttcaaaatgaaatcaacatatagaatttaaattactaattagtttgctatatttctatacagagtgtcaacaaatcagcaattgttaccggtccttgcgatagccccattgtaagttcgacgtaacctttatagaccaatttaaaaaaattcttattaataaaccagttaaataattaattgaattacatgcaggctttgaggttctttatgagctcgaatctaagggtggaaggtctacagataaaaaacagcccgcagtttcatttcagattcgacggatgtcaaggagttcacgttgagtcccttcacatcactgctccaccgttaagtcccaacaccgatgggatccacatcgaaaactctaactccgttaccatctacaattccattatctccaatggtaaacccatttttattttatatcaaagtttggtagccgccaaaatatatatatatatatatatatatatatatatttatatgccgtgattttggtaaagtcggttaactaaaccgatgggttaagtgggctaaccggcttttaatatatttaacgtgtctttatttagaataaaattaaagtttttttttttaaagtaagaaacaaaaggaaggaatgattattgtctgaataattaaattcatacatccattttgcaggagatgattgtgtatcgattggctccggatcatacgacgttgatatacggaatctaacttgtggacccggtggccatggaattaggtttattatctctctcttttaaatcatgattaactaaattaaaaacatttgttaattatctcattgatcctgattaataactatttttcagtatcggaagtttgggcaatcacaactcacgagcatgtgtctcaaatataacggttagagattcggtcataaaatactctgacaatggagttaggatcaaaacatggcaaggtgggtccggttcggtctcaggcgtgacattcaacaacatccacgtggactcagtccgtaacccgataattattgaccaatactattgtatgaccaaagattgtgctaacaaaacatcagcggtttttgtgtctgatattgcataccaaggcatcaaaggaacttacgatattcgaagtcccccgatgcattttggatgcagcgatgcagtaccatgcacaaatctaactctttccgacatcgaattgcttcctgccaaaggcgaaatcgttttggatccgttttgttggaatgcttatggaattgcggaagagctttcgattcctccggtttggtgtctcatgtccgatcctcccaaggggttgcaaggatctcttgttgacaagtgtggttcatcgtgagttgcttcatacatcggatcgtaaagataagaaaagtaattgagctagacagtattctaaactttttacgagattttagagagaaaaaatgtggataggtttgatgatgattcttcgttgaggagtggtacgttttttttacctctcctaatagtttttaagaaaactctatgatcatgtttaattttcatatatgatgattctatagtgttgttttgctaatgatggagtgattaatagtaagactgcatgtgtgttttgcttcaatgttatatgtcaccatggatatggcctgctttcttttttctttgtttgacttcattgttatagctgttgctcgtgggtttctcatgtatttctctattttaattttgtttcaaagatacgttaaacaaaaaaatagaaagaagtaataaatatttgtacaatagaactcctaaaattttaaatgggtcgtagattttttttttttttctctatatctagctattataacattagataagctaattgtgtggtgaccaattatataatgtgagaataaatataaactagtgggttctttgagtagaaagtatagagaatattccaacttttggaggttgtctttgtctcttagtacttagatattatattaaatgcaacgaaaaggaaaatgtatattgaaagcactcaagcatattgttcatcgatctctcgacgtgtagctttcatagtcaagaatatatatgtatccagttaatcatttgtcaaatcatcgtaataaaagactaacaggtatagtagtttggaaaatcaaatctttttactttagtagttttttccccaacagaaaatttagtagtgttcaattcggtcggttattattattgaaagctataaaaataattctttatataagacttttgtaaatagtaaacacacattctttaagtgggaaatttgatagggcacacaggcatacaattagctacttgcacaaaaatgttaccgtttaaccttaatgtgcaaattatcgttgttaatgttttgcacgtaaagatgattgagttgctatcgtagtttaaccctaatgtgcaaactataaatcaaaacctatttaattttcataaaaaaaaaaaaagctcttaatttattatagtaattaaaatccatgaaacaaataaacgtttcaaaattacaagatggaccaaatagaacgaattaacaacaatttccccttttgaccagacaatttccttttgaaaccaaaattgtatttatcttttccaacgaattttcctttgaagattaattatttagtgtcgagttccttttttttttacttttggacttctaaagttgatatcttatgatcaacttgtttaaagctaacctggtttacctctgcacgcgcagccactaaagcacacatatcttcagttacacataaatataaatgtatgcatgcatatatagaatccattgattgtgaaagctgctgatcttcatgaaacaaacttcaatttttataggatcgtaattgtaatatgaataaacacatatactaggacattaaggatttcattagtaagaaacctaatgtaatactagtattttatgtgtttgacaaaaaaaaagtattatgtgtttgtgatcatttcaacaaactatttttttttttaaaaactatacaaattcacttaaatactgtatgcatgtacttggtatgttaggcataaagatgtaacttcttttgggggttaaggaaactggaaaagcttacaaagccactcgaagattctaatttctaagttatatttttggtcagcaggactctaaattctgactcttgtttttgtatatgtattatgaatatattatcttacattaaaatagtataatttataacaaatggagaagtttggtgggtcgcaattggaatgttagacacacccacctccgattctccctttttcagtgtgaccacgcaatctcaattttaagtatttaaatttaacctttagtctatatacgttttttatgaacaaaaaaaacaattctccatatgtttaataaattagtgtatactaacccactaatctgagaactataagacacctaacggaaatctaaagtgatatatatagcttgcttgatacatcagaagtgtgcttgttgttaagacaaaaaggtatatcggtgagttctcatcaaaagcttactaaaaatgaccaatcatggtaagctggtaaggaataaataaagaaatgaaataagagagtggaaatgataacaacatagcctagttttcttggttagctcatcaagtataaagattcttcttctcacttgtcttcattgtcactctatctctgactctatgcccatcacactcataccctcacattaggccattcccattttttaggcgaaacgtatcaaatttgcctccttaagttaagttatcaataagtctttctaaattatttatgttgactgtttcctggtctaaattagtcaactctgtaactccgatgtctctgttcgcttagatttaaattttagtataaggtcgactaaaccaaatgtgataactagcttcacgcatagaaaaaaaaaaagggttcaaatttcttatgctttttacaacaactcttaaactctctgcactttacatgcatggaccaacatggtatatatgatgcatgttttatgttgtgtatatttatattttttaaaaaaagagaggatcggatacttacataaagatgaattaaggatgcaaaaggtgaaaagagagaataaaggatgccttttagaccataaaggcttatttataacagtcacactcttacaatgtggcagtgaaattaaaagtgattcttctcatagatctcagccactcctaccacttttttttttccttcactcttcgctttcagcttttgagcaagtttgtcggcttcaatcagtattcacacattttacagacttttttatattattttaaattctctttgtttatacaataattttttcttcaaatttataaatttcgctttaaaatgtgaaacgatacttcttatgaaaggaacaaaatttaaaaatattttattttaaaataaatatgaattatatgaaacagaaaaggtacctttataggaattttgtttttcccaattccagtaaaaggaattgtttaacaaaacccaacaagcaataatcagaactgagaaagtcttcataccctgaagcccagttaatcattgggcttttccgaagacaattttcataaatcatatctaaacacattgggcttctatttctcaattctttctttcggtattgaatataaaaacattgacctcctaaaccaaaacatatcccatgtgaagaatatttccttttttcctgtctgtatcaaaaaataataataaaaaattcggtcatccaaagaaacgaacagtgagtctcaatattcaaaaaaaaaaactaactaataaaacctttcacacaaaaaaattaactgtggaaaaacagagatcctactatattatttgggaagtatattttatgtaaccttaatttttgtaagtaattacataggtatgccattagaaataaaattttaaagagtaaattaatttatctctttaaggattaaaaagtcaaatactaatttaattaattaaattaattaaaaaacgaaatacattattaatttccaaaaataatagccaatcaaaatcaacatataagatttgatatctatattttaattaatttaatttaattagaaaaacaaaatacgttattaatttccaaaaaagtaaccaattaaaatcaacaaattatatttggtatctaaattatcatattaattttttattaattattatagttcacttctcatctttatatgattctatttttacggaaaaataatatcatcataattagagtttttttgcagatgctataatttgaatttttaaaaacgaatataaactgttcaatacatgaaataatattataacgggtgaaaaatagatttaagaaaattttctactgagtaacggaacataaatttgaaatatttatattcaatttcatacatattatattgaaaatttataatcttatatactacaatagttaataacatattagatgtgattcaatttttaatacaagctggaaaatcctaaaattgacgggtttagatcgatattaatataagatggtatactacatgtgaaactcttaaattaacaatcaaactacaagtgtataatcttaaacactaaacaatatagataatatcaacaaaacatatacaactcacagtttactatacatttaaaatcaaataaaataatatcatatatttttaaatcatctttacaataaaagtttttactttaactaaaatataagcctacctgcggtatactgcagattaatctctagattatagggcttattgaatctaaagacgggtcatcaaagatttcttaaactgaagcaaaatatactgaatattcaaatatctatatgttaccaacttataaacaaataagtcaatttaatattttatatatgaaatcaattaaatcttaatcacataaaaattagcacaaaaaaaaagtattcaacaattaaaaaattatcaaatctctgtgttatataagttttgatactatatttgaataaagtgtaatatacctttttaatttgtattctttaactaatttaagctaactaatatatttgctaatcttatatctatcaaaaccgactatcgtttcttatctctatagtatttttgcaagaatgttttggtggatttggataaaaatgcattcaggtcatatggtacattcccctattaaataaatatggtgcactcttatgttattagctaaaatgtttagattataattcagagtcaacatggagggacgagtttttgaatcaacattaataaaaaagtaaaatataattaatccaccgtttcaatatgggttaaatcattaattttaagaccactaatattaaacatatcaaatcatcctaatttagaaaaaattatataaaaccaaaaatgttatgtggtatgtataatgttactatatataaaattaaactataaaatataaatgtattagagaatgatacaatttgcaaaacttttatatataaaaaataattcttaaattttaaaaattactactttaaaaaaaaatcatgggacgcctaaagaaattacagaacgtgttttattttggaattgggttatatggtggatgtatttgaatcaatatttataaaattttaaaatattattaatatgctgttttaataggggtcaaaacttcagtttttttaacaattgtctcatgaattcgtggtatagcgttacttaataacaattataaactgtaaaatataaatattttataaaaataaaatttgcaagttttaatatatattatttttaaaaataaatcgtcccgcgatataccgcgggttaaaatctagtttctttttgtttatgtaacatcaatagaggtaatctaattaccattcatttaaaataccaaaaataggggaaaaaatgttcttcgttggaatccaattgttccacacaaatttcacatatacaaattaatttaatttacatacaagtggccgacaatatgagattttattcgacaaatcttttatataacctcatcattcacaatttaatagtaaaatagtacgttaatatatcaaccttttcaagcattatggtattctccatccttagattcaaaaacatatgcctgaaatattagatctaacggttgatagtaatagagtgctgtacactcggatctactagaatatctctccaagaccaaccacgagtaaagtaaacgcatcaagtcaagtttttgatgattagagtctttctttatttcaaaagtatatccaagtagattagtgttgtatagattacgtcatcattgtgacatcatctcgtaaccgcttcatgtcacgttgtcatcccaaacacatcatcatctgacgtaattttaacgttgatatctccgcgttcttttactcttttacccctggtcccttttttaacaattataaaaattatgattactattttgaatttacagggaaccaaaaaacccatttataaagtttcgaaattaaatatcctaactaacttggaaaaatatctccaattttcgttttttgtggtttaaattgtaactaggaaactaaaaggactaaagagtaaaagaggtggggacagggtgttttagtctttttctaagaagtttcgtgatgactaatttttttcctttaaaagaaagtcatcagacgaaaaggattatttgccttcttcactctccaaaatcaatcactttctctaaatgtatcctaaacaatttagtttatacaattattccctagagaccatgagcaaggatgagaatgtggagagcaaagagacgatcagggttgataagagagtaagagaagacgaagaagaggaagaagagaagaagattgatacgttctttaagcttatcaaacactatcaagaagcacggaaacgtagacgagaagagttagctgaaaattctggcgtcgtgaggaggaaatctaacggcggagaaaggtccggtatagtagttccggcgtttcagccggaggatttctctcagtgtcgtacgggtttgaagccgccattgatgtttgtttcggatcacaaggaagaaaatacaaaggtggaacaagaagaagatcaaacagaagagcgaaacgaagacaaggctttagatcttaatcttgcattgtagtagcaattagttttaatctatttttaattgtccatgtttcatttgttagcgttgtgattattaaatccttcatttaactaaaatgtccgataattaactttaaaatgaataaactcaaaagaatcgtgaggcaaaacatcctgtcagatgggattgattcggtaaaccgtaattctttagagcaaaaccaaaaccaataaaatttatcattctgtaagaattgaatattgcaaagtttgtttaaattttatgtgttgtataattatctgtttaagaagatcattactttaaaccttttttgctgaccagatttgttatctagtcaaatataaagattataacaaatacgcaactagttgcataaacaaatatgaatcggacaactaataatccaaaagtcaaccagatgacttttgattgtgattcctcggatcttgaaacagactagacaactctgaactcttaagctttaaccaccacttgactttgaaaaactctctcaaggactctccttgtgattcatattttccaaagccaaaaaaagtcaacttcgttgcaagaaccagaaaaaaatggggacgactctgggaaagccatttgccggtttttttcaccaagaagaagcgaggatcgtgttgtttggtctcggcggtaccggaaaatcatcaataatgcacaaattcaaaaccggagaaacccttaccacaaccatgcctactgttggtaagtctctttatcactctttgtttttttctgatcttgaatctagtcttctctatgaattcctttaaaacggatcattgtttctaggattgaatgtggaaagtgtaaaatacaaggattcaaacttatgcttttgggaaatgggcggccaacaatgttacatggtaagagaaagttactaattttagaaacattacgagcatacctgatgatgggtaatttaataaaatatttcagtggtttccattatggaaacactggttccaagaaatagcggggcttgtgcttgtagtcgacagcacgggcagagatcaaatagaagagacgaaagattttcttaacgtggtgatcgatgaggtgcaaagaaaccttacttctctaaacattgagcaagtcaaataatctaatgtttgatgttctgtattatagatacaagggagtgtaccggacaatgcgcctgttcttgtatatggaaacaagcatgaagttcctggtgctatgtctgcttctgagatcagtaacaagctagatctcactagtcttcgtaaaaaaaactggcagagaaactggtaagaaaataagaaaaccttacaagactataactttgcgaataggattgattcttctgatgatctgacttttgactttcgcttgctaggcatgtccagagctcatgtgcattctctggtgatggtttacatgaaggactcgactggctgttgaaaaatgctgaaagaatgtaagaacgagtcctgatttttaacgcggaatctctgtaccgaaaatagccatcttctgtaacaagttattaacctcatcgtgcttattcgctagctccaacaacaacttgatccttttaagcgagaaattactcggtctatgacctttcttaaccatctcaagcaaacatttctcagcttcttcgactttagccaagtcacaaagcaaatccaaaagcacatctgaaaccaaactatatgaaccttttttgctgaccagatttgttatctagtcaaatataaagattataacaaatacgcaactagttgcataaacaaatatgaatcggacaactaataattcaaaagtcaactggttaactttttattttgattcctcggatcttgaaacagactagacaactcttaactcttaagctt

SEQ ID NO: 1109 - DNA, 74316 bp, Arabidopsis thaliana
gtggaatcctctgttttgctcttgttcctcctcttacattgagacagagtagctcttccaatgctcgccgtctctgctaagcttcttgtctctgtggagattgatcttcatttgtacagccggctaagttggggcaattctagagggttttggtcttactacaatgctagagggtttggatgtctgttattagtaagcttgttgtttctgattctatactatgatccgttgaataactctaacattgagtatgtttatgtgaacattgctagcttctgggattatttggtagcacaaaagccattttcagtcattcaaggctttagttgaaatgcacaagcatacttttattaacttctttacaacaataatgtttaactgccttatcccatccaatccttaaactcgacctgaatatgtatgtgacatacagtatgtctctcacgaaacgcagaaacttgctatcaactctacaaatggctttaagtaacacaactataatgtagcattactaagcgtcgctttcagtttcaggtgccctctgataatccaacatgctcggatctgcgtggtactgcccatacaaggcataaacggcagttgcaagcacactgacaacaacaaatcttatccatgcttcataatgcaactgcacagtagcggaaaaatcaaaggtagatcatatggtatgtgaaattagtataaagttagttcttagcgtgtacctgagcaaataagaagatgttgaagaaaatgcaaacggatggcacaatgggtacaccaggacagctaaacccagaacctagaggcagagcataagcctggaagcgaaaagctgaggggtttaacatgaagcatagctagcaaggcatttgcctgatttgtggagacaaccatgagggtatatttcctaattgatgttaacaaacttctcctctaaaccaagaatgcaaagacttcaatagtcacagactttcatagtatcactgtagagttctaagtgccagaacatgctagtggtggtctctattttatgctgtatcagtaaaagacttagtatctagcattttaacaggggtgaaacttggtttttttattttattttttttggcgctatgaaattaagaagagtgtgctatggaattaaggcttatacttaaggctacttacttggcgataatgaagaactgctgaagcaacaactgccacaccaactgagaggagaataaatataactgaagcactgaaacggtaaaatacgccagcaccaaaaccactgcatgcaattataacaaggcaaatgacgccttcctgccaacttgatgtccatctattggacgactctctatcttttttatcattcagtctcaatgccacaacacaagccgcaacaactgaatacccagtctgaagaaatggaacaccgaaaataatgttaaactggaaagtataagtatcaataagaaaagcaaagagatatttaaaattaagaccttgacgtaccaatgtaccaacagacagaatatgggaaagactatgtacattaaatatgccagctaaaacgccagctacaatgccgcaccagatttgagaatgaagaggtgtatgaagagttgggtgtattctggaaaagattgaaggcaatagaccatcccttccaagtcccagatataacctggactgtttatccgaaatatcatatgattactcaagagtgttaccttggtttgcataatatacaagtacataataaaagaaattacaaaagaaatacatatatatatattatcacctgaacataaagaccaacaagcagagtagttgtgagtccagcaacagcaccaatactgattaagattgagacgaacttcataccctttgatgaaaaggcttcagctaaaggagcatcttcgctgaggaggctaaaagggaccatcccggtgagcaccaaacatacgccaatatacagcgagatacaaaccagaaggctccccataattccgattggcaaatcgcgctgaacaagaattaaacagacataagagactttgtagatagtatgtacattcaacatatatataggcagacctgagggttcttcgattcttcagcagaattagcaactgcatcaaatccaacatatgaaaagaagacaacagtagctccagtgagaactgctttaaaaccattaggcgcaaaaggagaccaatttgctacatcaatttcaaaagcaccggcacaaatcacaacgagaacgatcacgacctacagaagaaacaatatagtgaagaagagttttttttggtaaagataagaagagaaggttaaaaggaaagaagcttaccttagtagcagtcataacggagttgacagcggaagattctcgcacaccttggcatagaacaagggtcaagagagcaagtaaaatgggagccaaaatattcaaagagagaagccctcccaagagctctttgccgcttcccatccagagaggaatagagcccttgagggctggaaaaagctcaagaagagcaacagcatagctggccaagctacgggagatactagcggcgccaatatgatagtcaagcatgagttgaacgaaaacaagaaaagctgtgatctcattgaaagctgagtaagagtacatgtaagctccaccaacaacagcagggaaacgagatgaaagttcagcataacagagagcgttcaacacacacgatgctccagctagcaagaagctgattgtgactcctaggcacgcaacggcagcaataatcactaagcgattctgaacgaatcaaggaggtggtgagaaaaagtaattcattcaactgaccaggtccagcatcgcgagcgacggttccggtgacgacgaagacaccggcgccgatggaagcgccgacgcccaacagtatgaggtcgaaaaggccgaggcgacgaaccagagagtcgccagaggtggagcgaacggcagtctgcgaggacggagggggcagtgatttagatcggagagctgaagcacggaaatgagagaaccatgtggcggaggagaggcgttggttgctgaaaccttcgtggcctcccatggaaacttcaatttgagagttgaagattgatcgagacgatgactgaaatcacccccgggataatcagaatccaaatcaataaatattgggccaaccattgggcccaacagagaccacttaaacccaataaccctctaatgaactgaaagctcgcgacgacatctgtctttgggcctttaggtgcgatggagtcctctgttttgccatgagacagtatagctcctattttcgttgttgacaagtttcttgtgtctgttgagattcatattggtctaatctttcaggccattgttgaggtttttggtctagttaacaatattagggtttttttttactaggatttctttcatccctctttagcactttgttgggtttttgagtttctaggattgttttaaatgcaggaggcttaggattaggtttttaacatgattctggttctactttagtttctgcatcagttaatacctttgacttcttgtaatatatctcaaaatctcaaccagaggatggagttttgtacaaatcttgctattcgtccaaaatggccatacatatcaaaatcagggttgttttctactcatgctggaagttagtttggtttctgagttgttcttgaatctcacataatcatgataagttggctgctgtgtcgtgttgtaactttgttagcaagcaagctgccgcagattccctagcttcctcagcatcagacttttcctctccatgtattgtacatgcgacatgattccccgtgattcttacttcagcttcatatccacctttttgaacaaagcatcaacatcaacatgcaaatctgaagggagtaatggagctgaactacgagtttggcaaatgatctcaaaactttaccatctgatggagccacacgatagtttggtagtacccagttattcatgagacagatatcatcgagtctctgcaataaataggggcaatgaatcttaattctttgaacaagaaatgattaaagtaaccataaactaacctgacacagacttttagtagaaggaagagtttcactgagcttcagcctcttgttgctttggcatgctgacttgtcaagagattcttgaaggttacgcctcgggtatgtctcgttacagcactcgagtactgtttctaattgcagctcccaatcacctataacacccacgagatcactaagattcatgtaaaaacaaagctgtgcagaaaggaaaagtatatgtatatatacatacctttgatgttctggatgcatttatcacatttagcaatctcgtcttctatgttcctctgttgacgagtctgcagccagagaaaaagagagcagctcttaatcataaaataaggatatatatgctattgccaatcagtttttttgctgtgttgtgtatctttgatcaaattctacagttattaccagtttatctcgtttgcaaagaagaactttcaatgcagtttcggatagtgatgttgctttagaaagaagagacgtctgtagctcctcaagatttggattagagttatgagcagaagcaggagttgaattaagcttatgaatgctattaagtctgtcaggaacagctttcttcctctggagacctctttctttaagttcctttgggtcagacgcaacctgcatttacaaaagggtgataaaggatacttgaagattgaattgagaatatataattgttagtgtagatttcagatttcacctcgaaaccacctttctctccattcgaatagttatccttacaagggctcatttcattacctacattcttagccttcaacgcaactactgtctccgagtgaacattaggttccttcgcaccactcatacttccttttaagtaccgattttgcaacctcgtcgtagcttttcctctagctccaggatggctcagtagagcggcaacttttttggcctgcaatttaaattcttaagttaatttgtaataccattttccttaacacaaccatacaatacaagtatcattatgagagcatactttaatttcatatctcctttttaaagcagctttttctcgtctttcaaaaatgtcggaaacttccgactccttggttgcatctactttgttgctttcgatatcatcacatacagcttctggttctttctctatcacaaattcggtatctcctcgcctgaaaaagcacaataaacttatattgctacccctaaactagaaatgataccaaacaaactcaaagtaatgttaaggaataacaatttaggaagaaaaaaaggatgcaattaaacctggaaaaccaatcttctatgagagtggcatatggaagaacatgaaagtattccactatagaattcatagtccagtcggaaaagctcttctcaaataaaggaccctgcatactattttcatagagaaaagcaaaagaagatggttaggaatatcatgtcaatacctccttgtacttacaaaaagtaaagaatgatccaatcatgcaactaatgtaaagtaaagtgagtttaaggataacagctgaataaccatcttgccaaaatttgggagtcatttgagctagagcataccaaagtcaacttaccaactaagcacttcttcgacaggattttctccagaaaatttgtcttgtgaagtgcacttcattatgtaaaagcggactgctgtcttctcttcactcaaggagcataccaaatgcctctccaagatcacaatgtccttgtgattaacacctgcaaaagattcaaaacagttagtaataacttacagaaagaatgctactaccaaatgatcagtctttgaagataacctgtggcctccttaacaacagcaaatgcaactttttgaaagacgccctcttctttctgattttccctagcggctttctccttttcaatgggtttctcaagtagagaccagacaccttgtgtgatggaactgtgttgaagatagcaactcttcttctctgagtcaaccaacagaactgcaactctccttatgggacacttgttcaagataaaaagatctgaagacgcatctaagctcatggataaactacatgcatccacaataaccttctccagcaatacggtttgtcctgaaacaccaccatcttccttcaaatgctggagcagagcaggcttcataacagtagctaagctacggaaagactcaaaagacaaacattcaagatgaggattgtcttttctgtggtaatagttgtagagcaacacaacagcatgaacctggaatcaaacaaacaccatttttgaaagaagaaaaaaacagaactttaaaaacaaggcattgcagtctaattaagaaaaccaatttaagagatttcgaagtcccacctgtttggcaacagattcacggatagaagtggaaggaagatcatcagttggttttgatggaagcaaagggtcgactaagctttctaataaagctcgaatggcgtcctctgtcggacaagaatccgtggtcttcgtgactggtaaactgcaatctacttcctccataaaacccgaaaagaagaagaaagagaaaagaaagttgcgatttttagtgatgggtagacagaaagtgaacaactttaccgggaaaggaaaaccctagatttgttctccaattaccgtttttggtaaatgagagagagtgatatgtgtcagctctctctctctctctctctctcaagatcatctaaacttcgtgtttttcatttccatttattattattattgtttagttagtgggaaattcgaataggcgccaatatttcggggctttactgtaatactgtgtctcttttgagggcatttttggaaaattttctgtcgtacattattggataggactgttcaatttgacttttgagtttgacgtgcgaagaacggtcggagaacgtttaaagactaatacatacataatgatgacatttggattttgtttcaaatgtttctataaaattgtgtaaatttgcgttaaaccacgattatacaagtcaatatatattcagaactaattgtaactcatttattaattcagataagaaatcaacacaaaatcccaagtttgtcattttcgtgagcaaaccagacacaatacattgaccgaccagaccctcccacagttcttaaccctaaaccaccacaagactctggttcaaccaaaactcttacacacacagctcattacatacaaaaaacaatcaacgacactttgaatcaatcaaatgatattcccacccccaacaaacaaaaacattaaacaaacagacaattctgagtttctgcccgacctttcggtgcttgtgctcttccatgacggttcgatcagattaaacgaatgctccttgatgattacaacttttttttttcacaacgaaatgaatcaatcattgttgctttcagaaaaaaaagccaagagatgactaagaatatacgaagcagaagattacacgtgataatatatattatgctctctgtgtgtgtctatatatatgcaagattctcagaatgtaccggtttaacacccggctgctttcaagaatttatcgtaggggctcgaaggcggtaaccgaaatgaattttgtggaacttcttgtgagaagaatccaagctggccttgaggttgaacatcagccacaattattgccttctcatcatcttcaccagcttcttctgtctgcagcacaggagaatacaaaaaaaaatgaacactgaactgaaccaagattcaacgtttataggatgacaattaatgtcacagagaacaaactctcacctccttgagaagatattgttcgtccttttcattgtcttctgaggttatagctttggttgcttggggtttgaaacttcgaagcacagacatcttttgctgcttacccgtcacaagagcttcacactggttcatcatttggtcataaggtacaggaatggaggaaacagggagacttgcaacttgccgagcagtttctgatacctacacatcaccgatgaaaaaatcacattaaaaaggaggagaccaataaaaactattatgaaatattgagtgtaactattaccgattctaacaactcattgacactcagaacatctactgggttagtgtttgtggacaatgatgttctgtggccagactgactcccactggcccctggggatattccttcaaatgccgctatgtctgaaagctcaacctgaaagatccacaaaattgcaataagagaatcattcctgaagcaaatttatcatgaaatcattatacctcttcaaaagctggaagttctgtttgattaagaggagaactaggtcctggtgtatccgtgaataattgtccaccaagcgaatgtgcatcatctagggaaaaatctgactgaatttcctttctcaaatttaattgctcctcctaagagaattacacatataaaaattcaaaacaaaagtgtgaaattattgcatgaaatggttataaggtcaagcactccctccgcaaaaaataacagaactatcatgaattacacattatataactttaaactagataagtacctcagataatgtctgcaatttcgatgtaaaatgagttatcacgatttccttcaggcgtctatcatctgtgacaatcactgaagaattgagagcagcactatcatctttgtcagatccatacgtttcttcctgtggaaatccagaacatacagcacgcagtctgatatctccttccagcacaagataaggatcaacctatttaggacatgaagaattgcacatatagattaaaaacagctgagcaacccagaaacaagagatttagaaaacggaaaacaaatggatgcaattatcaaccaaagctcaccatttgggcagttaaagattctttgataattggaactagctccagaatattggaaatcttggcaccgaaaatgagcatatatgatgcaaaagtgaagatagatcttctacgagagtgctgcatacctccttcaacattataccagaaatctacgtcagaaataaactcaatagaatggggagttcagtacatattaatctttttgcatttacaaggagaagatgtcgttcatcggtattccacaacaaaaggtacttttactgaacatataagttctagccaatctgtgactggtaggtagtgtttcaagtttcaacaaaacaaattaacttccggaagatcctgtccaatatgtagatgctaaaactataattgagtcaaaaaggaactaaaagctaaactagtgttccctttgattaaattccttgcatcctgactagatgtttgatttatcaccatattatcctctcttaataggtgtacaatatgaacgcgagagactgtataataacatccaccactaacaaaattacatcgcaaatcaacaaaaatggcatggcataatttaatgaacaatattcatcatagttaaatgctaattaatgagatccattcataaaatctagcgaaagtaggtaattttctcgatgaacggaaaaagcattaagccactaaccacagtctttcacttaccatcttgattcaatgagagatttcgaagagagaatgccagctgaaaacactgcaccagagccatgtgatttgatctctgccatttgcaatcacaaaaacagagaaaattttacaaaatcaaaagaccatcccatctagatggattgcataaagtattaaagttcttaaccataaaattcagtttcaaaaacaaggtgttgtaagttcattttgatctaaaagagtcaagatgtccggggccagatttccagtggaattacccaccctggccagaatgaaataataccaacattccataagcctttggtatggtggaatatctagaactcaatatacaataaagctagagtagaagtatcgactaacctttgctagtgaaaacagtaaagtgatttgatatgtgctggccatggcctcaaaattttcaggggtattgtcggtagaagttgcttggatccatagggatgaaagaagcatattcacttggtgactactcagtcggagtgaacataacgactgtaatagcatgaacccacactatagttagctccgtattaaatacactcaaatcgataagaaagtgccaactaatatacttcgtgtgtgtgtgtggggtggtggggagagcgcaaagagataggtttagaaaaatagtacctttataccatcatctaaatcctttaagctatccaaggactgacagctaagctgttgactggtctgtcctgatacacttggacgagatatgtggtttacatctttacacagttcactgtttaaggatttctcaactttttctttctcttcctcctggttccttactgtacaaattccatcaactgacaatgacccagaaacagcttctgaggtttccttatgttgatctgaccaaggcaaacgaagagttccaagaagcacgacggaaaaaatattgtgtgcctcgactctagtcgtacaatctgcatgggacatcgcaaggagcagttggtgaaacaaggcatccggaaatacctgggacagaccacagtaactcagttagaacataataactactgccatagtcaaatacaaaacaaaagttgcagtaaaagaattcatttactttcttgtggtaagaaacatttgggaccaccgatactatatgtgcagctcggagaatggctgatgctgtggtcctagaaaggactacattagtggaaattgtctcaagaaccactgcgaacatatcaagaatgggccctgcatccccaaccttaaaagcaaacaaaaaaattgaacaaattatggcgttttgtatgaacacgcggacaggagagaaaacaacaatatgcacaaatttcactggcaactccaaggagtttcaagagtgaaggtagatcaaaaccacatgctgaaagaagaaataacatattacataagataagaagaagctgcttgatttcgaaactgttatgtgatatatggggtattgaattagtcttagcacactatagatcatataggtttcgacactataacaacatgtccataactttcaaatggaataacgccgtaacttctattttgacaatatactgcaagaaccagctaactaagatacttaattgatactgaaagctgaacatgggactcataaccactggctatctactaacgccataactagataagaacagaattcataaggacttgggaaatgattcctaatatacaagctactgctgtttacctagcgtatttccttttacaatcttattttttcatacaagcaaactacataattttaagaacgagtaaacttgaagccatgttcgaccattgaaaaattaataatatctggtgtattaggacatataagacacaagacaatacaagtaacacttgtggcgagggtcagatcaaaaccacagaaacctctaaagaacagaaaccagtccaactaaccttatttgagagctctgctatgcaattttctaatgcatgctggaggtccgagttctgctttgttttatcaacagacacatctgattcagctgcattttgcaggcattttcgcaagtgcttaatcaagtcagctattacagcagtcatcgcgcctgaagcctgctgctttgcatgtagtgcaaggcatgtggctacattgaccatgttaatttgaagaccttgttgctttattacattcttatgatccaagtgcttgatcaaagaagataccaacacatgacaattttctcctgcttaaatacttctttagtcagttgcctcatagacaagttataaatatactgaaaatcaggaaagatcgcaaataatatatatcatctgacctgattcttccagacgagactgcagaaacaataaaacagaagaggcaacgcccttctgaggagaccagtaatctccactgtcaaaagcagtcagaagcggttccaaaacccgacgaacagtggtagtttcctttgctaatttggctatattgcaaaggcaaaccatagaccagtatgaggggctcttcgaaatatccctgaatggatttaatcattcaatgaataaattaagcaacttatagatgatgcatttccaatggtcgtaaaaacaagtgaataaatctataaggagaagccttacatgttttccaacttatagtcagtcaccggattaggtttgaaagaaacctttttagtcatgttgggaatcttcgtatctgaaatttgatcaacttctttggtatcttcttggcccttctccaaatccatataattctccagaatcacagaaataatctaattcaagatgaaaaagggttcacaacctaactacagaacttgtatataaaaatcttgtatggatcagcagaagttgaagtatccgatgactcaccatatccaagtccattgatagttgggaatgctcaccaatgaaagatacctggtattaactattgattagtagcaaaagttccaagcagaaacagttgtggactttgcaccacataagacgaaggtcgaaataaaataggatttcaactaaagagaaactaacaacagaattccctttgaactgaaatggaactaactagtaaaactaaacaggttgaccataaattctatactagctgaataaggactaccatgcttaaaatgttttcttgaacaagaaaaaaaactcattaataaaagtgtccgttaacagtttgcaggtcaaaattattaagttcaagtaaatataacccattccactaacatagataattcaaagcagaagttctggctatctacaataggaagagcacataacccgtaacatgttgcacatctaaagggcatgcaataggatatgtttcgtgtgaggaatgtatacagctaaagggcatgttttctgtcagtcaaacaaaagagaaagtaaatggataaagcattaccatgaatgccaaagcctgcattcctgctgaccgtaattggagtgatctttcatcatcacccatttcttgagcaagttgacaaagtttagggattagaccttctaagttgaacatgtgcgaattcacagtctgtatgtaaacagatgtgttaccatatgtagtggtagcaggaaaagtagcttgcaaaaccatgtctcaaaaaaatgctaaaatgtacctgtaaacttataaagtcgacaagagtattgcaacccaagatctgaacttcttcctcttttgtttgctccaaaagagttctgacaatgcttagcaaactacacgaaaaaagaggcctacaagaaaaatagacagtctcagtaaaacgtaaataaggaacctggaaagaaacctataaaacatacaggaattcgaaagtaaatgatcgagcaacaagaaagaaaaaagtaagcattatttctgaagatctaatttaacaaaagcgaaatatgatatactgattctaagtaaccagttgacttacatctgctccttacatgatgaaagcagtttcttataaatgcataagacgactttcactgaaccaatatttccatttcgcaattctttgtaacatttttgctcaaggtactctgtaatctgtcataatggaaaactgaaacacatgagaataaaattgagagaagtatgctaagaaaattgaaaagggaataacagaaaaaaaaatgcaacaacctttggaattcgtaaaggattcctagacgcatactcacacagcttgccgatttttctatcattaggctcagcttcctgccaaatcacaacatagaaaaatgttgaaacttgtatcattccgtgtagcaaacctcattttagtttcattgggaatccattccacttacatttccccacttacaattagagagatcttaactagtacacacaaaaaaaaattgaaaataaagaagttctccaatcaaagagtgggtaaggaaaaaagacctgattacgagggaagatttcagcgagcattttcttgtagcgtttaacgggatgcctagaccttgccctcaaagaaggacagaagaaacagaggttaccacaggcgggcaaaacccgtctggacataacccccattttcttctccgcctaatatccccccctgcaaatatctctatatcttaagactaaatctttgaaagcaacaattcctaattgaagacaacaacaacagaggaatcaaagaaaacctagcagctgcgatttgattggcaccctaaattcaatatctagttaccaagatcgcaatccggagaaccctgaaaacccagaacaaaaaaagggaaatttagaattttcgatcccggaaaggaaataaaggaatcaaattcagagaaattacaaatccaaattggaattaaccaggaaaaaagagagagatagagattgaagaaggagagaattttaccaggaagatggggaaaagccagagaggcagcttggggagaagaaggcaaatctaatcccgcttgcccgctcagaggtggcattgctcttctctcgtctttttatcattattttatttaatctctccatttcattattaaaaaagctctctctctctcttctttccgccattaatgtcggaaagtgtcagtccgaattcctctttaaattaccaatatacccttcaaatatcttgtaatggatccactagtgcttatgtgatgcgggctatatacggtccgaatttttgaaggttgttttctgctgaatggatccattgactagtcctctatgattcttgacaattgttcttttgatcttttcttaatttttcttggtttttaattcccttcagaattggtttggtggttcatgactaaaccgaaaattattatattcgctttacacaatttttagtttggttaatagtaatacaattcaaatgtctgatccaacatagaaatcaagctatctcatctcaaatgtcatacactactcacaagacttaagaaccgggaatgtagaaaaccaaacgccaaaaatctgaaatatcagagagagcagaatatgtgtctctaaagcttaaatcttgttttgcttgagaattaggcattaagaggagaggtcaaggtaaactaaagcagggactttgattatctcatttacacgcttctacttgtttcacataaatgagaatgtggaacattcttcattacgagttaaagtcagagcgcctacagcaaagtcagctcaaccaaaatagacactgcacaaactagtgacataaggaagttctaagcaaaataccatatgcagtctctctctaccgataaggaaaacctttcaggtcgtaacggccagccagtttctgagcaacaccatcgtagaggagtttatccatcatctcaaacttcttgtgatgtgttaccgccgtctcagcttgctgtttcgacagcttctctgcctcctcaagctgtttctgacaacagaagacaagaaaacacattcacacaatagcacacaagtcttcattaacactatcaccgccaatcagatccaataccacaggaagagacaacaaacaaacgaaaacaaaaaacaaaaaatataagcaccttgagcatgaacgaattttcagcactatgcttacgagcaagccgcttgactctcctggccttgtcgaaatcaggatcgttaggcttaatccagcgaaaacggaccgttctaccaggcttcttcggtttatcaacaaacatattaggctcagcagcacaagctctcacaggccttggcataccagcaaccatgaaaggtaactgtgagacagtagagataacagcctgtgtcatctcttcattctccatctcaacaagaacacccataggaagctcctttggacccaagtagttaggtatgaagctgactttcttgacagtcccaaactgattgaaagcagatgaaataacaggagctgtggcaagaggcgtgagttcgtctacgtagacagtacgacgaactctctctaggaacttctcatacgctacttcttccggagtcgccatcactaaccaaattaagaagagaaaacgataaacgaatttaagttcaaatagaacaaaccccaaattgattcaacagagttacaatttccgtcttaaatatatgcaacgaattttctggaaaaacaaaaaagaaatcggggcgaaaatctagggtttctcagagaaatgggaatgaagagatagtagcgaaatcgatggggcattgatgaatagaaggatagagatcaaagaattacctgaactggagagaattcgtgttaaaggcgtcgtctctggaagtaactgttaaactcgtgtcaaaggcgtcgtctatggggggagacgaaataaggaagaagaagtaagttaggaggataaatgacgacttttatagatttatatatttgttattggattccattatcaatggcccgtatagctcagtggtagagcgtcagtcttgtaaactgaaggtccgtagttcgatcctgcgtgtgggcacttttttatttttcaaccttatgcaattttatttttttcctttccctgtaaattataaaaaacatgtagttgaaattaaataagatatttttttttttgtaagtattaaataaagagatttagtgaaagcgatgcgactcattgtaatgtatcaattttggatctctttgtagtttttataaaacaaaatctttttaggatactttcattggccataaatcataatagtggttcaccacttcattagagtttttagctgtttttcttttaagaatcaaatattaaatcaaattctgatttgatcaataataaactgttatttagctaatgcaattgtttaaactgataaatgtttggagctaaacgtgcaaccaatatcctcgaggtggggagtacctgcctaccatttactatctagttttttaacagcaaaatatgtcttatttaactgggataaatgtttggagctaaacgtcactaaaactgttcttgattaattgtaactgggaattaattacgctaacaataatttaaaacgaaacatatattttgcgtatactaatgttaattcaagaatgtaaattccagggtatttgtcgcagttgtttatactaaatattaattcgctcagattcaagaatgtaattattttacaagaattttgttatctaccttcaaaaggatacacaaatctatcagattatatattatttgaatgttgactcaactttccccctagtactactgtttcttaattcttacttttttgtttggtgaaaacaaagtattaattaaattcccactatatatataacaaattttaagaaaataattaattccataaactcatagagttgcatccttttaaaaccctcaacatgtccatctctaccgattaacaatatcaaccaaaggcatatctttttatctccttcttccttcctatttttggctaatgaatgtctctttgttgcatctcttgtaacttcctcctagatttttgaattcctgcccttatccaagaagccaggaaagggtaaaagattttctcggcctcgtggagccctcaccattatcttttcttcctccacacgcaacactacaactttaaaagagatggatccgacagagctaaaacgcgtgttccaaatgttcgacaagaacggggacgggacgatcacggggaaagagctgagcgagacactacgaagcctagggatttacatcccggacaaggagttgactcaaatgatcgagaagatcgacgtgaatggtgatgggtgcgtggacatagacgagtttggtgagctatacaagacgataatggacgaggaagacgaagaagaagaggacatgaaagaagctttcaatgtgtttgatcagaatggagatgggtttataacggtggatgaattgaaggcggttttgtcttccttggggctcaaacaaggtaagaccttggacgattgtaagaagatgataaagaaagtggatgttgatggtgatggtagggttaactacaaagagtttagacaaatgatgaaaggcggtggttttaattctttgtagctaattaatatggttttatttttttctggcatttttgtgttttgggatccttgatttaattaattatattgtcttaggaatgaaagacacaaaagaaaaatgatcctagtttactgcattcttgttctgttttcctagtgaatattttagtttgtgttttataaatgcgtttgatttataatgtaatgagaatccacctgtgccaataattgagatcattggcaactaggctagctaattgtaactgatgtagctctattaggaggaatctcgtttataaatactgaatcaattagacaaaataaagatggttggcaatatccgtttgacaaaattagatttttgtatccgaaaaaaattggatctaatgttgtatttttttccacggatctaatgttgtatccgcttgacaataccataatctaattttgtcaagcgcatattgccaggaatcttcgctttatctaatcactttttatgtatggatttggatcgagatttgtgtgttgctccaattttctgattgtaaactgtttttactggaccgctaaaaataatccataacctatccataaagtggaagggattttacctaatgtgaaatgtgtaacaaacagtcttccttcgttccttgtaactaaaagaggtgtgaactcaactaacgtttattcagaaatagtgaggtcaaacatacatgaataagtagtacgtatgcatttgtttataaaaaaagtacgagttatatgaatcaaaagtgttcagtccgagtttcagttcaacggttgcagcctagtccagagaatcaggcactcatagtcttgatcctccacacgaccacaaacacgaacaaacatctattttttcttccttttttgtttttgttgctaaaaatgtaagttggggtctgaaaattttgaagagatctgagaaacttcacaagtgggagttacaaaagtctcggagtgacagagagcaaataaacgagataaggttaatgagaaatatataacttgtggaaaattcaaaaactttggtgtacgttacgaaaattctcatataggcaaagttatttaagtttcgtaatatacaaaaaaaaaaaaaaaaaagtagaaaaatatttgaaccgcgtgtgtaatgtatcgaccacagactctatgcccttgtgtatcatgtgagaagataacatgggtcccgcctgtagtttttcctattcttttctttaatttcgaaatttttgtaattaatgtgaatgatactttttttttttgtcttagtattattgccatcatcatactagaaaacattgactaacgaactctaaatcgagttaatcgttgtcatatcaaattaagaaagaaaaataacaggaaaataaataacaattttcttaccccatttgcttattgactctcttaaacaaacaaatcttaaaaagcaagagaagaggatatttattacaaacacatctctgcaacgagctcatccaagttcttgtaagagctcccaccttctttaatggcctccatagctttctccctcagcttcatcaacgtaactctctccggcaagtcctctctcgccgactcagccaaaatcctagcgagcttgtccgagtcaggaaccgagtctctgttctctccaactcgcactgcggctcttagtttatcaacgatgagcgtcgtgttaaagaaatggtctgcttgcatcggccacgctagcaacataactcctccgaccattccttccagaaccgaaccccaacccaaatgagttaggtaagatccaacggctcgatgctcaagaatcatagtttgtggggcccatcctcttatcacgagtcctttctccttcactctctcttcaaatcccgccgggatcacatcttcctcaacggagttatcgctggagttcaccttcttagctgcgtctctcaccgcccatatgaaacgcacactgcttttctccaacgccgccgctaaagcagctgtttgctccgccgtgagccggatctggcttccaaaaccgacgtatacgacggagttatcctcggggcacgaatctaaccaagccgagactttcgccggcgggattgagctttgtccgccacggtcaacgccagctttaaaggggagcaacggtccgacggtccatatacggtggtgattcaggaaacgtgttttaacagtttctacaaactcaggctcgaggtcgtagaaactgttgatgacgagcccgtagctttccgttgtggcagtctcgagatcgttgaagaagcttctatcttcttgagcccacatgacggagatcgaatgagcattgatgggtaagaaactaatggacttaatagagaaagcatcagctactttgttaatccaagggctgagaaatgagcttcctaggatggcgtcggggagatccgacggtggttgacggctgagaaagtcaacgagagggtcgtggagacgagagagagcatcaaacatgtgaactatagcttcgagaggaagttgctggagagattcgacaccggaaggtatacaagggtgagaaggaaaaggaaggattagggttttgaagtgttccggggagtgaagagaacggagagcatcgagataggaagagtttttgggtgtgacgaggacagtgacggtggctccacggagaagaatctgatgcgtgaggtcaagatgtggaaccatgtgaccggattgtggaaacggtatcaccagaacgtgcggcttcttcgttgttgttgttgtcatgattgatgtttttttctttctttctggttttggagtggagaaaaattgaaaagtggaactccttttatttttagttttactgccgacaatggaactcttatttataaaacagatgcagcatatatatctctattaaaaaaaaggaccaaaaccccaaacaaatatagaccagtcgataaagccatacctacttcgacgtaattgctacgtggtggtttggtttggtgccttattaaaataaggttggacagagccggcccattccctaaacaaaagaaggtaggtggtgctctagttcaaaattcaaaataaaaactaattagacaacaatttgagtatgtacgtctctgtagatactagtcactagatatcctctaatttttccgttataaacattttttaaatagatgtgatttcattatttttaatatatattatacattttggatgcgatttgctaaaggaggccaaatggagaacatgcatgattgaggtaatgatgttgttaacttaagagcagtgtgtcgaaagaaccaaatgaagagtgagagatatgtcattattgtgtagcaactctttttcataaaaaaatcaataccgcaacattataacatgtgctaaattcgaaatgatgacgtcagattgattaaaaacaaaataaaaccttcgttacaagaagacggctttacccttagccctagtgaaatcaaatgataggttggtttaattcgggtttatgataccggtttaaataacccggttctaataaaaccagatagagtattcttcttccgggtctctctctttcatttgacatttcgctcgctgggttcttcaccgctttcaagctctcctctgggtctttctttgaatcgtgaaaggtatcgtttttatatctctctatacttgtctgattctttctctggatctttttccgtctcaaaatttgttaagggaactacattggcttgtcgatttgcttaacacaagcagttctcattttagagttaacgaaagtagcaatcggttttcgattttgtaaactttaatcgccaattacagttactgaaactctgtattgagagaattagggttcggtttcaaatcagctgggttttgtaattttgtttctcgtttatctgaaacccgagtttttgaggctctatgtgttgggattagagtcttacgagattgttataattaggattcgattaatttgtggtgtaaattctggtgggagatgtttatgcaatctctaaaccccttttttctgcagttatgtcttataatcagtttctgcttactgcattttgatctctagtaaaccattttttctcactattttgtatcgaaatcaatgagggaaccaccaaataatccccatctattgattgaatgattcttcttgtttagtttagattcgtcacaagaaacaaaatcttgataattggtctaggtttctgatcactggttagccaaactgtagtctggttttagtttgtcactctgctaaaaaaattgggatgaatttgtgatgctaggaaatgggaagagagaagagccctggtttgaagatcctctgggtatggactatcggcactgctgctagtatgattctctttctgacattcactgaatttcgtcatgagatcatatgtatgtgttaatactgactagtcttctactggtttgcagtattggtgacaagtgttgtccgcacaagaatgcaggatatgcaaacaatgatgaaccagaaccaggaacaagcaccaaaagaaaaccagaacggaagtgcaggtgattcttccgtcttaatggatgaaacagttttgcctgagtcggatcgagagattgcagaaaagctttaaagaaagaagagcctggttctagtgttgtcttccttttcttctcttcctttttcagctctccatgaaggtgatgaaacatgttttaatggttttggtaatagtttccgaatatgagtagatgatgctagtctctagatgtgtctaggaaaataaaacttgaaaagtgaattgctcaggaagcttgatgaggagtgtctagcagttttttcgtgtgtgaatattttcccttgcaaggatgatatatgataaagttgctaagcgaaattttcttttctcttcttatgttctatgctaatcaaggctaccaaaaggcatcaactttatttagttcggtctgtgttacatatgacttataatcattttttggtggtaaacaaacttttttaatttggtggtaaacaaactttacaatactgagacatgaattttaggtcaaaaactgagtgagagaatagatatttaagagtgctttgttcttatccactatatattcaaagttcgaaattccatgatcaatgtagaaatgttgaattcaattgaacctgtaaagctgtatcactacattttttttttttttttggtaggcgtatcactacaattatggaacaaatgaaaatcagatacaagaatttttgctggaatggtaataaatcagaaattcaaaatatagtctacctggaatttccataaacttggatattccacgtttcagttcaaacatatcttcaaggattgacttgtttattatgtgacttcaaaggattaaaaaccatttgagcctttattatataaaaacctactccatagtccatacttcgttcatttttatactctcttatcattttcatttttcgaacggaaaatcgatcttgttcgaatggcatcatccaccggcgagaaaggtctcatcgtgagcttcggcgagatgctcattgacttcgtccctaccgtatccggcgtctccctctccgaatcccccggatttctcaaagctcccggcggtgctccggccaacgtcgccatcgctgtttcacgtcttggaggtcgtgccgccttcgttgggaagctgggagacgatgatttcggtcatatgctcgccggaatcttgagaaagaacggtgtcgacgatcaggggatcaatttcgacgaaggggcgagaactgcactcgcttttgtcactttgcgttctgacggagaacgagagtttatgttttaccggaatcccagcgccgatatgcttctccggccagatgaactgaatcttgaacttatcagatccgtacgtaaaatctttctctttgttttcaagattgttactcgttctatctttttatttattacatttttctcttacaaggttttttaatttctaaaacacgcaattttataaatttccttcggtaataatatgccatgtgtaattttaaccctaattttactcttataatttgaaacgtaaatcaaagaaaggtgataattaaatcaatacaaggcgttaattaataaaattttgtaaattgcaaaccaatctttccttttacggttaacaaatgaatattaaaaaaaagatgttgaaggttatgaagctatgactttatttgaataaaaatacgatttgatataaattttatttgtttgtgcaggcgaaagtgttccactatggatcaataagtttgataacagagccatgtagatcagctcacatgaaggcaatggaagtggcgaaagaagctggagctcttctttcctacgatccaaacctcagggaacctctttggccatcacctgaagaagctaggacacagatcatgagtatctgggacaaggctgacatcattaaggtcagtgacgtggagcttgaattcttgaccgaaaacaaaaccatggatgataagacagcaatgtctctatggcatcccaaccttaagctcttgcttgttactctcggcgaaaagggatgtacttatttcacaaaggtaaacatctttttcgattacttgttaataaagaaactacttttgcaagtcttgattgggacaaaaacacttgtgtagaaattccatggatcggtagaaacattccatgtggacgccgtggatactaccggagctggagattcgtttgttggtgcacttctacaacagattgttgatgaccagtccgtactcgaggtgggtactcaactgaatgaatcttccttagttgatcaaaatgcgatttactgatgatatctttttttctttaggatgaagcgaggttgagaaaagtgctgagatttgcaaacgcttgtggagccatcacaacaactaaaaaaggagccattccagctcttcctacagacattgaagctctcagttttcttaaagaccaaaagaaacgtcaaaccaatcttaaattctcaaaatggtgttgtacggcttctccttgttaattttgattttgtgtgagtttagatccaagctgataagtcttatttgaaataaaagatcccacagttttttttttaaatcagatttaagagacctaagtttatgcgaaagtggaattgaaccaatgccgaatgtaaaagtcaaagaactgttatttcatatttgctgctccaccaaattttcctttttgttagtcatagatatatagacgaatccatctaatccattatatcaaaaatttgttggtgtattcatagatatatagacgaatccatataatttgaattaaatttaagagtgttgtgttcatcaactatccaaatgttttaattgccatgatcaaccatataggaatgtttcataaccatatagaaacgttgaattcattgaaccttttaaaatttcttgtttcaaaaggtagtccatacattaattattaagaattttatcaactacaattatggaaaaaatgatattcagatagaatttttttttgctcaaatgttaatatatctgaaatcaggatatagtataactggaatttctaaataaacttatatattccacttttcaaaccttcaaggatttaattatttatgatttgtcatttttctttataaaaagccattaatgtgaagaaatatgacctcaaaacaagatttaaaccctgtcttcactctcctagagccttatataaactactcaaaacttcgttcactcttcattctctctatcgttttcattcttcgatctctggaacacaaaatcgatcttgttcaaatgacgtcatccaacggcgataataaaggtctcgtcgttagcttcggcgagatgctcattgacttcgtgcccacggaatccggcgtctccctctctgaatcctctggatttctcaaagctcctggtggtgctccagcaaacgtcgctatcgctgtttcccgtctcggaggtcgcgccgccttcgtcggaaaactcggggacgatgagtttggccatatgcttgccggaatcttgagaaagaacgatgtcgacgatcaggggatcaatttcgataaaggagcaagaaccgcactcgcttttgtgactctgcgttctgacggagaacgagagtttatgttttaccggaatcccagcgccgatatgcttctccggccagatgaactcaacctcgaactaatcagatccgtacgtaaaatctttatgatctctgttttcaagatttcaagattttacttgttttggagatttgatgaatatttttctttatttggcaggcgaaagtgtttcactatggatcaataagtttgattacagagccatgtagatcagctcacatgaaggcgatggaggtggcgaaagaagctggagctcttctttcctacgatccaaacctcagggaacctctgtggccatcccctgaagaagctaggaaacagatcatgagtatctgggacaaggctgacattattaaggtcagtgacgtcgagcttgagttcttgacaggaaacaaaacgattgatgatgagacagctatgtctctgtggcatcctaatttgaagctcttgcttgttacacttggcgaaaatggatgtcgttactacactaaggtaatgtacaacaaacattcatgtggattcatcatcatcatgatgatcttggtgtgtgattttgattgatgttctcttgactcttgtgtaggatttccatggatctgttgaaactttccatgttgacgctgtggatactactggagctggtgattcttttgttggcgcgcttctaaaccagattgttgatgatcaatctgtactcgaggttaactcccattgatattgtgtgtctattcaatcaactgaatattgttgatgatatttactgatttttctcgtttcttaggaggaagagagattgagaaaagtgctgagatttgcaaacgcttgtggagcaatcacgacgactaaaaagggagccattccagctcttcctacagattgtgaagctctcagttttcttaagatacaagtagaatagtaaaacttctcttcgagtccagaattctccttgtctattgtaataatctgttctggattcttcctgatgattctgatcatttgtaatgttttttttttttggttctctctctgtcttttctttttcttcttcattgtattgaataaaacagacttgtgacttctgagcttttcttgctaatagaaaacaaagagtttttcgtagttgtttggaaccgtaaattgcattgaggattgtttctcaaggctttgaaaacagagtaataatcaggaacaaacaaaaaaaaaccaagaaagaacagagagaacacatttagtatcaagtttgtagcatcaaagcattaagcatagaccatgttcaagaggtatgaacaaaactcaaacacagacatttgttataagctctcaacatatcttacacaacttaagacaaaactaaaatgtatatgacattaactccacacatgcagataggtttcttgtttgttcttttacattgaagaatgtctacacatagattacatatagctttttagccaagatcagggacaatgaagtgttcctcatcatcatcatcatatctggtctcaaacctcggcttcttgtgtgaaacatttgacttcataggtttgtatgaatgaacatgacctaaatgcgaaacagaaagctcaggaacttcagctgcaggaagagccttgtcattaatctgatcaccgaagaatcccatgtctgaaaaccaatccaactcccctgccccaagatcaagctgtcctttctgctcaatttaaaccaagaagtcaataaaagcttcttgcaaagaaagtgatctaacattgaatctcaattctcatcactaccttgtcggtggattcaatatcagagaagtgaaagaaatcgtcaacagcccagggaagtggagtagcagaagaaggttgttgttgctgctggcttgtggatttagcaggaatctgattagccttctgttggttgttggaaggctcaggttgattcttctcaatttctttactacatatagttgaggtcagagctactttgatcccagtggctaagaacctctggtgattagcagatcgagaattagccacgtggatggattcatcgcagtccctgcaaagcagagctctatcctctacacagaaaatgaaagctgccttctcctacaagtcataagaacataatgagcaaaccctagtcttaaacaacaaggcatacatacaacagttgctacaagatctataaaatcacaactttgcaacagagcagattcaaactaacgaatccataaaatatttgacaagatctaatgagatctgtagagaaacttacttggcagatatcgcaacgagggaatttggtggagagggaattaagatgaagacgttggtgcttgctagcgagtttgttagcggcgtgaatctcgatgtcgcattgaggacagagagcagcttcgtcggcgcaacaaatcaccgtcgccggagctttctcacacacatcacactgtatcttcatcaccggatacaagaaaccaaaatatctaggtttctcaagaaggaaacagaatgcttaaaatgaagggtttattgctagtctggcttctcttagaatagcttagcagaagcgtaggttcagagaaagagcttagagaagatgaaagaacaaagagggagagagtgttttgtggggaacaagtaggtgggatgagcaattggttgtgagtgaaagagagaagataaggatttgatgaatcttgcttgttgctttgttttcattattctgcgtatcaaaaggaaacactctgcttcttacagcaaggtcttgcgggtcccactctttttctgtggctctccttcttcctctcgtcatctctcctacctttagatatttttattatattcacactttgctattttatattcttgttattttctcacgtagtagagatttgtgttttgtttactaatctagtcaaaacacattaattttgactaataaactaacttcaataattccaccaccactagacttttacgctccttttatatgatatgctcgaatttcaagtctcgtgaacttttacgatttcaagaaagatttgtatacaaaaatgggcttcatctagaaagaaagagttgggtaatggtattactcaaatcagagaatattacacgactacacgtaatcttgaaaatgacatgtgaattgattccttggaatgacgacatgttatgttaatatgtaccattcgatcagatttttcttcttctttcactttttcgttttctcaatcataaaaacgattaatgcaatcattaaaaatatactggcatgttaactaacaaagaaatgaatgcttagcccgttcgagaaaaagaatgatcctaaaagacaccaatacaaaattaggcatggttggtcacaagaattgttgttggatatcacatatccatccatattagtaaaaaccaatctatacatctgtggtttttttaaagaattgacaagtttttgtttctgttttttggtaatgaaatcgaacaaattcaaagaattgtgaagttaataactcccaaaacacttactgcttctgtacatgttcatccttctggatgtccccatgagaagtattgttcatgttggccgtatcttgattaagcagattagagaatccatttccaatcgatttccaccagctcgaccgctctgaggtagtttgatcccactggtcattactggtgcttgaggacagttcgatagatgtggctgactcggtctgcagctcagagaatctcacagctcctagtagcttttctggaagctctgcttcggtctgactctcaatgaggaacgcaagatcaactgtcaatgtagtaacgtagccaaatgcgagatgaacaatggcactagcgaccattgaagaaccaatatcgacatcaatctccacaaagttttcccctgaaacatatttgcaagagagtgcacgtccaatcacacagatcgcttgctctccaacagcttttctaacaatccaagggcctttgacaatgtttgcaatcagtttaagcctcgatttcttgaacccatcatctcctttcaaaaaccgatccatcagggagccttcaaggataggctctgtggtaacaaagtaagccacagcactgtaattgtctttgtgaggaagctggagattgaatgcccagacaaaaggcttagttccatctttttgaaactcctcatcgataactttcctgattcggctgcttggataactcaggatctcagaaagctttttaggacctttaatccaatcaaaacccagaggctttagaaggaaatcaccagcaggtatcttaactttgtcagagaaatactttggtcctctaaccataaatgtgtcaggagatggcgtcgtccaaccatttttgcagttgtcgtctggcttaagacatggaacagctccctctaatttcactctcttaatccattctggctcagtttcctcaccaacagagccagccatatcttgcgaaaacctgcaacacagagcttaaatccttgagtaaaactgagtgtggaaaacaatctcatggattctacttagtgaatatagcaaacaagaatatgccatcaagaagaccaaaacatgtgatcagaaaacagaaccatgtatgtctgaggctctatctattcctcatctaatttcccataggattcatactatgccacaagaactttttaaaagaaaagagtgaaacaaaaattgctcaaagaaacaaaaactaggagctggtaactccggttcaagtcatagctacaccggaaactagaataaagttagtaaattgactcaaattctgagtaatgacatcaaaattcagcatacacgattctgagattttctacaaacctaagccctagattatctgaaataacatgcataccattcaatagacaaagcacagagacagagcccagataattgaattttacattcatctacaacacataagaagaaacggaaaaaaaaacgtttttttttatcaacagagcaatcaaaacccagaaacgattaacaagtttcagaggttcaagaggaatcagctacaataataaaaaggaaaaaatcaaagttgagagatacaaataacaaaagactaattcaatcgcaggacaaggagcaaacaataaaccttttgcagccgaagaagagaagaattgtccaaaaaccctaattcaaaaacgaagacttgtcaagggaaaagaaacaaagaagataatccgattttgctaatcttcttttgttgtttggatttagcgttgaaacggatgctgcgaacagatcctaaattcttccgtggcgtaacgctttagttcatatctaattaattaaacttccaactggaaataaggtccaagtccaactagtaattattattaatagaattcaaaataaaaataatattattagtttggatttaacaaaaatttatgattattatgacaaaaaaaatatatgattatttactatgaatattataaaataaaactatataccatatgattttttccctaatcaagtatgagattatataattcaaactataagatttttttcccttaatttttacacctaatcaagtaaaaaggaaaaaaattagaaaaagaaaaagaaaagtaatgttagtttttactttttcctatttttttttgtcaaaaatcgtcaaaataaccaaaaaacattaaaaaaaaatccaaattaaaataaataaaagaacttttgttttgggctttccacatcgtaaactataatcggcgtctctccggactcacacctcatcgaaatttggccatctcatctggcttcttcccctccggcgttggataaccatcattacttctcgcgccggcttcgagtggaacaatatggatcctcgtcaattcgaacacaccgtaagtttttctctccttgaaatgttttatgacttctctctcgagatttcagaattggaataacgatcctgctcaaagatgatcgcacctatttcatttgattggattatggattattctaggttttcatgagtggatatgcattagttatcgtcttgtgtattggtggtggttcttagtatgaaatagatcttgaggctttttatccagaattggaagctgtactaatcttccttagtactgcagtgttatattaagttattggaatctggaaactgtgtataatgtgttattctctaaagacttttcttttgttaaccaggttgttgctgataatgatattcacagcattgttatgtcatatcttctgcacaactgcttcaacgaaactgcggactcacttgcttcttccactggagttaagcagcctgcaattgatcgtgataacatggagagaagaaaacgtgagttgtacaagtcatcttttgttctgctgttaaatgagtgcttatgcaattatgtgattatatgttttgattgattgttcacttattcagaaataatacattttatactggagaggaaggcgttgaaggcttttgaactaactgaacaactagcacaagacttgcttgagaaaaacaaggatttgcaattcgatcttctatgccttcattttgtggagctaatctgtgctgggaactggtgagattttatgattggtcttccattagaaactctggttttatctgtgcctgtaatcttaaaatgattctctgcgtgtgcagcaccgaagctctcaaatttggtaagacaagattggctccttttgggaaggtcaaaaaatatgtagaaaagcttgaagtaagtctgaatcttgtttgatcctccattatattcgtcttgatgtattggtagattacttgttatgttcttccaaatgatggtagatttgttttttcctgagacaggacgtaatggcattgctcgcttatgaagaccctgagaaatccccaatgttccatcttttgagctctgaataccgccaacaagttgctgataatctgaaccgcacaattcttggtcagttcttttttatttttacctccacgaaaatctctaccgtcctgtgaccttagcaaattacaagttttaactcattcttcaaattatgtagaacacacaaaccacccgagctacacaccaatggaaaggatcatacaacaggtgacagttgtgagacaatacttgactgaggagaatggcaaagtaatcgtagtatttcagtatttttactcatatatctgattcgttgtagaagccctgggaatagtaggtgcctgtgtttaaacgctatttcatgtcttatgataggatgcgtttcctccattctctctgaaggattctctcaaaggctaagatcgcaggactactccaaagtttgctaggaggaggatatgctaagcattgtcatgtaaatacaaaaagaccttgctcctctctaaagtttgcaaggttagtcttccatggccacaggcggggtttcagtttgctgttacaggagatcaatattgtgaaggacagtttcggcttggtttggtttggtttggttcagttctctaccagaagattgtttcatcaactttgtgtgagtttagtcgataaatctgtaatccatatctttggaatacacatttctctttgtaactatcgtttatgttttgatagaatacttgcaaattcaaggttttatttttagacatcacaattcaagaccaaatgagacttttcaagtaaccaaaatgaacaaaaggcaaagaatatgaatatggttaaacgactacagacttggactaaggacccatttctaaccaaatgaccaaatccaagaactttttaagagcttaggatcatacaaagagaagattgtaaactaccaacagacgagaacaaaagcttcactaacaacttctaaatccgcaacttctaagctgtcttgtttttaactctataatgcagtaaatcccaaatccatgagcctgcgatgaaaaagaagattttccaagagtaacttactaaattggacattagcacagtctagactcagtcttttgtcaagggagtttcacgatcaggcgatgtcacactctctttctgaccaggagaaggcatgggtcttcttagctctgaagccccgctttgttgttcctgttgttgaagccgttgctgctgctgaagctggtacagttgctgctgttgaaagtgaaattgctgctgctgctgctgttgttgttgctggtgttgctgttgttgttgttgctgtttctgtgactggatctggagctgctgtaactgttgtgcggctaagatagtgtgcatcgactgattattgggatagaattgctggtttgatccaaaagaaccgtagttcattgatgtaccatttgatggaccttgccccgtcaataccttaagatgctggacttcctcctttagtgcatcatttaaagctgtcaaacagataaagacgattaaatcaagtagcagcattcacaacaaagtgcagcgaatatctcgacgggggacaaatatttatagactttcttaaccagagaaatggcattgagttttgaaggtgtatgtttatgtgttattcaagattctggatctgtattttaagctttgtatgaccacaaacatggcatacaatcttacactgacagatccagaatgtggtatgtcatatatactacaccttcgacagtcattgacaatgtttatttgcattgatagtaaagagatgaagaaatatcagctcctaggaagtatgtgagaaaagatcctcaccatcctgtaggtggacctgttgctccatagtttgtactcgcagtttaagctcattgttttcaacacccaggccatttgtatctctctgaacacaaggatgaaaagagaacaagattacaaccataaacttacaaatatcttagtctagagttaaatttggtctccaaacctgtaagagagtcaactgggctgagagagatgtggcctctgtttgtaaagtctgtacttttctctcgagctctgcaatgtatctcatcttcctttcttttgacctcgcagcagactgcctgtttgcccatatcctatcaaatgatacaacatgtcacgcatcttatacaaattcattactagttaccgtaatttacgagtgagctacttctagatgaagggttatgtaaaactccaacagatcagttcagccaagctttattctttttagtcaacaaccctagataatgtttcaccaaaaactatacaacttcttaaaaacatagaaggaaaactgttcagaaaagaaaaaaatacctcttggcgcgttttggatcaatgagagcaagctcagaaagtttagcagcagagatggctttcttagagtcaactccagacacatcttcattccctgacataagcatctcaggcttgatagttgttgaaccatccatcgattggctgtgttggtgtctaattctcggtctttcactagagctaccgggtgtactctgaaggttagaagtcgaggctaattcattcctccaagtcggttctgatggctcacccatttgagaagtcgatgtagcagaagaattgaatttttccatatcaagatacatatagagtaagtcctcgtcagtatcatcagagaaagaaggtccatcagcagcaccaaccacaccaagatcactatcaaagcttaagtcatcaggaagagtaagaatctctgaatgagctcggcgatggcctaggttcttaggtggattatccggcattcggctaatatcatggctgaatcggttagcatctgagctattgcttccacttggagtcaaaggaggaaaagatgattcagctttcattgcaaagctacttccattaggtgaaaacgcagagtaacgacccgatggtggaggaagacctccactaggtggtggtgcaggagatttctccttatccatttcaagaacttgacctaaacccactaatctgcataccatttattcccgaaaaaagatagattatattccatactagaacagattagggtttcatctttagctatcaaattcatttgaaacaatcacacgctttatctcagcgattatattccatattagaacagattagggtttcgtcttagctatcagtttcctcaactaaggagatacacaaccctaaaacaatcacacgctttatcttagccttaattcaaaacgaaaaccctaaaataagtaaaaagataggatcttttgagttttcacgcacttacagagatctaatgagaagcctccagaatccaaagcagaatgtccaaagagagatcaacgagacacaaaattaaaggtgaagaaaacttgaaatttgaaaaatcactaaatcagagagatccgacgagagaggaggaagaagaagaagaagaagaagaagaagaagtagaacattctctctcccattaaaggatccttcgaactagtgtgcatcagaagatttacggcgtaaacgatgtcgtttaaacgtaatttggttcgggtaagtggtacttttgtcggaattagggtgtaatcagctgcgttagcgtgttgcaatgaacgatgttactgaccgttggatgatgatcaatatgtctggttggttcgtgaagagcgtaaataaattatttttgtcaaattggttcacgtggttgctaatttttggttggaccgtcgagagttgcttgcgaatactactactatttttgatgactttctaatttttcttttataagaaaatactaaccaggaagttataaccatgtgatatgttttcaatattattaatgctgacgtacgatttctttcaatcatatgaaaatctaatattttaaaagagaaatgaaagagtttgaaaccattgcaatttcagtttcataaaatatatgtttcttactatttgtatttgtcaacgctcttataagtactgtgattgttgttgatttctggataagggagcatggggactaatattctttgaaaataatctagagtgggccatcgtttatgggccgcatggtaaaagatagggcccatagtactactacccatcacacttgaccgacctctctcacccattgacaattgaatgggcgtgtttactcctctcaacaacctcgtctggccatacttcaattcaattcctaaaattatgggatttgcaaattatttgctagaaatattttcattctaccaaaaaatccggatattcgtaataatcaaaagaaaaataagtagtaaaatatatagtgttttttacagtgaatttttctgcatatattctcacgtgaccttgttggctctatagtcacaagttaagccttagggggtacccataacccatacgaaataaggcagcaatatgatgccaattgaaatggtcaggcaagtatatatacaattatgttactcacaaaggattctcaaatgaaaaaaagaaaatggttgaaaagttccattatagatatgtagttttatagcagagtacgtaatgtagttttctacaaaataggtgttattgcacagttttagggtttggtatcgtcatatattgttcggcttttttcttacttggagaatttaattggacctacatttcgctttcgtattaaataattctaaatacttactatttttctggttgacggggatgtaaaatttgagtctacactctagagtctgctcgtgcatgtcgggtttatttgtattcatgttactttttagttgcttcatatgtttctgtagttatagaaaaatgcttgttttcatggtagatcaaagatacataaaacagtaaaactacctgctccattatgtacatagaacagcgtgtccatttttttgtggagatcaagatgattaactaaaagcaagaaaatcaaacactaagcaaattgagatgtcaaaatggtaaccaagattgactggaccatatgttatttagctagttaaagcataaacgagaagcaagaccattattaagtacgatacactaattaattagtaacattgttagaaaggtgcacacaaaaaaaagtaacattgttatttttcttctgaccttacccagacttgttcagacatcaggtttttaccaacaacctattgggtctcaggttattctttgagtccgattttttttttatcgtcataaaaatatatttgaattcctttcattacttgtcagggaaaataataatgatgacaaaagatcatatgttttttttttacttttgcatatttttacttcaatgtttttatagtccagtaaaaaagtagcagtggaggttcgaatcaatggcgaggcatggccttgaatggtggcaaaagagaaagaaccggattggacaccgacccacatcagatttgtcattaggatcccagaaacagaggaagcctcattgagatctgtgattcgtcatttactactttttatgttgtaattaaccttaataataggttaatatatataaaacaaaatttgtgttactggtgaatggtaaagaaacaatgggtcggaccccttgtggtttttgcaggtgcatcattgactttttggtcccaaatctaattaatgtcttctgtagttatgacgttgaatctatcacactgtggcctgtgggttctcttacaatctacgaaatagttcttttgtagtctatagggtttatacattctattattttattttcaaatctcctaacttatataagttataagtgaattcaacttttaagtgaattcaatttttaagtgaattcatggagtataagttataagtgaattcaattttctttaacttataacctttctgaagtttttttgaaccaaatgatttttaaaactgctaatatattataatgcccgataattttagatgaacaaaaatgctagttataaaacatcgataaagaaatcagctgagatagacaatatttgccgtttcattaattactttgcatgtatgaataaatttcacaagaactcgattttttctttctaagctgagtaaataatgttttcgttgttacgatgttaagactacgaagatgtggatgggttatcattctgtatggatgggggaatacattttgtgtagagatgtttccatggatcaaaagtcgttttttcattgttattatctattcatattttgatcgagatacagataacctcaaactttaacatacgcggttgtgtgtatttgtgtatatacattgcataaacataaaactcactttttatagattagtgattataattaatacggtatggtttggtactcgaagttgagctgcctagatggcctgatttcccctgtaccgcaaataatttcatttctttagttttttcaatcatttctaaacttttcatatctgaatgtataaagttttttttggttgtaataaagttacattacaagaaaagaaattgtggatatgataatttttttctttcgctctatagtatattatttatatggacataagaaatactaatgaaatagtatattttctgctatttaaagaaaagcaaaaatatactatttaattagtttttttttttgtcaatctagttagtaattcttattgtccaaaaagaaaaagaaaagcaaaaatatacttttttagattgtccaaagaataaaataatacaataaaattaaaactatcaattagaaaacattctattattttgctaatatgataactatataaaagatttctattaaaagtagaaggtagaacgatttatgaaatgggccatttttctgctgttgctagctatgatcatgttcaaagtacggagatatgggtatctatatttgtatatagagtattgataaatgagtagtgactatattctatgtacaatggtggaaatggtccattgattgatgttttaatttccttttctttatttatttttccttcgtatacatttttagacaccgaaaggaagaaaaaatggccatacacatggtgttcgcatttaaagaggttcgaacttacccactatccatgatccatctatcagccatgctcggcagaaatattttaggcattctgcattgatcatatcaagttaataaatacatttctaactctcttatcgtataagaaatttataaaaaaaataagcttgtatgattttctccatgaacctgatatgcatttgcactttgcagtatcttttcgacagcatgcgtttttgactgttctgttattcttaatttcttattactacgggacatgcatctgttttccatttctccatatgcctagcaaaaaaaaaacgaaataataattaaatagtagtacatttgttttttggttttaagaaatagtacaagctagagtaagtgcatgtaatatatatatatatatatgtatatgtatgtatgtatacataaacatattacatgcacttattaacgaagtcaatatcgagctccgtgtcaggtttatgcgtacatgcatgatgcatctatggtttccaataataataataatattactacaacaagttaatgaagtgttatgaggccaacgtcccaactgcaacaatttacagatataatgaaaagtggccctggagaaggaatgtattagctaagcctaagtagtcgttagttcgaacaatttgttcatacgtttcttattttggtttttgaatgttaatatttctttttgacatgaacgacttctcgtcaccattattacgttttaaaaattcaaaaaaattgcttaacaaattttctctaaattattacgcatcttataagccaacactttcacaattgtatattgtttacagaaaatatttgactttacatagtgacggttttttcgtctaacttctaccattcccaacgatttatgaatatcgctacaacgtaataaaaccgcgtcatggttaatttgttcctagtgacgaaatatcgctacaacgtaataattaaaaccgcgtcatagtttgttcctagtgagtaaaaatgtttcatttcttcctttttttttttttgagtttttaatttatttttcaaatgctttcttagttttggagattagatagttgctagataaagatagtaagatggcattcattaatttttaccaaattttaagtaaaactcgttcttcttctctgggatatatgcatgtgctttgcatatctttcttagtttgaagattagatgattgctaaaaatctcattaaccgattcttccttattaattcaagaaagatatattaatcaatatacatgttcttccatctcgtccttatttttggagattagatagttgctaagtgagaatacgtgaattaatatcttctaacttcaagaaagagtggttttcttctttgggatatttgcatgtgctttccatttcttccttatctttcaggatgaggtatcgatggttgctaagcaattacactaattaatttcattcgaactcatataagtttcgttcattaatttattagagatataggagtcctgatgttgcttggtccaccacatacacaatatagtattaagaaaaaaattattattgacataaaacaacatatagaaaaattcaaactttttctaacaagaagctaacaagatacatggttgagatatcttgattaaaaagatgattttctattacttctaatctccaaaaaataaaatatttagaaagtgaatctgttttgaaatggtaaattatattcattaattactttaacatgttatatcgaagacgaaatgagtgaactcgaagatgatttcttgaatatataaaagtaaacaaacaaatcgtgagaaagagtagaaatgaagggtctaaattttgttgatatccgttgctctaaaaatatttgtagtatagtcttgtattctctagattgtcaccaataagcctaattaacggtaacaaagaaaccgtacgtgttcatataacggcatatagaaggctattcaaaaacagaaatgacaaaatcaaagctataaatatggatgtacatatacattgaattagcatccataaaataaaaaatagtacaagattgaagaattgcatgaaatacgggtatgtatatcacaatactaaatcaaaatcgaggtctgtgtcagctttatgcttacatagttacatgcatctatctatggattccaacaatagaaatattttattattttcacaccaagttaatgaagtgataacgactacgtcccaactgcaacaatttacagataggataaaaaagaggtagcatgcattagagaataaattacggcgtccgttagtaagtcaattcactctattcaattttttaccctccatgctactataaattacaacgatactcactcacaaaacctaaaccactataacactctttatacaaacttcaaatccacaaagagtctttttttttttttctcttcgacttagcttatacatagttttattacaagatgtcattgtcagcctcggagaaggaggagaataacaagaaaatggcagcggacaaggctgagatggggaggaagaagagggcaatgtgggaaagaaagtggaagagattggacattgtgaaagcttttgcatctctctttgtccatttcctctgtctcttggcgcctttcaatttcacttggccggctttaagagtcgccctcattgtctatacggtgggtgggctcggtatcaccgtctcttaccaccgaaatttggctcaccggagcttcaaagtccctaaatggctcgagtatttcttcgcttattgcggccttcttgccattcaggttcgaactagctctttcatttttttcccccacaaaatttccaacttcgtagttgtaaacatctccatattttcgtaattctatacttaacagaaatgcaacagaacttactcattctcttacatatttagttatttttcctttccaatatatatatgggttatacgaatcagtcaatctacctgcaaatccatgttttggacaataatattagttacgtaatgctacaaatctttaggtttcaacttgttggggggatcataattaaattagaaacactcaaccagtagttcaaagggacatcgtcaatctttatatattccgttaggttttggtcacagtctagctattatatcatgcttttaaattgttatatttcctttatgttctaattaattagttgcgttaaacatattttaccgtttttcatatattcgttaatatctacagttgtaaaaattcatggaggacccacccgtaaatccttagattcttaaaaacttatgatatagattctataatatctatatattcatgtattttttttgaaccatgagcattaatttatttgtaatattcatgtgtatactatctgttttttgaaccatgaacatttgtttgtattttgttgtaactagggagatccgattgattgggtgagcacacatcgataccatcaccagtttacagattcggatagggacccacatagtcctaacgaaggattttggttcagtcacctcctatggctatttgataccggttatcttgtagaaaaggtaattaaccatttgggagaagtagattagtttactttaatcacaattaaactaataaaattttgtaatggtacagtgtggaagaaggacaaatgtggaggacttaaagaggcagtggtactataaattcctccaaagaacagtcctttaccacattctaacatttggtttcctcctctattactttggtggtttgtcttttcttacttggggaatggtaatattttatattctttcccttttatttttaaaaaatttcttacaaaaacataaaaatagttacaaataataaatgaaaaaatgaaagaattctaatttttctatgagtgtagggtattggggtagcaatggagcatcatgtgacttgcctcataaactctctttgccatgtttggggaagccgaacttggaagactaatgacacttcccgtaacgtttggtacgttcaaaactttgatcaaatcatggatataaatatattgagtagagaagtaaattttttgaatttgttacttaaattggtgaaatgagaggtacctgaaccaactgcctctgtttagaaagtcgatgtgaatattaaatcttggcacattgtccaagaataaacgctcatgacttgactaaacaggaaaagaagtatcattttcatcgcagtatagaacatatgaaacaaattcctcttaaagggaaacttttcttggaccactccaaaggcatttagttcaccatccataaaccagacatatatgcagatcttttgattgtgtttttgtttttttttgtgtgtggattactgcatgttaaaaagagtgcactttatcttaaaacaaaaggataatgtccttactttgatttttaacatatatatacagtattagtttataaactataaacgcatatttttattttgtatattttataaaaaaaatataaaacgcatagaattttttttttaatgtatgccgtgtttgtatttaaaacttataaaaataatctttttttttttttgcttttttcgtgaattcatatgcatataattacgaaacggcataaattaataaaaataatgataaataactttgaagaaactaatcaagtggtggtttaaaatggatatatatataggtggctatcagtattctcgtttggagagagctggcacaacaatcaccacgccttcgaatcctcggcgagacaaggcttagaatggtggcaaatcgacatttcttggtatattgtccgctttctcgagattatcggtttggctactgatgttaagttgccttccgagagtcaacgtcgtcgtatggcaatggttcgttgaagatatggaacgacgtctcgtctcatttaagcattagttaattaatgtctacgtacgttttaagtttttggtaaacgtaacacttgtaatattgtgcgatgcggtgttgttttgtgacttgtggtgtgtgtttgaaccaacttgcttaattaagataacgttcgttttgatatgagcgaaattttaaaatgcgttatgaagtttatcaatcacggcccactttttttccctataactaacacaaacatagtactctcatatatatgaacccgggttatgaaactaaaagttccgttatactttatggtgaacctgcaggaagattaactgtacgtaacaagaaaaatagtacaatatatgccgcaactccctccctccatattttgttcttaataacttttgagttttgacttttacaatagagtgctactactagtttgtaaagaaaaacataaacctataatggacagagaagctttaattcgtgaatacaatgttccattaataagaaagttgaaaattgaatgtctaagaaccaaaccctaaaaggctagaacgcaaccaaacctaaaatgcagtactttattgatccctcgtcttctaaagactccaaactaaccgaaaacgttagagctcgaaataaatttgcctaaaactgtagtatccgtgtttggaaattatcgaccaagcagtttgggaatctcgtgttaagatcaaaaaggtacaattctttatccttcagtcaaaccaattttcttgcatgttaatttttacgacggctacaaatatattataattattgttttcgatattttagccgtaatttgaatatctaaactaaatttttaaactaaatctatgtctagaattgattgaaaattaaaccgattataaaagaaaatttgtttcgacctaaatatatgactgaatttgattacatagaatcaaaattaagtaaaattatattcaaaaaatagaatggtgagtacagtattgtgcattaccttattttccttgctcgactaaagctaaattaattaacaaatgaaatacatattattgtgttcttaatattcatgatgaggtggattctctatgaaaaattatcatttctatgtatgtgatatcatactaactacaataggatgatattatgtacgaaaatttaaaattacatatttatttttctattagctagtattgtgtataatttaaactgataaacagctataaaaactgcattaatattttaaatgacatttagttgttaaaaatgacattgtatttttatatacagcactatatttcttacaatttaagacagatacatacttacactatatcacaaatatcaaagaaaaaaaaaacgttttccaaattccaaaactttaaacgttaagaggaataaatatgtgtcttgtgtgacgtaaaagcattggtaaaaccattccttaaaacaaatacaaatgtctcaggtttatacatgtgcctattatgcttaactcttaattctcggactaaccaattaatcgagattcttacgcatatatattaaaaatattatctatttttttaaaaaaataggccaactaaatggcttgttgttttcctaactaaatttggagacaaggcaaagacgatgtaaagtgtccaagtttatgttttcgttgttaagtagtaatgattactcaattccaccgatacaatccttaatctccacaacattcagcttcaatgcaccaagattagcccctatataatcaaacctttggtcaatcatataactctcatatctcaaaaataacaatcccattcctcgacggtccaatgggggacaccacaaaggacgatgggtctagccaaagtaaagcggtgcgtggggaaaaaagagcattctttttcaggaaatggacccggatcgatatagcgagagcttcggctgttggggctgtgcatctattgtgtctgttggctccgtttaactataaatgggaagctctccggttcggtgtgattctcgctatagtgactagtcttagcattacattttcataccataggaacttgactcacaagagctttaagcttcctaaatggcttgaatatccattcgcttactctgcccttttcgcgcttcaggtaaacatatatcgttttgaccaaaaatattaatagaactaatatatatccacaattatctttgaatcatcttttcttcccagggtcatccaatagattgggtgagtacacataggttccatcaccagttcacagattcagaccgtgacccacatagtcctatcgaaggattctggttcagtcacgtcttttggatattcgacaccagttacatcagagaaaaggtaacaaaaattttaaagtctctacaaacccaacatatgtgaatcgatcttaagttattatgagaactcacttagaagatcagtaagtaactaaaggtgaactatacgtacgatgttgtaataatgtaacagtgcggaggacgtgacaacgtgatggacttgaagcaacaatggttctataggtttcttcgaaacacaattggtctccacatcttaacattttggaccctcgtctatttatggggtggtctaccttacctaacttgcggcgtggtaagcactctatttatttttgtgcaattaaatttttgtatcaaataaaaaatggattaacgtgatgaatattctagtaacattttcttcgttttgaaataaaaattccgtgatgctacaacaaaaaatgaattcccgattattttctaccattcacgtcattcataaaaaaatacaagtttttggaaaacagctctgctatatgtaaacatgctagaaatatagttactaaaaatagaacatcattaatctatttaaaactattttctagcattttatgttatcttgcaaaacttttttcaaataaattattgctcttccatttcacaattcatctaacatactaactattacaaatataatattttcttggcaacagggtgttggaggaacaatcggttacaatgggacttggctcataaactcggcatgccatatttggggttcgcgagcatggaacactaaggacacctctcgtaacatttggtacttaatttatagacctttaaaccttaaccgaatctgataaagcttcatcaaaattagtattaagtgaatgtgaaatggtgcaggtggctagggccattcacgatgggagagagctggcacaacaaccaccatgcctttgaggcctcggccaggcacggactggaatggtatcaggtagacttaacttggtacctcatttgtttcttccaagctctcggtttagccacggatgtcaaattgcctaccgatgctcaaaagcgaaaattggctttcgctcgttagtcacaagctctatatctatgaatctatctatttctttaattatatatgcgtaatcatcactcgctcattcgttattttatgtaaaacaatcaagaataatatgttctcaaaacttgtatctagttgatgtaacaccttctacgtatatttcatgttgtatgaacaatgaaagccgagataatacattatcttcaaacagtaaccgaaccttttgccaaaaaacttcagatataattcaaaattccagagaaaactcttgtgactttgacttcgaagtgactcccttttggatctctcgaactaaaaataaagaactaaaaaaacttatatgtcaaactctccaaaatttttaacctcgtatatatcacgtcacgagtttaatagaacttaccaaccgcttcattcacatattaaactatatcaaaaataaaaatcacatatttaatttcttttcttttgtcagttctataaatatggtcatgttggatccacccgcaaaacccattaacagtaattttagttttaaaaacccgcctagatttgagctagtggggtctcattaaaatttggatcactcaaccacactagtttagaataattagggccatactcaatctttataataccttagatttggtcagaatctagctatgatattatgctttttatatttacttttgttttagttagttgaattaaccgttttatttataatcaagatctacgtttgtatgtgctggctatgttgtagttagttgagtctcaaatacatttattatctcatttttaccatgaatatttatgttgtttgctattgtaacagggagatgattcatcaaatattcaattcaaggatttggttcagtcacctcctatggctatttgacactgcttatcttgtagaaatggtaattaattattgggaagactagattagtttactttaatgacagtaaaatattaatatggaggacttgaagaggctgattttgatcagtcgatcaacaatataatcgctaattttgaatttattgcttgaattggtgaaatgagaggtgctcaaccaactatttctattttaatcttggcacgttatccaagaaaacgctgaaagtaataaacaagaaaaatgtagcattgtcgtcatcggacatacaacagaacacaggtgaaacaaattctcaaaggggaaattaattggaccaacacaaaaggcaattatgttcaccatccaaaaaccccccataaagattactttgattgtgtgttcgctttttggtggtccattttactagcacatgttaaaaaaattataatgttaattttagttatttaaaaatataaatgttcttgatgtttaatttttagcaagtattatttcctaaaatgacacaaataacttttgaaactgtcttccgtgtttgcatttagtttttataaaagataattatagtttttaaataaatgtatataaaattcatttaatccaaaattttacaaatcatcatcactaactaataaaaatgcattaaaaactgaaaataaatctacatctctttctttgaaacagttttttttttgtttctaatacttggattaattaggaaaaggagatatgttattcatattctaaatttaaatatgaatgactaaatatatttatgtactcaattcattaaaaaatatactatatgcaaaagaaatcaatatctttaatgtgctatataaaaacatgtgaaatatagcaacgcttttttatatttagaaaacaatcgacctaactaaattttcattttggagacgaggcaatttaagtacgagataaagtgtacaagtttattatttcgctgttaggtagtgatgattattttttactcaaattcaccgatacaactcttactctccccaacattcaactacaataaccaactcttttccctatataagcaaacctttggtcaatcataactcaaatatctctactacataatatctcaaaaataacaaacccataccttgacagggtccgatgagtgagaccactaaggacgatggctctagccaaaaaaaatcagtgcgtaaggaaaaaagagcgtatgttttaaggaaatggacccagttcgatgttgggagagcttcgactgttggaaccgtgcatctgttgtgtctattggctccttttaactacaaatgggaagcattccggttcggtataattctcgccatactgacaaacctctgcattacattctcgtaccataggaacttgactcaccggagctttaagctaccgaaatggcttgaatatccattcgcttattctgctcttttggcacttcaggtaaatactgttaattttaaccgaaaataaagatgaaactaattaaatcctccattccaatatgtatcctcaactatctttgaattgtttctcttttcttttcttttcttttcagggtgatccattggattgggtgagcatacatagattccatcaccagttcacagattctgaccgtgatccacatagccctatagaaggattctggttcagtcatgttttgtggatatttgacaccgattatatcagagaaaaggtaacaaaactttttacatatctccacaaacccaacattttgtgaatcgatattaatttatttgagattataatagaagatctgttgtaattaaccaaaggcggatgttgtaataattgtaacagtgtggaagacgtaacaacgtgatggacttgaagcaacaatggttctataggtttctaaaaaagacgttggttctccacatcttagcattttggaccctcatctacttatggggtggtctaccttacctaacttggactgtggtaaactctcaatttactttttactattactttgtttatatcaaatggaaatcggattatacatgatcaattttatactactttttgaatgtacgtagcgaaatatcacgatttttcactattgaagaaaatttcattaattgataaattaaaacgttttgtgatttacactgctgctaacaaaaacttatttaattttcattttcaattatttcattattcctctatttcactacgttggaaaacagggttttggaggagtaattggttaccatgggacttggctcgtaaattcggcatgccatatttgtggttcgcaagcgtggcaaaccaatgacacctcacgtaacgtttggtattttatataccctctctattctttatagaccaataaaccttgatcgaaatagataaaccttaaccgaaactaaaattgagtgaatgtggaatggagcaggtggctagcgctattgactatgggagagagctggcacaacaaccaccatgcctttgagacgtcggctaggcacggactagaatggtatcagttagacataacttggtacctcatttggttcttccaggctctcggtttagccaccaatgtcaaattacctaccgatgctcagaaacgcaagatggctatccgtcgttaatctcaactctaattcgatctatttcgttacttatatgtactcatcattcactcttttgctatttatgtaaaactgttaagaataatctgttctcatgaacttgtaaaccagttgatccaacacctttattttattaggacattgcatgctgtacggacaaagcaaacgatacaacaaattatcttgaaagagtaacgaaccttgtgccagaaagagttcagaagatgtagtccggtaactccagaggaaactctacgactttgacttcgaattgactcccttttggatctctcaaactaagaaaaaataatcataaggtcaagattccagtttagtttcaaaactacaagacatgtggtctaagattcttcacatcatcatataccttccaggtacaaaggtgaaagagccatcaatggatccagcagttgtcggaaaactggaacaactctcatacacaaactcttcctccccggcttgtaagagcgggtactacaaatataacaaaacagagttcatatcacaaaacggaaaacgactgttggtccttcaacaaacaaattgttgttatcttgaactaaaagcaaaactacacctttcctatgacagcttctccattaacattatctatcacttcattatcagctcggataacccaatgtctccaatacagttggcaagagctatgatgtgtcccattcaagatgcatccttctggcatgagagacatccggattgaatatgcataccagtatgccggtggctgatcccgaaggttcgatatttccgggataaaaacagacgaagcacgtacctgcattattcatgaacaagcttttcaacccacaatccacaaacctgaatatcaataaaactgaataacacattgctttacctgcacaccattagttacggagacagaacacaagggaggaatctccgggaacaaactgatactcttgacattgttctgttgacggacatttatagtgccggtttgtaaccgccggccatgttcttccaaccaaagcagcatggcatcctgttgctgatcgccgttggtatcatgaaccgatctaaccaaagcatcgggtacacaaggaagcaattggcggttacttgtcccagtaaaaagctgtccggttgtgcagtctaataaaaatattttcagactggcaactacggatgcagccataacaataaggtctaatctactcgagaaaccgaggtcgcgcatgaaactttcctttgtctccctcatcacttccttaagaggtagcaagtagacattaacgtcatgagaataagcggaatagccacctataagccccaaagagccatcaagcccattgggggaagaaagctcttgaccatcaacgaaacggtagagaagccttgtgggcaaaggaagtttcactttgagagaagtctcgaattcttgaagatcatcttctgtgacacctttcctcagtgttgcctttgcttcagggaagtttaaggtcaaccattgtttgaggttgtcccaacaaagtctaactcttttaaccagattccaaggatacattctaaatgactccctccacaattgatatgctctctgatgaattaagagaaaaatctttactttaaggtagtctcaaattcaggtcaaattctaaggcgctaaacaatcaaaaccctagaaaatgtgaaaagaagaaaagagtgaaattgaccttgaaggaaggagcaggatctccatggggatcgagaggagtagagatattaagatcattggagcagaagatagaccagagagattcctcggaggcggagaccttaaggcgtttactgacacaagccactctcgcggtgttttcagggccgattttggataagacgatgtggagaaccaaatctccagcatcctctagacccatagctttcgtcgtctcagacaacaacccttgttcgctttctttctctcggttgcttttgtcggctctgtttcagttcagttctttggattgtttcaatcaagaactgaaagaaacaaagcatttttgattacacgtggcacttgatattacagtgagttaatacaaaattcgagggtacacattaaagaagaaacttggggcacatagggaccgtaccataatggcgcaaaaaaaaaaaaaagggaccgaaccacaaaaaaatcattttgagtatgaccatgaaaagttgataactgctaggagacatcatcatctgtacagaggaaccattcttgtttattttttttgctaagctttgaaattgtcctttgctgttcttataataacccagagcttctgcttcatctgctcttcttatcgaatactacctatcccaagttgcatttgtttatgtgatcttttaaatcatattaacaacaacagtttgaatatagacatagctaacaatcatttcttttaggaattgatcactaattatcttagttgttgttgattcagctggtacgtgattcattcttgataacataatacgaggggatggtgtggaaaacaactgtacatgtggttccaaaaccaataaaataaaaaggaatatgaagaagagaacatttgataataacgaatgatatggtggttccacacgaacggaaagtcaaaaggggtttattaataatttatttcaacacgagaataagtgaatgtgatgatgatgatggtataacgataatcaaatgcccaaaataattaaaatcctacgaataatgaagagcttctgacttggtacacatactcaaattctcttacaaccgaaaaccaaaataatttaaaaagcaaaagcgctgactccaccctggctctctaaaccaattacatcccatatataatcaaacgtcctttggtgatcaatcatatatataactctcatatctcaaaaataacaaacgcattccttgacgacggtccaatgggggacaaaaataaggacgatagctctagccaaagcaaagcagtgcgtaaggaaaaaagagcgttccttttcaggaaatggacccgggttgatgtaatgagagtttcggctgttggggctgtgcatctattgtgtctattggctccgtttaactacacatgggaagctttccggtttgctgctatggtcggtatatcgactaatctcagcattacattttcataccataggaacttgactcaccgaagctttaagcttcctaaatggcttgaatatccattcgcttactctgcccttttcgcgcttcaggtaaatatatattgttttcaccgaaaataccactataaccaatatgtatcctcaattatctttgtatttttttctcccagggtcatccaatagattgggtgagtacacataggttccatcaccagttcacagattcggaccgtgacccacatagtcctatcgaaggattttggttcagtcacgtcttttggatattcgacaccagttacatcagagaaaaggtaacaaaatgtttaaagcctttacaaacccaacatatgtgaatcgaagttatcatgagattttaatattagaagatctgtgagtaactaaagacgaactatgtacgatgttgtaataatgtaacagtgtggaggacgtgacaacgtgatggacttgaagcaacaatggttctataggtttcttcaaaacacaattggtctccacatcttaacattttggatcctcgtctatttatggggtggtctaccttacctaacttggagcgtggtaaatactctattttattaatgtgtaattaaattttcgtatcaaataaaaactggattatatgtgatgagtaaccttttgttcgttttgaaataaaaattccgtgatgctacaacaaaaaatgaattcccgattattttctaccattcacgtcattcataagaaataaatgaaaaacagttctgctatatatgtacacatgctaaaaatataataaaaataaaacatcattaatctttgtaaaactattttcgaagcattttatgttatcttgcaaaaaaaaattcaactgttttttgctctttcatttcatccaacatactagctatatatcacatatatgatattttcttggcaacagggtgttggaggagcaatcggttaccatgcgacttggctcataaactcggcatgccatatttggggttcgcgagcatggaacactaaggacacctctcgtaacatttggtacttaatttatagacctttaaaccttaaccgaatctgataaagcttcatcaaaattagtattaagtgaatgtggaatggtgcaggtggctagggccattcacgatgggagagagctggcacaacaaccaccatgcctttgaggcgtcggctaggcacgggctggaatggtatcaggtagacttaacgtggtacctcatttggttcttccaggttctcggtttagccacagatgtcaaattgcctaccgatgctcagaagcgaaaaatgtctttagctcgttagtcacaagctctatatctatgaatctatctatttcgttaattatatgtgtaatcatcactcgctcatcatttgttattttatataaaactatcaagaatgatatgttctcaagaacttgtatccagttgatgtaacaccatctaagtatatttcatgttgtatgaacagtgaaaaccgatataatacatgatcttgaaacagtaacggaaccttgtgccagaaaacttcaaaagatgtaattcggtaacttcagagaaaactcttgtgactttgatttcaaagctactcccttcaaaagatccaaaaacaaataataacaaaattcgagggttcatcaaagtagaaacttgggtacttaggaccgtttgatcaaaaggaaaaaaaaaatcatttcgagtatgaccatgaaaactactaggagacgtaacgtcacggtcaaaactcaaaacaccttattacagattaaaccaggatcgcatcatcactgtacagaggaaccattcttattatattttagctaagctttgaaattgtcctttgctcttcttataatacccagagcttctgcttcatctgctgtctctggaatacctaaagctcgacggatatctgtgttctcagtgcggagaaacgggttacaagctttctccatcttcatcgtcgttggaatctgagatttcccagacacgaaattaatcaagaaaatctagaatccgagtccagaagtcataatttcaattactttggatatatattatcaatagcgacagaagaaacatcaatgacagtgaagttactgaaatgaaagaaagattaccgttggtaatttcttgtcacggagttctgcaacgtaggctgcataagactggagcacttcgtttgttggttctatagacaatgcaaacttggaattactctgccagattgaaaatgattccatcagaagcgataacacatgtgtggtatttgtatattaaaaacacacaataaagataacaaaccagtgtatattcatggccacagtatacgcttgtgtcatctggcaacgcaattatcctctgtagagaagctagcatctgcagcaaaagatgcagattgttgaaaaccaattaaaacaactgacacttaataaagtcaagttcagagagaaccaaagattagataaatgatgtttacctgctctggagtaccttcgaagagtttaccacatgataagctaaacaaggtgtccccggtgaaaattgctcgtgcccctggaaagtagaaactaatatggcctacaacagaaaatgggacattaaaatggggacaaggcttaagcatatactgtgcatagtttatgtttgaggaaccgaaaccagcaaatcttcaatagttattgagagaagttaagaacctaatcaactaatcacagggccaagggaaatacagagttcttacttcttagagcatcaaagaatattatgacaaaagcaacacttattagaatagaaacttatttctgtgaatctttcaaaatatacaaattcttgaggctcaaaatgttatttaatactacagaccagtaaactatacaggtctcacaagtaggatatatttctatatttcaagcagtctgagaagaaatcccccaacacattacatactcctcgagttataaacaattctgaattctcaaagcattatgtagaaaaaatgaatgacataaaaatatggattggataactaaactttgaactagtctgaaccagaagtatataaactaaacactgaaaggaataaactatccatttaagatggcaagtattcaacctctggtgtggccaggagtttccataatatggacttcatggccagcaaacatccatttgtcagcatctttcaaggctacatcaattccaggaatccggtccctatctgcagctgagccgatcacctaagtacatccaccaatatagtgtgcaattaataattacaacaaaagtctttgaagcatctccacacaatatggacagagagagagagagaagtaagatccgcctacctttgcaccatacctgtcttttaattccaaattgccaccagtgtgatcataatggtgatgtgtatttaatatataagttagatttcgactattcttctggagggcatccataacaggtacagcttcagaagggtcaaccacaccaactgtaccggtatcctcatcatgtaagatataagcatagttgtccgtaagacatggcacctgaaaagaagaattgttatccgcaagactgctaaacaagcttgttgacttgatatttaagacacaaataaatgtgcagctgaggaaacggttcaagtaatcactagtttacaagttgttgtttgttgcaaagacagaaaaaccatttacaagatgaagccattattttaggacaacaaaagaaataaaaaggaaggaaaagcaaacacacaaaccagttcaatttgcaatgaggaagagacattggagacactgcagaatcttgaaatgcgaacggatttaccagcatcacgcaaagtcctaagaggtgaagagaacagcttcatgacaccagagacaagaccctttctgacgtgaagctgtctcacgcaaggcctcacacatggctgactaactagcttctgataaacatatagataagagcagagactaatcaaagatatgaacaacaatattgaaaaatattcatacaagaaaagtcacagccaagactcatacaagaaaagtctcagagaagctttgagtagaagctagtgtgattttaaaaaaaaaaaagaaaaagtgtacaaccagatttctcaattcataatttcaccataaacagagaaagttcattaactgaaaaaaaatccagtcgtaaagaagtaagtaacttgtataaatccaataagctataacgcatcgaattaaaatagagatttaagaagaaacaatcaagagtatctaatttttcgaacagaggagtgaaccctaaaaaattggtgagtaatcggacaatgagattggaggaaatgattcagcacgaattaaggaaatacaaaccctagaacatctaaagaatgatgctgcagaagaaactttggagatggcttgcatctttctctctcgattgcccaattctgtccaattttgttatagagagagagagagttctacacaaatctctgtgaactgacaacagaaactgacccaagtgaccaagtcagtcacactactactaaaccgaaaccaaaccaaaccaaaccaaataatcagggaggcgtggtctaatgattattaagtaaaccgtatgatagataaatacataaaccgatatttgaaataggttaatagtgtagtttataaattcatcctatatataatcttttcttagaaatttatgtaagaaaatatagtttatgagttcacacattcacgtatttttaaaaattataaattagaaaacaagttttgacttttaaatatacaatttaggattttacacatgcatgtgtatttttcctaggactttccaattcggtaatacatatacgtacgcggcacgcagaagtacacatccggtgtaggcaggcgcgttcgcattatcttaatttgctagtctgttcataattcgtaacatttagtttattagtattttgtgcctttgacccgaaacgtgacttttacttctcaatcattgtagtataattaattttaattacatctcaataattatataacaattaacaaccctatgttgaaatacacaggagaagagtatttttttttttctttaatgttaaaagaagaaaactatctgattggaaagtaaacaataacatagactatctgatgaaccaagcttaaaccggaattctgatctggtcttttgcggttataatctgccttttagtggtgtacggccgagaaccgaccgagtcgtacgtgtagtaacttgtttgatcagtttcattgttcaaatgtcatcattagtcccaagtaaagtcaagcctcgatagtttcttcaattcttgtcaaaccattattagccacccccaacataccttgtatatatacaagttatagagccacttatatatataggagatacaaaattttcaaacccatgcaaaaatgactttttcaaaaaaagattgtagcaaactagttatcatcatccattgcaaaattgtaatgggtgacaggatgagagtcataattatgtaagcatatcacaaattaaatctaactatactcctgtcccaattagctagtgatgaacgtagccgtcacactagctagagtaaattccatatataaaatcgaacatgcactaaaccaatctagaccgggttatgcaatttctttgttttgggtatattagatggagacacgtgctatttgttcgggacacgaagaggcctttgtctaaatgcgatcgcaaagtggaaaccgtgttatagtgactcgtttgatcaattcctacgcttgttttatcaaatatttgaaagccatttgtttttgtagtaaagtcaaagtcaaagatatatatacatacatatacaagctagtgaggatgatcccaaagtcaagccatgaggtgttgaccaataactctacatatatatatatatatatatatatatagacttaaaatgaaaccccatgcaaacaaaaaaaggcctacactctacaaccaattttacgtgccaatacacacagaaaaacaagtcagattatttttttctttgaggaagatattgcaagagtacgatcgaggaagatgaagagacaagtaatgatctttgttatgttagttgccttttttgttgtattcttggacgtcaagcaagttgaagcaatgaggccgttcccaacagctgccgatgagatccggttcgtgttccaagcactgcaaaggggtccagtcagcgggtcaggtccaaatggttgcaccaacattccccgtggtacacctaggtgccatggttgagtactgaccgggcacttgattcttcttcttgaaacgcaaccagagattcttggattctttattattgtgatatatgtaaatttgtttctactagaaatcatagccgaaaacaatattaaccttttatactttacaccgcaatgtaaatttgacaaattaaaaaaagatggtgtacccacatatatgttttttcgtcagtaattaataaccattatattatcataattaacctgggttaatacgagtgtgtcatgaaatttgtttaattaataaccacaaaattaccatagcttggtgtatgagtgtatcatataaaatgaattataatcgacgtcatgtgactcatgttccaatcaaaactcgaactattagaaaatttctctccaaaagagtgtgtcatgaaatttgtttacttagccagtaataaccacaaaattaccatagtatgtcatgaaatttggtaattatatgatactcgacgtcatgtcccaatcaaaactcgaactataagagaatttctctacaaaatagagttagttgtgtctacactatagatcacaaccattaaatttctttaatttacgatcacaatcatatttctgcgatcgtagaatactttctttttgaaaaagcttcttcaagaaaagtaagatcagacaattataacttaagaaagattttagttttgtttaccaatatacaatttcacaaactgcagtcttaaactcttaatactgccatcttgaccggcattataatctggacttgcattcataaattagcagaaagattcttaaaataaaaaatataaaccaaaaagttacatgtttaaagttcataaaacaaaaaagaatagctaatctcatcaactagttttggcaaatttaccaagttaatgaatacatacatttgctttcacatgtgctacaactgcgtcaaaatagaaccaatacacaaaacaatattgtgtttattacattaggcttgaaaaaatttaaagaatgtaaacccagactcacgtgaccgctcacgggcgacaagtgccagaacctcctgggatgtttgtgcaaccgttcggacctgaccctataacctggcccctttgcagcaactggaacacgaatcggatctcactgtcggcttgaagcggcctagcggcttcgacttgtgtggtgttcaagaaaatcacgaatagtccgagcaaaatcactccaagtattaattgtttcttcatttctttctcttttttgtatgtattcaaagtgaacaaaagaaacaatctttttttctgtttgtcgcgtaaaagttgttgtatgtcttttactcgttgtttgtgttgtatcacatttggttcgataatgacttatatatatagggcttatgatcatggttttgatttgatcgttaaattggtatctttgtgtgattttggtcttactaagacattcttgtggcttgacttttactaggaaagacttggttttcaacatttgaacccaaactataggaattgatcaaagaagttaagacacatgacacggttattgccttggaccgcaatgtatatacattacaaagaaacctgaaaaaggtgataaagtgataaactaaattatatttacgtttgtaaaacagattcccgtccagtttcagaccaaaagtctactaaatctatgaactcattattaggacttaatttatttatcttgattaacgttaggttttgaagatttagttttgtactttcggtgagtctggtatatgatagttgttgtaacaagatagtagccagttaaatcgaagcattggggtcgattcaaaaaacgtattccaatactaggtacaattcaattattgactctcataagttgtttttttgcaatatttatgacgcaattcatattcgaatttgggaggtgaggatgacacgataacaccaaaaaaccggaaccactaagcataagctaaggaacttggaaatggtcaaatgtctcaaaaagggaaataatttttaaaaaaaatcaattggcaagtttgattcagtctttaactcttaaaagtctcaacgaaatagaaactgaagacataacactggttggtacttgagcatgtgtgtatatacattattaacactaaaacttcacagaaattcttgctaaactcattgtgacaaataaagacataatttaatatttcaagccatttttttttttgcttaaattaaatttattgacttgtgtggcgcgggtaacataaatttgactttttttttgccgtcgatgcttccggtgaacagagccagagctcttttaacaatcctgagccaagccaaaacactaaaccatactcagcaagttcacgccaaggtcataatccatggattcgaagatgaagttgttctcggatccagtctcactaacgcttatatccaatcgaatcgtctcgatttcgctacttcttctttcaatcgaatcccttgttggaagaggaatcgccattcgtggaacacgattctctctggttactccaaatccaagacttgttgttatagtgacgtcttgcttctttacaatcgcatgagaaggcattgtgatggcgttgatagtttcaatttggtatttgcgatcaaagcttgtgttggtttagggcttttagaaaatgggattctgattcatggcttggctatgaagaatgggttggataaggatgattacgttgctccgtcgttggttgagatgtatgcacaattaggtactatggaaagtgcgcagaaagtgttcgacgaaattcctgtcagaaactcagttctttggggagttctgatgaaaggatatttgaaatactcgaaagacccagaagtgtttcgtttgttttgtctcatgagagatactggtttagccctcgatgcgcttaccttgatatgtttggtaaaggcttgtggaaatgtttttgctggtaaagtagggaagtgtgtgcatggagtatccattagaaggagctttatagatcagagtgattacttacaagcctccattatagatatgtatgtgaaatgtagattgttggacaatgctcgaaaactatttgaaacaagtgttgataggaatgtggtaatgtggactacgctgatttctgggtttgcaaagtgtgagagagctgttgaagcatttgatctgttcaggcagatgctacgagaatcgatacttccaaatcaatgtactttggcggccattcttgtttcttgctcgagcttgggatctctgaggcacgggaaaagtgttcatggctacatgataaggaatgggattgaaatggatgctgtaaattttacatcgttcatcgatatgtatgctagatgcggaaatatacagatggctcggacggtttttgatatgatgccagagagaaatgtgatatcttggagctcgatgatcaatgcttttgggataaatggtctgttcgaggaagctctggattgttttcataaaatgaagtcacaaaacgtagttcccaattctgtgacatttgtttcgcttttgtcggcctgtagccattccggaaacgtcaaagaaggatggaagcaatttgaatcgatgacaagagactatggggtagtgccggaggaagaacattacgcgtgtatggtggatttgctaggtcgagctggtgagattggagaagctaagtctttcattgacaacatgcctgtgaaaccaatggccagtgcttggggagctcttctgagtgcttgtagaatccataaagaagtcgacttagcaggagaaatcgcagagaagctcttatccatggaacccgagaaatcaagtgtctacgttttgctttctaacatatacgctgatgctgggatgtgggagatggtgaattgtgtgagacggaaaatggggatcaaaggatatagaaaacatgtgggacaatctgctactgaagtcggctagaacattttgctatggatttctgcatcatggttttgacagatgatggaaatatgaagcaccatgacagaaagatgatggaaattactgtgaaatagttatttggaaaactttctaaatccaaggtttcaactctctgcgatgaagatgagagattggattggattggtacgagactacgagctggttgttgctgaagtcaaaagtcactgtcataagatgcgttgatattcttagaacaattgaagaggtttatctctctctctgttacaaggatcttagcttagccaaagctagttgcgcggtgtatttttcacgtgattaagcttgcaatttgaaatgttgttaatatatttggttggtatttggatatcaatagagaatctgcaaagacagcagtaattttgggaaggtgacttggggatcaaagtcttctcatggtacatattgtagacatctttacattttctggcttcaaaacattttgtaagatttcagtattaacaatttgtttctcgaaaagatctcagccttttagaaccttacttgtattaaaatcttgaataatgctgcaaattgcgaggatgcagtttgatctatctctttcctactttcatgtaaacaaagctttcaattatctaagaaagttttggtaagtcttaatatacattctcagtttcctgcacatatccagctaatcccatctgatcatatatctcatcaagcagcaagcaaacctcatctgaagctgagtgagacttatcagctgcagcaaacagatggtctcgtttatctatccgaatcgaacttgtcccaggacatatcttttctatacccaactctctcatccttcccctaatctctgcaacatctctccacctgttttgttctgcatacatgctaactaaaaggaaataatacccactattcatcggctccaaaaccatcagtttgttaaacgctatttcagctatcacgagattcttgtgaattctgcacccatcaagcaaggccccccagataaccgcatttggttcaaattccatatttccaatcaattcaagagcctcatagatcaacccagctttgctgaatagatgaaccatgcctccgtaatgttcaacattagagacaatggaatagtcatcaatcatgctgcgatatatcctccgaccttcgtcaacaagacctgcgtgagtacacgcagtaaaaacactcacaaaagtgactgcgttaggtttcaccgactccatctccatcttggcaaacattttcagtgcttcttgtgcaaaaccatgagccgccagtccttcaatgatcgaattccaacaaaatagattctttttgggcaaattgaagaacaccagaagcgcccgctctaagctaccacatttggaatacatatctaccagtgcagaaccaatgtagacatcaagaacaaaaccgttctgtaacgtgtacatatgaacctccttacctatttccagcacgccgagatgggcacaagctgaaataacagttgacatagtaacctcatcaggaatgatgccctcctccatcattttgtagaacactgcaattgcttctctatatcttttattctgcgagtaacccttgatcatagtggtccatgagattatgtccttcacaggcatctgattaaacaatgactctgcttgttccagattgcctaatcccatatatccattaatcaaacagttcgacgtagcctcattcttctccgacatttggttagctaaagaattcgcagagtccatatccaaaacccgacgataagcagaaaccattgtggtccaagcaatatcatctctttcaggcatttcatcaaacactttcctggcttccctgattctaccagtggctgaataaaaatcaataagagtcgtctgaattttaacatggaaaccaaatccaaatttccagatgtgcgcctggagtgattccccaaacctagaagcgaaagaagacgcctttactagtgaagagtacgtgtagcttgatggagaaaccgagtccctgagcatacgaacatacaattccagagatcgaatcgggtgagaacaagtaacgaagcctttaaacaacgcgttgtagacgaaaacattaggttcctgcatctgggtcatggtggaaactgcgaggtcaagacgtttaaaggaagtgcaggcagtgatgaattggttcattaagcgacagtcttggtttaggctcgtcttgatcatggcggctaaagcagactccagaagcttgggcgtcgagcattgcttgatgattttctttaaatttggaggagccagagagagtgacgctgagaaatctcgaagatggtgagaaggtacccgaagactatgcacattggcgaaagcattcatgtaaagaatttgagattgtcgataaagatgcagactttgaaaaaaaaattgttttgtccaaaagaatcttttaggtatagagaaactctgaaaggactagagggtttcaggttcaccagacaataatactgaatgttgctatattgtggcattaatcaatctgagaagtgttcatgataacaattccaaacaaaaatggcacacctttagactttttatacctattccaagataatagtatcacacacacacaaacactataaacatacacagcgttttcttctctgttctcatcatgcttttcaatccttgtagttgttgatacatgaagccgagtctgcatgatgtgacgggtttcgttgttgctacctgtttgtagccttgggttgaaatatttgcacaagagaccacaggatgtccatcctgtgcattactttgttgttttgtccctgtcaattcataaagagtatccagttattagatgtgatataacaacaatacaatgattaaggaccttgtggaaatttcatgatgctgtaatgttaaagcgattatattgtttgttttccattcggatttaaaactaaaataacgttgtttagttccatgttaaaaaatggatgactattcagatcatgtaaactgtaaagttgtttagccaagtgttggagtctattccatgctgtgtgtgaccttagagtggagaacagttctcaattattcccaaataacgtacctccactacaaaacatatccatgttttctcgccttgtttctcagtggtgcctctgaggatgatgagttccaagctccttatcacgttcgctatctcgagaaagtggctacattcttcgcatagcatctgttcaacatccaaaacacactcaagcaaggaattgcatataaccgcaaaattcaggatgataaatgcagagttcgccagtcgttctgacaaagtgcttcaaatacatgaaaaaggtaacgagaaaataatgcacacctcaataagcatcactccttctttgtccagattctccaccatgattgagcacacttgcagatggcctccaatctccactgcccagctcgaaccttgttcagtgcttgatattcctagggtgccggtatccttgtgttgcatctgtaacttcaaatgtataagcttttaagaaaacttccccaacaatttgataaatgatctattaatcagtcatgaataaacggaaacgtctcttcacaaactatggagaatataaagcaactttccttgggaagactagaaattattaagtacctttgaacttgcacttttagtgagcttgtcagcatgctgagagacactctgcaggaagagcatgtgcttgatcgtgcactctagcaaggaatcaatactgcactgtacaatataacaacatagttagaaaatagcagaagaaaatatacaattcatgacactacaactgcatgagtgcagtcagtcacatgctctgaatagaaaaaccaccttagatccattaggcacaagctcccttagttctttgatacgatcctgaataagttgcctgtcccttggacgaggccgagaactttcaccaggtttagctctctttttgttcttcttgggaatttccagggacgtcggaaactggtcgctggatgaactgagacatgttgatgaaaacccaatggaagaaaatgctccgcagatatttgatggattctgttggataagcccatctgctagaggcggctggctaatcacactatcaactgtgctaacaatattttgcttattatgaccaaaaggttctgcctgtgccatttcagcagttgtaagcaatgactgtgttgacctgcttgaagatatttcacgcctgacattaccatcaccattactcatactagcaacaacggcatctagaagattctcggagctggattcaaatgtcaggtgactatggctcatatcatttgttcgtcttatagctgcagcagattcaaactttgctagctccccataatcagtgcttgttttactgaacgctggccctaatgcctctaacagctcactgccagaaaaagaacacaaagatgcagttaaagcatccaactgacttgactcacttttttcctcctgcctatgttctgtatctttcacaaatatacttccttggctctcagatggttggaaaacctcatttcgacgagaataatctttatctgttttcaacgcagtaagtacagttgaatcaagttgtggatatgatgaacctgcttttagcctatcactctccatagctaaagcagatgtgcctccactattacgcacatgattcctcgagtagtgttggaaattgggatctaattctcttgagtatcggtatccacctgtttcctcatcataaatcaccttactcatatcacttatatccacttgattcttgtgtttagtatcaaccacaccaactgaaaaaccacttgtaacacaatcattgcttccaaacatggaaggttggactgcttcaagcccaccaattacttgagcagtcctctccatgtgaaaatatgttggagtgaaattgtatggaaggtcgttacttctattacttgtgttttgagatacaatatttaacccttccatatccatagctttgtcaaattctcctgagaaatcaggggatgcctcatgtaagcatttggaaggtatttttggctgcaggaaaattatacaacgaatcatggttatactcagaaatcacatctcttccaattttgcacgaacattgaatgagaaagatcattacccgatccgatggactgttaatatcacattgcattaaatttgatgcatggtctgctagtggatccgtaagtgccaaaaataaatgcctgatatgagtcaccaaagccgggtcttcttcaacctgttccaccaaaagtatacaggaagatcagaggcattcaaatgtttacattttcaatgggaaagctctcttactatattgtataagctactttgaacaccgcatacagttagaacatcttacttactttacacaaagagccaagctgcacaactccgcaagaaccaacagctactataagaattgtctgcagagaatgaagaaacaaattgtcataaaaactgaaatgcaaacgttgagggaaaaaaaacttcaatgttttgttacaaggactagaaaaagagacaaatgtgtggaagtagaaaatatctaatctaattataaatatgaagaaacattcaaccacaagaatatcccatgcgatagataacaatacacaaaagacatgaaaaccagggcaggcaaagaaaagaaaaaaaactgaaaacttatcagataccttaattccagcagaaatttgactctcccaaccgttgtgaacctaaggggaaaatattatatttcagacaaaatgttcccacgaaattatattttcaaattcaacaacgtgcatatttcccaacctgaagtgtcgaatgagagtcattcaaatattcagagaagatccattgatgttgtccagagattgctacttgtcctacaatcctataatagtagagagatacgaatgaagatgttagcatcattaagtaaaattcaatcatcaaaacgaattaatagctgatgttcctgatagaagattcaatattaagtatatcatgtagtcaataccaatgaaacaaaagttaaaagagcagagaatattatagctacattaatgtaagactgtaatacacagtcaagctataaacacaccaagtctttgcattgtttgacaacatcaataaaagatctcaaagtaatgaagatagcaagagtattaacaagaacagtgcatcagcaagcaaattttccttacccttccccaagagagtgtacatgatatgacatcttagccacagctaacccaagagggtcatgagcatggcgccctccatgcaagctttccggcatcaaaccgcgctcatgattaacacagtacacatcctccaaagtaagaaccctgcaagtgtttttaatagcccatatgtgaaaaacttctacttgacttctaggcttaatacttaaaaaccacacttgacattcaacaaaattgactacgtattgactataactctcaaagcaacaaaatcgatcttatcagagtccttactaaattccaccaaacagaaccaacatattggcataagattataaacttttggataacttacattggcgagtggtgattaagtttccagaacacggcgtagttccaatccgtgttggagcagatgctcctcagtatctgttgcaaggtataacccatctaaaccttccccttcaccactaaaaaacacccctttttaaaacttaaaatagtcccccgacaagaactctcccttgaattcttaatcagtctctgtgtctgaaaataaacagtcttgccacctaaaaggaaaccctttttgcctacagatgagctacgaatctactaactacctctgtatgaacctctaccagcttgttcccttcgcaatccagctctcggatttattggtggccctacttctcccagtgaatactgcctagtgcccattcctttcccaaacataaacaacccctagctcgaagaagaagaaattgagatcgaagaagaagaaaacagaaacagagtctagcttatttcatgagacattgatcctttctcgagagatgatacgctctgaatctgcatctacaaccgaaaaatctctctcaaagttagaatctttgtcgagaaatccaccggtgaaagagagatgaacactttgagtaagaacaacaagtgactagagagagagaaagaaacgcagagttgctaaaaagacatctcctttttaaaggggggcgttgaagaaaattcagggctcattttagcaacggtggtaatattatcagagctatcgtgcgctggctaggtgcgcattttagcaaccctaggcctagggtagtagtgtggggggtggattttaaggcatgggattaataatgtggaaaaaacattcgagtgatatgatctctctaatggccagcaaaatgattcaccaagtgaaattttgttcctagtgcactttattttacttttcttcatcatacaaattacacgatgtgtagtacttgtaattctttcgccatacaaataacttttttctttgaaatggtgtttgatagaacataataataatgcgtctatatgttgatgtgatccttatttttgatatgatctgttatgtgtatcgtttgttctccagccattttttttttttttgtgggcaaagaaggatttggaatgtgtgatgggattgtggtccatacaaaatctatggaatctaatgattatttccagttgaaagataaatcatactatctccaaacaaattccttttgattttctcctcttttacttatcaagtttcaaacatgtgtatggtcaagcttctgaaaatataaccctaaaataagtagatcttttttcttcaagttcataagtatttgttacaagaaaaaaaaatcaatatttgttagaaacaaaaagagagaagtaggtgaaagaaggctttgtttgggaagagggaggtgtgattgtgataaggggcgaatgatgaacattggccaaacaaacaaaacaagtgtatcaagaaagaagcctcacctttcgctttcaatttcacacttctttgtttgacctttgggacttgagcacattccattttccttttcgttctttcttttgttctttctatatgtataataacacacaattttttgcgtagatatactgtcaagaggataagagggaaggagaaaaaggaaaccgaaagttgtatgacttttactattcaacaatatcatttctcttttggcatgtttttgtggacgaagcccaagttcaagaatacatttaacggtctccctgtaggaaagaagaaaaatagatcataacaacttcttttggtcaacaatattatctcataattgaagtgagaataaaacaagaaaaactttgaagagtgaatatttatcgtcgtttgttaaatggatatgtgcattcagagtttgaagaaaaacatgaaaaagtttaaagagtgaacaccacagacacaacaaccaaaaccgacaaataaagaaagcttgttgaactggaaagcagcggcaataggatatggctctggagtcttgttatgactggcaatcggacaagttattgcttcttacaaaccggtgtgtgttctttaagttgtttcgtctttgagatgaagctt

SEQ ID NO: 1110 - DNA, 48872 bp, Arabidopsis thaliana
aaaaacatgaaaaagtttaaagagtgaacaccacagacacaacaaccaaaaccgacaaataaagaaagcttgttgaactggaaagcagcggcaataggatatggctctggagtcttgttatgactggcaatcggacaagttattgcttcttacaaaccggtgtgtgttctttaagttgtttcgtctttgagatgaagcttttatgtttggtttatgaaaatatgtataagtatttttgttcctggtccatagttggttatctcatgaaagcattgaataggtcgccaatgaacacacacaaggtttggtttttctagctactactctgttcttatatcaaaaaatttcgcgaggtaactctgttttttttaacacgtgattataagtttaatttcattatcatcaaaaagaaaaaaaaaaaaacgtatatgaaatccgtagagcataaaaaaataatttgaaagtgtaatttaaaaaatcgttaaaaaaaaatgagtattaaagctattgagaaaacaaatttaactcgtgaaatatctaacgatcaaatggaataggttaaatgacgaaatccaaaattagatcccgttaatttttatatcgtttgataaatttttcctaaaagtaacttaaatgctatatttacatgagaaaataaattgaacttaagaaatcgttaacaatcaaatgacgtgattcaaagtccggttagttttcatatttttttgtaattttagtctaaaacaaaacgaaacaaaccaaaaaaaaaaaaaatgctaaatttacataatgattagaaaacaaattgaacttatagaatctctaacaattaaataactaggtcaaatgaagggatccaaagtccggttagtttgcatatcgttttgcaaatctaatataaaacaaaacaaaattaaaatgtttacataacaattagaaaataaattgaacttgtgcgatcaaatgattaggtcaaatgacgggatccaaagtccggttagttttcacattgttttgtaaatctagtttaaaacaaaactatactaaactaaaatgataaatttacataacgatagaaaacaaattaaacttataaaattgctaacgatcaaatgactatgtcaaatgacgggatctaaagtctcgttagttttcatatcgttttgtaaatctagtataaaacaaacaaaaagaaaacctaacaattagaaaacaaattgaacttgtgaaatcgctaacgatcaaatgacgggacccaaagtccggttagttttcatatcattttgtaaatgtaggctaaaacaaaaaaaaaaactaaaaacctaaaaaaactaaaatgctaaatttacataacgactagaaaacaaattgaacttgtgaaatcgctaatgatcaatgactaagtcaagtgacgggatccaaagtctggttagttttcatatcattttgtaaatgtagtctaaaacaaaaaaaaaaaaactaaaaacctaaaaaaactaaaatgctaaatttacataacgactagaaaacaaattgaacttgtgaaatcgctaatgatcaatgactaagtcaagtgacgggatccaaaatccggttaattttcatatcgttttgtaaatgtagtctaaaaaaaaaaaaaaaaaaaaacctaaaaacctaaaaaaaactaaaatgctaaatttacataacgactagaaaacaaattaaagttgtgaaatcgctaacgttcaatgactaagtcaagtgacgggatctaaagtccggttagttttcatatcgttttgtaaatctagtctaaaacaaaaccaaaaaaaaaaaaagtaaaaatttagaaacgcaatttggatttttaaagggaaaggaaattcacctgaaatcgtactgaaatcgatgtaatgcgagactcttttccttatctgatacctctccaagtcgtcttctctcagtcatctcacaaatcttcactgtagtcctttgttctctatgctgaaccaaattccaaaacaggcagtgtatgacatcatccaaaatagccgttgtgtgacatcatcacaaataatctccaagaattacctggccaataatcttcatgggcttgatgggttgaaaatttcctctgttttttgttgggccttgtaggaccctagggtttggatgacttggcggtggcgtcgttgacatggcgatgagagagagactgcaaccgtgtgacaccacaaactaaccgccacgacgccggagaaaagattccacatggatcgtcatcgaatgaacccagacaaactaatttgggcgaacaacgaattgacactcacttgttcatgagattcgtaacgatcattcagcatcatccaaaatagccgttgtatggcatcatcctaaataaccttcgacgaagaagcgagaatgagattcataacggctcttcgacataacttgctcaagaaggaactcaagttttttaaagaagaagaagaaatagcactttagggttttgctcttcggaggttgagaactttgatccgtaagaagagaatcagagattagtatagtatctataaggaacgttatcaccgacaaaaaggaaatttaactttgaaaaaggaaatttatttttaaaagaaaacaaaaaggaaattctgaggacgcaaaaaaaaaaaaggaaatcaaatcactcaaaaaaaatggaaatcacaaaacacatgttgacagtcacgtgattacaggttcgcaaatcacagtaacgtcatccaaaacaaatgcaattggtatactttaaacgaagttcgcaaatccgaacttatgttaagttacttgataacattttccgtgtagaataagaagcccaacactataactcatttaaagattagttcataagtttatgttggaaaataaattgggccagtataagcccaatataattatccacttatctacggcccacggaaatcctagaatctatctatttgaagctcattcgtttttattttttttattgctccttcaacttgttttttttccaagatcacatcttttatccacaaataattatttctaggaactgaataaattaattattttctagtaactaatttaaattatttatttttaataaatcgttaatatttccataatcatttaattaaatataaatttcatgaaaatctcgtaattttgcgattgataattttaggacgaattaactttattttctcttgtttgacaaaaaaaaactttattttctcttcatttttgttttttgtatacgtttatgttatattatggcgtgtcattccatctttaaatagccacaatattgttaatttaaagtgttttgctagataaactcgctattatcatacctcattatattaaaaccttattgatcatttgttaatactacgtttagttacgtaaatttgaagcgtaagtgcatatattagttaaccgtttattctttattatgttaagaccagatagatagatatcaagtagctggaatattttggatgcaccttcctaataaccatccctaaattatttgtcactggcgtctaacgatgaacggagacagttgaagagagacaatattgttattatcaatatatatctgttaaatttcgttatgtcagtttcagtacatatatatgtggctattttatataatacatatctttgttaatgcatactttccactcatatacgaaggggcaaataaaagaagaaacaagctttcaatttttatcgtgtgtggcgacttaatcatgcccaaataattagacacgtgcttaaattgaagatgcatgcactttcttgctttccaatgacggataaaagtccagcatgttgagaagattctatattttgtccataaataaacttatttgtctgctgtgtcaagtttctatttgatactctatctggtaagaaattaaatacgtttttttagcgtagaaagtcgatggctcaaaataaaatagcagtactttttattttatactgctaaatcagttacgtatataagaaaaatacatttgaaagtgtagattttggaacatatagaaagatgcatgctctcctaagtttgttgagattaattaaagtgttgctggttttagaaagatcaactttttccaatccaaaataaaataaaactaaaacagattcggtaaaaaaagaaagaaagtaattcatcgaagccaaaagatgtcaatatgtagactccaaaaaaaaaactaatattttacattaattatttgaaatatccatcaatcgttttccctttagcaagttgagccattattatataatactataccaactactagagttgctggaatttactaatttcccaaacaaaatatttactctttttattattcataatgagtgggggcattgaatagcatgcatgtctgagttttcttggtcgcgcggaagaaataaaaaagtttttgacctacaatttttgtactaccaaacaactgggcttacctttgaccctagcaaactaggaggcttgaacaaatagtgaaattccaaagattaaaaacaaataaaaagataagagtgtgcatgcacccgtctctcttgcgctacaggttattattgtattctcaagttgcacgatacaagccaattatgtttcaatggtccaccactaataggctcatcccactaaattagattttttaaaatcagaatctttatataaccactttattagtttggtatatcctcttaaacttttgctaattatcttcctaaatgtttctattttttatacatacgtatcacatagatttagtccctaaaatgtcttattgatcctgaaataattgaattcgaatatgcattctcgcaaatttgatgtaattcacccatcgtctatgaaccaaaaatctagaccagttacgatatataaaaaaactgcatgttaaattcaaaccttagttgtattaaaaaagtatctaatctcataacatttgctggtaacttttgaggatgagtttacgggaaattgtttttgaagcggagaaatattaacgttattatgaaattactctcatagttcaatattaatatatggttcacgaagtcacatgtgtagatgaaaagaaaatcttcaatgatcatgaaaagagagtttcgtatgtggccaaaaatgttttctttatctgttaaagtgggcagtctcgagatcccgttacgagcttctgttcgggttattctattgctccacccccatgtcacatgtgtatcagaaaaaggacagtcaaaataatttggttgtcgaagaaaatgattaaatcgtctattctcttttgtaatcatcaatagaaacccgttttagcaaaaacaataaataaataaaaacactttttgtaatagaatcttgaccactgtaaatattgtatgttaaaataattataaaacaaaatttgtgagcatagatccaacaaattatacgatttttttgtgtggcaatagtatgacattgtataaaggggtatgcacttggacattttagagtcaaaatcaaccaaaaaccatcttcagtgtgttattctattatttttttactttaaaatagattaatgtttgttttcgaaatatgcatgtcgatcatttagtttttcatatatgactgactatatgatcactagttcatgtctaaagaagcaattactcactaagccatataagatggctaaattatcgttaacacgagattaatcatccttgttagtatgtttatatatgttacaacactgtcgctgaaacgtccaaagaatccaaagtgaattgtcgccgagtggtccaatgattttgtacgcttcgaattcgaaccttctcatctactgtcaatatatcgtagcttcaagttgcagccaagcgaccccacatcggtctaatcaattttatatggggtatggtcatttatataatgaacgtataagtacttctactgtgtaaattatcatgcaattacagtactattttctgtaagaaaaataaattttttgatatttggttaggctagggacgatagcatatatactaaattaaatggttaaatttgaactcgtgacttcttttacaactgaaaccgacgttaggtttgactattttatttacagtcttttttcttcttctttaaattgcaatgtttttaacaaaactaaagcagtactaattcataagtgataatgcatggagagtacatgtgtggacaccaaatgataaagagacaagtcgtatcaagtgttgaaaatacttttctactagcaattatagtgaaacagaagctttggccttctattcattctatacgtgttgtagaactagcgcattctccaattatagaggcggcggcaacgacgaaatctcagccaattcaacttcttaatcttgtaagaaaaaaaaacatcaagtcaatttcatgaagcgattactattatgtcgcagtcaatctttatataccgataagacgactaccatctaacaacaaatttgaccaaaagtttccttatttcgttaatatgtcattagtttgtgattgctctaggtattatagaatgaatgctaattaagtgacatatcttgatggttagttatttctattatatatccttcattaaatggtttatcaggttgtcattacatttttatggcacaccgtgaaaaaatagtaggaacatgagaaaacataataattaaaaactagtatataagttaaaaacttgaatgtgaagacgttgaagaaaacatgggttgtttttggcttctataatcgcatcgcatgtttgacccatttagccgcatatttctaatcattattgttagttaacctcttataatctaaacttttcaactgttgtgatggtaacatctgtttttactatacaatattcctatatgtaaactctattcaaaacaaatattgctacataaactctgttctgtcgagttgttgcttgttgagcctttagattcatttttcttcggaatctcctgtcctttggagtttgcatgcttggttggttcttcttgtggctcatgtttcttggtttcagcccgacgtcaaccgttactttgggattggttgcaggttacgatgttttgagtttcagatttagctcttaggttccttttaggcttaccttcttgtacctttatgtttacggtttgtttccctcttttgggcttaggtttctggagatattgttgtcttcctccgccttagtttctgacagagtttcgactcttgtcgttgttgtatttcaaaaatgtattataccttcgtataatataatggaatcattcagtcgaaaaaaaaaaaaaaaaaaaacgatttagccgcatgtttgacctattttgcccacatatttctaataattgttgtcactttaaaaaccttaaaaattaattttttgtgatggtaagtggtacgtttaacaactatttttactatgcagttcttatataaacgatttagctataaaagatacaatgtagcagcggtttaggattatcactctacgaatcaacgtctcattactttttcataattccgaaatttcaaaattcataaatgtgcaattgatcactatattagttgaactgatcaagaagagacgagagagtatatgaagaggccaaagtgtcgctaactggtgagctcatctattttgtcgggaatacgccgccgtacgtcatacactcaacctggtcttgtcccacgtggaacatttcacccacttctgtgtatctcatattaatagatagatcctattacgtaactttctttctttctatgaatattattattgtagcaccaattatctttttgttggccccattttccgtttttatgataaatggtgatcgcgtattcggaggcagcctaattgtcatattggacctattgaaataaaatatattaaaataataatattttgtgtaatagcccccaaattcaaatatctaatccgttctatatatttcccaaacttagtgccacttagacacaataagaaaaccgttaacaagaagaaaaaaaaaagatcgaaaatggaatatcaaactaacttcttaagtggagagttttccccggagaactcttcttcaagctcatggagctcacaagaatcattcttgtgggaagagagtttcttacatcaatcatttgaccaatccttccttttatctagccctactgataactactgtgatgacttctttgcatttgaatcatcaatcataaaagaagaaggaaaagaagccaccgtggcggccgaggaggaggagaagtcatacagaggagtgaggaaacggccgtgggggaaattcgcggccgagataagagactcaacgaggaaagggataagagtgtggcttgggacattcgacaccgcggaggcggcggctctcgcttatgatcaggcggctttcgctttgaaaggcagcctcgcagtactcaatttccccgcggatgtcgttgaagaatctctccggaagatggagaatgtgaatctcaatgatggagagtctccggtgatagccttgaagagaaaacactccatgagaaaccgtcctagaggaaagaagaaatcttcttcttcttcgacgttgacatcttctccttcttcctcctcctcctattcatcttcttcgtcttcttcttctttgtcgtcaagaagtagaaaacagagtgttgttatgacgcaagaaagtaatacaacacttgtggttcttgaggatttaggtgctgaatacttagaagagcttatgagatcatgttcttgataatctctgcttctacaatttttatgtaatttgagtgagctctgtttttttaagaaaaaatccgttgaaaagttttggaagagatgtgatggccgtgtatagatgtcaactatttgcgttactgttggaaacatgtatagatgtgtagttctttatcttggtgcttaattttaatatttatttttgccataattctacaaaaccgatccgagaactttaacttaatctactaaaatttctcttaaacttcaattatccgagaaaaaatagtcaaaagaaacctatgtcaaataattaaatgtaaagatactttaaaagttcttacgatgaagtcaaaattagaaacaaagtttgaaatagtcatttactttataaaaatttttaaggacgcaagctcttcgcccatattttcttggttattgaatgagttaaaatttaattttcgaaagtattgaaaacgtatatttgagaaaaaaatatgattttgtgagctaagtttgttaccgtctgcagcatctcaatgaactatgagtcgacgtgcagaatttataatttgaaaactgttattttaataagtagttaaccgtacaacatattttttatatacaaataaaattgaatcatctactatctatttcaaagaaaaaaaaaaaaattgatagcaagagagtgttaaattggaggactacgtgttctacccgtctagacgtatttgttatccaccttgaatgacaaatgtaaaatgtacgatccaatcatattattttgatttttgttttattagatcagattaatatacacgtcattgctgatgttttccttgtttattttatatttattacccatccgtttatgttttttttttttgttggggcaaaacaatctgtttcagtatgtctatctaaatgttattttgataaaaataataatttaaaaagaatgtttttgatgttttctcacacgaagcaatcatttttcttattggttgggctacactaacaaaactattgggctttaccagaaaaggcccaaccaaaaactaactatgagccgaaacgcacagctctatttagctgttggtccgacgaccaagagtcaacaataagttcaacgagacatatgttaagcagttaagaacaacaacagttttagattatggaaaagatggaactctcacatataaaatcaagaaagtcaatctaagaagtttcgagggatatgattggaatatgtgattaaaccaaaacaaggaaaaagtaaaaacagaggcatagctacaagctaagaacaataatacgaaaatataactaatgtgattattaattatccatattcaaagtaataagccagctagatgaaaacgctttaatcactagagtaacagtgataaccattattcgccgaaagagcttccatgtattgtttcttcaacacttccattactctatctgctatggcacttgcataaacactagatccttcactaatctgttatatcacaattcgttagttagtctaatagtgtctgactatggattaaattgagattttatgacaaaccttggcgttgaacaagaaactgtggtgctctccgatttgtgcaccagctacatggtgaagatcaagctcaagttggtcaacgactttggatacgaacaacaaacaattgattttcttcttctgcacgatcttgatggtaacttcatcgtctatgatacgtacatcgacatcagtgaatttcgatttcctcttgagccatgagcatctcaaggcattgttcttcttattgatcaaacattgttctactacttcgctttgagccttgaagttctcatcaacaacatcatctccttctctgttcctctgtttcactctcttcttttccactagcagcttgaactcatcgatcgtccttagcaactctttgatgtaatctatcgcttctccgacgattgatgctctatcattctagagatataagaaaaaagggtttaattagtttctgaagatttcttacttgaagaagaagttagtatttaagtaagtgtaaaccttggtgggatttggaattagattctttaagtcaccaaaccggtctttgaagtgaactcttctctcgcgttctgtagggaaaattttacgctttttcgatcctctgcctttacggttaagaccatcgtcgaggttgttgttttcttcatcatacatcaagttcactccttggttagtctcagtttgatcttgatccactcccatgaaactcccattaggaggctgcagaggaaaattcagatggaagagcgggtcataggcggcgacagaggaagatgttgtcatgataatgtcttgaatgctagggtttgcgaaaggtggaagtgaggatcttggcaattgcaagagactgagtaggtcaggagtggtatgattaggacccaaattcacaaaatcttggtaaccattgtcccaatgattcgactgttgcgcatacgatggatcttggagggtttggtgcattgaactctggaattgatgatcacaattaggagtagcattaatgtgaagctgatgagcataagctgaggctgaggcaggtagagaagagtcttgtgggctgaggtggaatgcagagagatcttctagactgcagttgctgttactgttgctaccgatgaccgtgatcgtcggtggtggctcggacggagagaaactgctctcagcagtcatttctgccggagcatttggatcaaaacacccaatttcttcaaacatgcctcctcctcccatgaaaaccggtccaaagggctaagaaagatggtttcaaaatcagaaaacattgacacagttttgatttgctagattatatattgaaaactgcaacctaatcttgaacaaatctgttctaaccaacttaaaaatcgtctaagcttagatgaattcttgtaatgtatatctaatgatcaggttattaggaataaaagagtaagagaagggtatattgttaccgacttggctgatgatgattctccgaagaactttttccgaattcacgccaagaagagacttaacattaacaactctttctttttctctctctgtctctctttttgaaatgcctatacgtttgcaatttgagagtaacaaataaaaagagtggaagatgacacatttaactttttttttttgtattaataaaatacgtctgttatttatttgtggtctaacggggaacaaaagtttaatttcaacaactaacatttttttcctttcaatatattttttattttctcaaaacgctagtgtttttttttgttcgtaccgtaatattcaaaaattgaaaactaaagttttttttttatcaataacaattaatggtggtactctggactggactttggttaaagttcagattttttttatgtgtgacaatacctactttgatacatcttactgaattgaaatatttggttaccttattggtaaaagaaatagtaattttatgacctaagttacaaatttgagttctttttctttataagttgcatcttttagagatttttttttttaagttacatcctttttagaaacgagggttttggttggatcatgaaatttttgtttgtggcaagacaggccggtggttagttacagtctgtaagttccatgacgtgtctctcttcgcgtgggtcccgtcacgattctctcaggttttgccgttttggtatatgatctttaggggtatttctgtctattgattatattttctcggtaatattacgcttgatttgaatccttcgactataatagagattttcttaatttcactttcacgttcaaagattttttcgcattgtcttttggaaaaatagcagagttttttaaaaaataaataagaaacgatacattcaaaaaatattatgtgaagttgagtttttttttacatatagaggaaataaaattgatcatagtcatagacatagaaatttgtcagtggaatcttttctattaggtcaaacaagattcaacttttaacattttatctaggacttctgaattctgatatacaatgatcgatgatattataaataagataaaaaggctttatttgtattatttccttgtaaagtaaagtatttcttaatttcatgtttgttgggtcatgcaaaatatgtttccaaggcaaggtagcggattttttgtgaagaatattagctgggtcccacgtgacacaaaagctatgcggaaaagggtgtttccgtaaactcacttgaaaatttctgctaaccagttttgtccggttaagttcatgttatgtatgttacaatttgggaattgggattcagttaaaccggatcagccgaagacattattatattcgttttgtaactttttgtttagagggtgtcgagttaggttatcgagctgagctgtatataaaaacatctcaaacaaaggtgaggaggggatgcatttgcaaaatggaattaaggggtgtttcgtaatcgtgacagttacgtttttggtttctctcctatgaggcttattttgggcctcaacaagaagtaggcgttttaacacgtttcgtcatctagagccagatgagagggcctaaaccctacctgtggctggttatttattgctttaacttacccgacagatgcgactcaatttgaaatatctcttttgggcctactgatcttattgacgagaggattcatcacccttttcttcggccacttggaaagattatatagattgtatgttttctcttttcattttctatcctcgtgaagtttttatttttatttttttattcagattacgaaaatcttgagaaaaagaataagacccggtgagcgaaaggaatgtgtggcgatggcgatgcctacacagccgtgaagccgagtcatcgattataaaatgagatgtgtcgatgataacattgctagtataattcttggtgtggtccattatttgataaatttatggtatgcgtccctcatgggaagtgtgataagattaaacctagtgttcgatataaaatttcaaattttgtgtcttagccattctattgaattttaaactacggtcagattgaagcttacatatatttgatgtaaaacataaaaatatgtggctgttactcgtacacatttatggttatataaatgaatagtctcaatcacagccgtgctctgtagttgtcaggtattcgtgtggtttgaagtataacattgtcaactatttgtataaagtttctctatactattagttccatgatctagttatatatacaagtcatatcagtttacactaaaccactcgacactcattgataatcgcataccgttactacaaaactaaattcaccttcattgcttattaaaatcaaatcatcacaatagctgatagatcgtggccttagcatttcctcggtaagacttatgaaaaaattaagataactattctttgaaaaaggtaaaggaaaagaagttgggaaaactttggcctttgtgtaccaaaagtagaaaaataatttccagcttgtcattttcctacggtcccaattaattatatctctctctataaatatagtaacacacttagccatcgtacacttactagttacttccaacatttggcttcctttgctttcacgaatagaaaccttagcttcttccatttcttctttctctcctcgtttaaattagtttttgacaaggaagaaaaagatggggagaagaccatgctgtgagaagataggattgaagaaagggccatggagtgctgaagaagatcgaatcttgatcaattatattagtctccatggccatcccaattggagagctctccctaaactagccggtaaataagccattttatatttgctatttgccatatgtatatattagtaacaaaataattttgtacctagctagcatgtgtattattgttctatagtatatagtagtgtatatttgttgtgtaaagttaataatggtgtttgtgaaatgattagggctacttcggtgcggaaaaagttgcaggcttcgttggattaattatttgagaccagacatcaaacgtggcaatttcactcctcatgaagaagatactatcatcagcttacatcaactcttaggcaacaggtttctcctccttttccattttctgtttttttacttcttcctttgattatatgcgaaattttagattttttggtcctatattctttgaaaccagaaattaaacaagaatttgagaaatcactcacaaatttttctttatttttaatctttgagaagtcaaatcacaagtttttttctttcttttaaagtaagtcaatgcaatttctgtttagtccataactccatatatattacagtgaaaatgatataatgttcatttgtagatgaaggattttgggacatcaaattgtgaaaagtatcattattttggaagtttagtttgttttaactgtggagactagctagctagattacttcacaattttctctttgtatatgtgttgcttttgtcaatatgcgaaattttatatctttgtggggcagagaactgagaagattccaacccgtgattgcctttgtccattaaataatttcaattttttactttcctctaattatactttttattcactagtagacaaagataggcactgtgatcagtgtaagacatgtgcaaattcttttaaccatacgcatgaacttcaataactttccttttgttttactcgctctttgttctcataacaatgtagacgacgtattatgatgattgatgagtcattcatgtgacatttgttttgagtagatggtctgcgatagctgcaaaattgcctggacgaacagacaacgaaattaaaaatgtttggcacactcatttaaagaaaagactccaccacagtcaagatcaaaacaacaaggaagatttcgtctctactacagctgcggagatgccaacctctccgcaacaacaatctagtagtagtgccgacatttcagcaattacaacattgggaaacaacaatgacatctccaatagcaacaaagactccgcgacgtcatccgaagatgttcttgcaattatagatgagagcttttggtcagaagtggtattgatggactgtgacatttcaggaaatgagaagaatgagaaaaagatagagaattgggagggctcactagatagaaacgataagggatataaccatgacatggagttttggtttgaccatctcactagtagtagttgtataattggagaaatgtccgacatttctgagttttgatttgttttagttaaagacttatatatcttcctttgtgacccacatgaataaaagtcgtttacgtttcctatattagtcctctttctatttatcgttctattacttttggttagttaaaatacagatcaggacatatgctaaatgttcgtatcatgttatacatacatatattatgatttcttttttctctcccttttaatgtaattttaaatctatggtgatgtcttgtactgtaacttgtttagtggatggctagattaaagaaagtctatgttgttgttctaatggtagtcgcatattccctttttttctatgcacaatgaatttactatataaatcacatttaaaactcttataattcactaacagaacagtaatggctaaccgacaaaaaatatagtatttaagtagccatgtgattatgctatggtttttcgcacaaaaaaaagtgattatgctatggttttccggtcctaatagatttggagttctcaaactaatgtattaatgtgatcctcaattgctccatgcatggaagcaattgtggtttctaagcccaaaatttaaaaagaagagaagatgtgaatgctcgtcagaaattggttttgtttggccgtagcaatttcttgtagtgcgcgatcttgattttacagatactggttcttagctaataaatttaaaccgatatatcttaaaaaaaaaaaaaccattacctaagaagcaccattggtattatcgatgatccagcgatgaatccaatataagttataataaattcatcaccatcaactaaactaaactaaactaaactaaactaagccaaataatggtcctcaaccaatgagaagcacaaaatgtaaaaaacgtggttgacaagtgacaactaaaccagagagtggtgatgatttttatcaagtaccctggctaggtctggacccacattcaatcagccagccgaacccaattacatttttgataaagccttggagtaagtttccgaaccaaagaagcggtttagctactctaataccattcctgatgagcttcaacaacatgcaaacactacacctttagagtctcagagcatttgtagctgctacttgagagatttgagtgacctatattatagactcttttaagtgtccgaacaagtatcaacctgttgtgttggtaatagatttttgaaaatccatatgattgaacagtaaataatgcgtcctgaaaactgtagttgacaaggtacatcagtgtaataataataacttaaaagagaagaaggtaatcctagtaaatcaagaacatcaaagccagcattttccaaacaaacaaaatacagagaaagtaactcattttaactggtgcatactagagcaaggttcagctggaatcactaccaagcaactccactaattcggctttcttcatctttgacaacccttttagtccccgtgactttgctatgcctctaagttcgaccagcttcaattcactcaagtctttcacggcttcttcctcagcttcatcactatcttcatcagcatcatcgagagactcatcatcatctgataacacatctaaaataccatcatcctgtgataacacatcaaaagtaacatcatcatcctcctcctcttgataaaatgatgatgactctggtttcagctctgaatctggttcaagcatagttgtcacaggcccaggttctgactcattttcaggctcatgctcatgctcatacgcaggctcatgttcaggctcatcatgcaactctactgtatccttcttctgggtccaggttacactgtaacttgatgattgatcaaaagttgcctcgctagaataagctggcggtgattgagatcttggtactggcgactttcttctgaagcttgatgttggtctggtaaaggatgatgcattattatctttgttccctgaagtgacaagatttccggtgcgatcttgtttgtcaacagtatctccttgtacttctccctggctgctaaatttgctaacttgcctcttgctttgctctcccgagtgcttccttagtaacttaagaagagagtcaacagtttcactttcttttccctgccctttagaagcttcttcaatctttttttcttctttctttgctgcagcacgagctcggagctgagcttgaacctttctgaaaagctccacgatctctttctctctaggtccaggggatgaggtagcttggaatttgggggaactagacaggttgaataaaggcccatttcttgaagacaacatatcagagttttcgatatcaaaatcttctctccctccgctttgcctgttgtttccccggtaaccatgcttattaagtcttgagaaatcaggatttctcctatagccgccagaacttgctcggcacacaaaagaacttctattggggacagatttcagacgcccattcttgtgatcgagacaggaagagcaaggtaatatggcaagtgttcttcttgaaacagcagagttaaagaagcaacggctgtctgaaagtgtgtaacctgtattaccaagcaaatacacaacatagagtaagcagattgaaagatagaacattcgttattcatagaaccctagaggcaggccagtacagaagcaagttgcattacacacacgaataagcagaagtctataaaactcaagagaatcatttcatcgaacaactggtggacaacaaaccaaaagcaaaatgatttctccacacacatgccgtttccgcctacagtgacaggggcataaaacactaggtgctcggcgagaattcaaggaagaacagtaacaatattcccggaaaacaaatagagacgcacatagatagatgccttcacaattatcaaaataaaacagaaaaattatcgacaagcgagaaagagagagacatgaaaagggtacaggatagcgaagtaccagggacatagtcagaagtcaaatggaaagttcccgacatcgccatgaacagacttcaggagcagagaagagagatttaagcttcttcttgcattgccttttccttgtcgactctcgcgttttctctggcttatcttggtaacacaaaaatgttgatattgggctttatgggctttgtgaaattgccgacaaaacataaaataaaccgtgacatttcagaagcgattgccctaacgcaaaccaataatctatattcggtctaatctcggttacaactcttccaaaccgaattcagaaatcaatttcatattaatattaacggtacagtcttccccggttcggtttaaaaccatggggtggattctctatagaaatggttgtttattatagagaggatgaagctcatgaagaaccttttcctcaagtcaacactcaacagcatccgacgtattaagcttaagtaccaacgggccaacatttgccacaaacacctccaatgacaactaaattggagtttataagtgaaacatcgacacagtgaatgaaaatgtggtacaagaaaggttcttcattatgacgccttgtggcctttagccaattcatccacgtcaagttctaccgccaggattggggaatcctcgtccatggcaaattcactgataaaagcaacattttccaggatttgtttttcctcagtaataaaagaatgacagaaagataaagctgataggggacaatagaaatcttctcttacctgttgcttactggaccatgatccactgctgtcctcagacaatatatagctcttcccactatgtccgccattgaaattggaccaaatgttcgactatcatatgcttccttattaatacataccaaagtatacatagatttagtttctcttatgtaagcgctacatggataagtaattatgtaagggagaaagtaagtggtgtactttagatttcatctcttgattctcagcaacgacccagcactgatccttttcgagaacaaaaggctcatctttctcatcacttgataccatttcagatccctctaaagctgctagtcttctgactatatacttatttgtttcattcgggtccttcaagacaacagcatcccctacgaaaatgtacctagataacaaagcaagaaatcctgatgagcatcactaatgatatacacactgaacctagaaaaggctgcgagctagggtttagactgattattggatacattaaaaagctgaaaccaagaatttacattttcaatgagctcatcggagttaaatatacttgtctgttccaaccaactcaattctgtccaattcattctgtcaaagtaagaagacatatacatatacacccactacacattttatcataagcaaaacaacaagcattgttataactttttgcaaacattttaatcctcgatttcctctttctcctacactacatacaagttacaacttccaaatgcaagataagaaataaaaaataatgtaaaagcccatgactttagctaatggaaattaagtacagctcctacacaagaaaggaaacacaaataatccaacgtttatgacttcagaaagataaacatgatcccatatccccactagataactagcatacggagcaacatttcatagaacaccaagtggtaacttgtttatgtaagtggaactaaaaggactaacccttaatgccaagaaacataccttgtatcaacaactggtagcttacggacaagtagcgtgctttcatttgttcccatggttggggccatctcttttcctttgtccgagtgtaagtagcttattcttccatagaatagattcttcatgactacaccaaagagttcccggtcactgagcttctctctagtatgtttctgcaaatagagtaactcaagcatggtaactaaaaacagattttacaacgtgtttaaatttttttttttttaaaaaaaagacagattctacatgacagttttaaacaactaagtgagctgaaaaaaatggattcagaaagaaaaaaaaaagtatctgcagcagaagaaacaacaaggaccagaacaatcatgacggctttttttgagtcattggatttaatcagatcatctgaaagaaagatcttgagatcatagtcgctttttttgagtcattagatttaatcagatcatctgaaagaaagatcttgagatcatagtcacaagtgaaactaatatgatagaagtactatcacaaattcaatagcaatgatttgaccgtataacttgttttaaaataaattcaagaatcacaagctattgaagatcatgtcaaccaaactactgatcccttagcataaagtttgttcctttttcttgtttttaatttcaaagtatgcccttttattataagtggtacttacaatcattccctaactaaaagcataaagatttagtttatccaaatgcatagctcgaaagaagcaaattttcttgataaatggcgttttatggaggcaattttctaaagctacgtattcaagcaaaatcataattggatgaggggaacatatcagaaaccctagccaatttaaccattcctaaagccaatttcataaattacaaagagagaaatcagaaagttaaatttccatacaaccagataagcaaaaggtaaggaactgaaagcttaacacaagctgtgcgtcacagagtgaaagagagagagagagagagcattataagaaccttaaggctgagagtgagagagtactcgagcttgtgagccatgtatcggacataattcgtgatggaagccatcgttgaatgcttgcgacttttaatcggaagggacctcttcgccgcgtctgttatctcagcctcgtcgccgccgttgtcgaactggtggtcttttatgggttcgtcggtcataaaaatctcgtgatttccaaaattgccaaaaatagttcatatctttaggaaatattcaaattagcctcaaaactattctttagttttataattttgtcctatattaaacaaaattatcactttaacccccaccaggaagcttctgaccaaactttcgagttaggctttgtcaacatggcacgtgttcaacagtccttctcttttttttaactctcttaacatttccttccgacagatttgcttgcagattgaagctaaaataatcaaagacaaataccaaacacaacaacaaattttccagacgatttgaatttgatcatctctaataaacttcgtcgcaggtttgttcgctcctctcttctttttctagtgtactcaaggatcagcacatttgaatttatagatccaatttattgtaattgttttcttccctgatctctattcgtttagattttggttgattgatctcgattcggagtttacggttgtactgtttagtattatatagaacgatggtgactcgaaactgattcggaaatcaaattagggtttttttagggcttcgttaaattaagcaaagtctgggaaaattgtgcagagaatatggacaaattgaagatagcagaatggggagagaagctgaagactggtggagctcagatgagcagaatggtgagtgagaaagtgaaagatatgcttcaagctccaaccttggaatccaaaatggtggatgaagctactttagagactttagaggagcctaattggggaatgaacatgaggatttgtgctcagattaacaacgatgagtttaacggcactgagattgttagagctatcaagaggaagatctcaggtaagagccctgtgagccaaaggctgagccttgagcttttagaggcttgtgctatgaattgcgagaaggttttctctgaagttgcttctgagaaagttcttgatgagatggtttggttaatcaagaacggagaagctgattccgagaacagaaagcgagcttttcagcttattagagcttggggacaatcccaagatcttacttatcttcctgttttccaccagacttatatggtaaatctctctgaatcttatttgcttattatgcaaagatggaattgttcatatgcctataatctccggcttgtcttttgtttcatagagcttggaaggcgaaaatggattacacgctcgaggtgaagagaattcaatgccgggacaaagttctctggagtctcttatgcaacggcctgttccagtgcctccacctggtagctatccggttcctaatcaagaacaggctcttggggacgatgatggtcttgactataactttgggaacttatcgataaaggataagaaagaacagattgagattacacggaacagcctcgaattgctctctagcatgttgaatactgaaggaaagccaaatcacacagaggtagttgctacgttgtctgctcatctaacttttgtcattttccttaacaaatgtctatggaatatggattgagttatgagtatctcctggtttacattattgtttccttggatatatgtgcttaaagtgaaattgacaggacagtgataagtaataggtttatatatattatggttacaggacgatctaacggttagcctgatggagaaatgcaagcaatcgcagccattgattcaaatgatcatagagagtacaacagacgacgagggagtcctgttcgaggctctgcatctgaatgatgagctccaacaagttttatctagttacaagaagcctgatgaaaccgaaaagaaagcctccattgtggaacaagaatcatcaggaagcaaagatactggtccgaaaccaacagaacaagaagaacaagagcctgtaaagaaaacgggtgctgatgatgacaaaaaacattcagaagcatcaggatcctccaacaaaaccgtcaaagaagagaagcaggccgtgaaaatagaactggggctttcgagtgatgaagatgaaaaataagcagtctgtgtttgttgtcttcttccgacatggatatcagaatgttgcgaagagttgttcttgatggtttacttttaaattataacaatgtacttccattataagtgtggaacctttttagcttcgtttctcactttctgttttaaagtggtttcttagacattgttaaaccgtaggtgaatcttcacccgaaacatttatacgaggtgttttggtttgcacttagcctattgcttatgtgttgagaggtgagtatctacatctcctctggattatataaatggcttgataaaattcacctcactctccgataaactcgctcgaaatgataaaacgaagtctaacctttaatgtgtttaatgtgtttagtcttctcaagtcaaataataatcggagtcttggtctcttggacgatgctacacagggatatttcaaaagtttacccttatcaccaactagagaacccaaattaggtcttgtaccgattgtagagtatatgtctatacgatacttctcactgtctcttggacgatgcttcacagtgatattccaaaagtttacccctgtcaccaacaaagccaaataagggcttgtaccgattgaagagtatatgatacttcccactacacttgagtaaagaactgtcttcatgtaatcattataaccatcttgttatgcttactatcttcttcaaatcgcagctttcaatctaaaatgaactcctaagtgacatacgactaattttgcttcatccatcgcaaaacgcaaacatcttttaaaacttttactgaattttttctgcagtaaacatagtgaacccggtttacgttctggtttagacgtttcaattttttctaaattgggccgattgacatataattggacccgacccatcaacatatcccacatcgttacaaatagatttcaattactataatttaatcaatatataccgactaaaactctctgtccgacgtagagtcttccaatcaaaacctaaatctaaatttttcattcccttgttccggcgataacagtctcagtggcgacaaaccctattgccgagccaactcgcattttcctctagctatcgcaacgcctctcgctctctctccccaccggttcgtcttctcactccttaactttgttcagcttgttgattctaccctaggttattgctctactccaacgcttctgctcgactctcgccttgttgtttttctttagtccaacttagcataagcttctgctcgattctctcctagggttttgctctagtctaattaccttaagtttctggttgattctagctttttcatggtgttctcttggacttggtgttgagcattagaggagattactcgccaatgggttaaataaaatatgttgcagaattgctatagtaaataacccagatagatctatcaaaagcttgattttgtggtaatgcactcatttgacttttttgccgttattgtttatctgctacaaaatcctgattgctcatgggattcttttttgacaggtttacataaagatggaaagtagcttgtatgatgagtttggtaactatgttggacctgagattgagtctgacagagatagtgatgatgaagtagaagatgaagatctccaagataagcatcttgaagaaaatggttccgatggcgaacaagggcctgggggttctaatggctggattaccactatcaatgatgttgagatggagaaccaaattgttcttcctgaggataagaagtactaccctactgctgaggaggtttatggtgaggatgttgagaccttggttatggatgaagatgagcagcctcttgagcaacccattatcaaacctgttagagatattagatttgaggtgggggtcaaagatcaagcaacgtatgtgtcaacacagtttcttatcggcctcatgtctaatcctgcgcttgtgaggaatgttgctcttgtggggcatctacagcacggcaaaactgtcttcatggatatgttggtagagcagacgcatcatatgtctacttttaatgctaaaaacgagaagcatatgaaatatacagacacacgagtcgatgagcaggagagaaatatatcaatcaaggcggttccaatgtctcttgtccttgaggacagtagatccaaatcatacctgtgcaatatcatggatacccctggacatgtcaatttctctgacgaaatgactgcttctttaagacttgctgatggtgctgttctgattgttgatgctgctgaaggagtgatggtaagtctttactctctcttttttggtctgtatttttaattttttgaagtatactatttgtactgacgctaataatcttttttcaggttaacacagagagagctatacggcatgcaatccaggaccatctccctattgtagttgttatcaataaggtacttcatgcttcaacgtgtaacttaagagatactgtgtgaaattttatatttccatacatttgcttgacctttgctttttgtcaatttttttcccccaacaggttgacaggctcataactgagctcaaactacctccaagggatgcttactacaagctgaggcatacaattgaagtcattaataaccacatatctgctgcttcaacaactgctggagacttacctcttatagaccctgcagctggaaatgtatgttttgccagtggtacagccggatggtccttcacattacaatcttttgctaaaatgtatgccaagcttcatggtgtggccatggacgtggataagtttgcatctcgactttggggagatgtatattatcactctgatactagggtattcaagagaagtcctccagtaggtggtggagaaagagcatttgttcagtttattctggagcccctatacaagatatacagccaagtgataggtgaacataagaagagtgtagagaccacccttgcagaattaggagtgactctgagtaatagtgcatataagctgaacgtcagacctctacttaggttagcctgtagttcagtgtttggttcggcatcagggttcactgatatgttggtaaagcacattccttcacccagagaggctgcagctaggaaggtcgaccattcatataccggaaccaaagattcccccatttatgaatcaatggtagaatgtgatccatctggacctctcatggttaatgtgacaaagttgtaccccaaatcagatactagtgtttttgatgtgtttggaagagtttatagtggtaggcttcaaacagggcaaagcgtacgtgtactaggagaagggtattcacctgaggatgaggaggacatgactataaaagaagtgacgaagctatggatatatcaagctaggtatagaataccagtaagcagtgcccctcccggttcctgggttttaattgaaggtgtcgatgcatccatcatgaaaactgcgactctgtgtaatgcaagctatgatgaagatgtctacatattccgggctctccaatttaataccctcccagtagtcaagactgcaactgagcctttgaatcctagtgagctgcctaaaatggtggaagggcttaggaaaattagcaaaagctatccccttgcgattaccaaagttgaggagtctggggaacatactattctaggcacaggtgagttgtacttggattcaatcatgaaggacctcagggagctctattcagaggtcgaagtaaaggtatctaattgtatctctaatttggctctatgactgtgattccggtgtgcaagcaaattgctgatttggctgtttgatagctaagatccttttgctttcttaaatttgtaggttgcagatccggtggtctccttctgtgagacagtggttgaatcttcgtcgatgaagtgttttgctgagacaccaaacaaaaagaacaaaataactatggtaagagatcttctttttccactattatctcttatatattagactgcgatgtttggtatggtgctcaagcacaattactttgtgaaaaatctgatatctgtttcatgctaaagattgcagagccattggatagaggacttgcagaggacattgagaatggcgttgtaagcattgactggaacagaaaacaacttggtgacttcttcaggacgaaatatgactgggatttacttgctgcacgttccatctgggcttttggccctgacaaacaggtgaaatgcttgtattcttaaaacactgcaatctggggtttactttatctttattgttatggttggtttatgtctgttttgacaatttcattgattgttgattttcgactgatcaggggccaaacatattattggatgacacccttccaactgaggtggacaggaacttgatgatggcagtgaaagactccattgttcaagggtaatcatctttcttctgttacacttttcttttactcgattttgttggctttagctaagtggcttcgttttattcctcttgcaggttccagtggggtgctcgtgaaggtcccctctgtgatgagcccatcagaaatgtaaagttcaagattgttgatgcacggatagcaccagagccattgcatagaggatctggtcagatgattccaacagcaagacgtgttgcatattcagcttttctaatggcaactccaaggctaatggaacctgtctactatgtggaggtacataatccctttccatttttgctcgtcacattttttctcttaaaatgataactaagagttatggttttgtcgcagatacaaacaccaatcgactgtgtaactgcaatctacacagttttgtcacgtagacgtgggcatgtcacatctgatgttcctcaacccggtactccagcttatatcgtgaaggttagttttgtttgtgtcttttctccttactttgttcctgttatttgactaagtgatgattcattgagtatattctttggtgttgatgcaggcctttctgcctgtgatagagtcctttgggtttgagacagatctgaggtaccacactcagggacaagccttttgcctatctgtgtttgatcactgggccattgtgccaggagaccctctagacaaagccatccagttgcgcccacttgagcccgctcctattcagcatctagctcgggaattcatggtcaagacccgccgtagaaaggtattatgatttcctttgtttcaatgcacatcccaaaacttagtgggtttcatgcggttaaagatacgaatgaaaccataaactgatttgttactctagtgtttggttaaatgaccccagtaaaccctcacaaaccaaaggatccccgaaactactgtttacaaacccggcccttgctaattactctttaaccaagtaacaccagctataatttgctggatacatcctaggctagttatattgtatgactcgttgggtgtttggatcatcagtttcagactctcacgatatgtataatttgttggttatgcagggaatgagcgaagacgtcagcggaaataaattctttgatgaagcgatgatggtagagcttgcccagcaaacaggcgatctccatctgcagatgatttgatgatctctgcacttttttcatataaatcgtgattcaggactagtagtagtatcttctcttctctatatatgtgaaaggagaacaagaaaatgtggatcagttttgtaattgatgtgtcaaatttacgttgtaagttgagagattttaatgaactcaacagtccacatggtcacactcacacatgactcgcaaatagttgacaggaaatgttcacaaatttttgtaaaattgtaaactactattggattatgggaaactgaactaggttatgacactatcatttataagatgatctcatagtttgttgtctatatgattagtaattatacatatgatacagagaacgtacgatccagatcctatttccgcaaagagttttctgcataactaagatttgattcttcaaaaatgctaaatttaaagataaaccaggtcaatggcacaaacctatctagatataagtaagtttttcttcataatttaatttagtgcacacagacgacttattttactccaatgaaaatcggttaattcgtcaaacgtcactacttgtctcaaagatttgttgtgctttactattttcgtctatttcatgcttccataatcagctttttacgttgacgtgctctttacaaatcgaagtggacgtggcggcaaccacttatacttattatacatagaataaagctacaaaatatatagttaaggccctggtggattaatatatacatcgtttaaggttttagattggtctcctccaccttattttatgtgcattgccaactctgaaaacgtcatgccttatcttcattggttatatccatttggctccatcaaccaaacgacgataatgattttccacatatcctatatacatttgggttcggtagaattactacaatactcaaattgcttttaatttatgttttagtttatggaatatgaattgtgagttttttaaaaaataatctcccaattaaatattattagcttttaagtttctatttcaagtgaaatcagttagctatgcatgtcattcaatatagacataattttgttttcttccattcgttttacaatttttaactaacagaaattatacattacgtcacttactacgttcccactaaaaatagaggcaaatgcaatcaagtgatgacgacctttcaaaaataaatattaagagatatataagaagggactagctaggtagatatgactagattccaacttaattaacgtatttaatttctgcatagatggacgttaattaggactttagcttctctataaataccgtagctattgagcttatatatggagatcacccccttaaaatcttcaaagactatatatctcacctttaagaactaagaggaagttacatatatatggcaagtctcaagttatgggtttgtttggtcctgcttctagtactcgaattgacatcggtgcacgaatgtcgaccattggttgccgaagagagattttctggttcaagtcgtttgaaaaagataagacgtgaactttttgagaggttaaaagagatgaaggggagatcagaaggcgaagagacgatccttggaaatactcttgactcaaagcggcttagtcccggtggtcctgacccgaggcatcactgacactgaccatagaagaatgcaaaaaaaaatgtgtaatgtaacatttttgggagagttttaatatgatattacaactttttaacttataatgtaatattcttatgctgtagttaattttctgtctttccactaatgaagcatttctgtttacatgatctcgtttttatgtagttcctgcatgcatctttctttagcaaatatgttctatttaaaaaagcagcatgttatgcttattttgagagctattcccattttcactaaatatgagttcatactattcaagttaattaaaaaacaccatttagcttatttcttatatctaaaattcacaattataactaacaaataattacatagatatactatataacatatatcaacatcacttagtttgtatttgaaataatcaatctatatactaaaaaaagaaaaacattacctttataacaaaaaatgagtgaaactttaatggaatttttcaccagcagaaatatagtgaatctaaaagcattcaaaattttctgaagcaagatttttttttttcaattgcttgtcagcatcacatatttgtcagaaataatgaataaacttgacaaaaaatcttgctttagaaaatatacaaatattacaatacatatacaaaatatactaactttaaatattaatttaattagtaccagatttaagaaaaaaatcattcaaaattataaattgttttatttattttacttgagttctctctcttttttgttgttgttgattacagatgtaaatgtttatgggtagagcttctttatgatatacgcgaaattgattagtttttaggcccaaacctaaaaagcattccgggtcgggtaaacgagccaaatctaaacgctggttcttttcttctccttcttcttcctctcgctcttgcggcgccttctctctcccaaactcgcaggtaacaaagcttccttcaatttctcctttttcagatcaatcaatttccttctctggttccctttcctgacgcaagtttcctcctttggtttttgtcgatctctaagctcagacagagattcgaatgacctaattgtatcccgtcttatcgagactttacacagattcttctgggattttatcttacacagtcgttatctacttgttgcgtccaattgatttctctgaatcagaaaccctaatttcgtgggtcttgtgcagtctctaaagtttgcacactctctcagaatcgagccaaggtttcgtctagaaattagggtttcttagttttttcatggtggaggatatattttaggccgatttgagggctttccatcagttttaaacggaggaagtgacgaaaaagcatcaatcgagagcaattaaggcgtgaaattagggtttctgaagtatatgtatggcttcggagcctgttaacggaggagaaggtatcgatggagctagagagaagcaaatcatcaaagtttataagaggaaaggcaaaggtcaaagaaaacagtcatctttctttgcccttgaggctgccatcgagaaacctgaggggctattagaaaacgagaatgataacaatgatgtgagtcctgccgaaactctagctccagagtttgaggatcctatagttgtggtgaagaattctatcgaagaggctgctcttgggactaattctcatggagacaaaaacttaactgaagcgccttctgaaaacctgcctggtgatgattcagacaaagtcattgacaagcctcttgtcgaagcattttctcaagctcaaccacaggatgatgccagtttggccgctatggacaagtctgaagaagtaccttctcagatccccaaagctcaagatgatgtcaatacagtggttgttgatgaaaactctatcaaggaacctcctaaaagccttgcccaagaagatgttaccactgtgattgttgacaagaaccctatcgaagcaccttctcaaaccctatccctggaagatggtgatactcttgttgttgacaagaatcccattgaagtgtcttctgaggaagatgtccacgtgatagatgcagataatctaataaaagaagctcatcctgaaaactttgtggaaagagataccactgatgcccaacagcccgctgggcttacctctgattctgctcatgctactgctgctggaagcatgccaatggaggaggacgcagatggacgtattaggatacatgtagcctccacaacgaagcaacagaaagaggagatcaggaagaagcttgaagatcagcttaacgtagtcagaggaatggtaaagaagatagaggataaagagggcgagattggtgcatataacgattctcgtgttttgattaacactggtattaataatggaggagggaggattctgtcagggtttgcatcagctggacttcctcgtgaggtcattagagcaccaaggcctgtaaatcaactaagtatatcagtgttggagaatactcagggagtcaatgagcatgtggaaaaggagaaaagaacacccaaggcaaatcagttttatagaaattcagagtttttacttggtgacaagttaccacctgcagagagtaacaagaaatcaaaatcgagttcaaagaagcaaggaggggacgttgggcatggttttggtgcagggactaaagttttcaagaattgcagtgctctgcttgaaaggctgatgaagcataagcatggttgggtgttcaatgctccagtagacgtgaagggtctaggtttacttgattattacaccattatcgagcaccctatggatttgggaactatcaagtctgcgttaatgaagaatttgtacaagtcaccaagagaatttgcagaggatgttagacttactttccacaatgctatgacttacaacccagaaggacaagatgtccatctcatggcggttacgctattacagatctttgaggaaagatgggctgtaatagaggcagattataatcgtgaaatgagatttgtcactggttatgaaatgaaccttccaactcctacaatgaggtctagactgggtcctacaatgccaccaccacctatcaatgtgaggaatacgatagaccgggcagactggagtaatcgccaaccaactacaacacctggaagaacaccgaccagtgcaacaccttctggaaggacacctgctctgaagaagccaaaggcaaacgaaccaaataaaagagatatgacgtatgaggagaagcagaagcttagtggccatttgcagaacttgcctccagataaactagatgcaattgtacaaatcgttaacaagaggaatactgcggtgaagctacgggatgaagaaattgaagttgatattgatagtgttgatccagagaccctgtgggagttggacagatttgtaaccaactataaaaagggcttgagcaagaaaaagagaaaagctgagctagctattcaagctagagcagaagccgagaggaatagccaacaacagatggtatttgcacctctcccgataattttactcctctttttactaaaattatatgctcatctttgttgtttttttccttaattgcaggctccagcaccagcggcacatgagttttctagagagggtggcaacacaggtaattttgcctgttccttttatgaattacttccctctttatggtgagaacaacttacgaataataactcttactgcagctaaaaagacactacctacgccattaccttctcaagtggagaagcaaaacaatgagacaagcagatcaagtagttcaagcagctcttccagttccagctcgtctagtggtacatgcgtctctctgagttatctaacattatatctgatacatattgcttttgtgatttttgttatctaaacccctctgtgttgggcgtgcagattcagacagcgacagctcttcatcatctggatcagatcagacctagaggctagtgtacaagaagagggttggtgttgacaaatatgtaaggtaatctctatcatccacttttaacctaataagcatatgtgttaattgaatcatttacaacagcatctacattatctctatgttggcatggttctaatactttgtcttgttcatatcgggtctatattgttatatattctgatagttgttactttcttaaaccatatggtaccaatgtctgatggtttatggtggaaacacagggcggtgaaggtagagtagaagaggatatgggaagtgaaagaaggaaggatgatgacgtacaggcttgaggcaagagaaatagtagaggagtgggatggaatggaaggaaaaagattgtgtatcatattcatatcactgttagagtaaaaaaagaaaaatctattattcttagtttttgtttgacttaggaggattatgcgtctgtctctacttttagatgtaaccgtaggggttgggtttgatctctcactttgtatatctctctttgcctctctggtctatttagcggtttagttggttgatgactgtttcatcatttagtggttagttagggtgcttttgaatcaaagattctggattcttgaaaacttgtagtactgtatgctttgtgagtttgtgacccctttagctttgtttttcttcttgcgtccttgctcctgtttaactcattcttctatcttttgtgatcctcgattcgatctagcactgtattgttggggaaaattacacccaaggaaaagaaagtaaaatcaaacatgtaagttctttgagggatttatctgtataatcaaataatataatggggtttaagtaacacttgaaattgtttaaggtgtattttagtaaaaatgtaaagtttggtttttgatattgcaattttggcaaagattaagcaatgtgtggaagcaagtgcagtgaagcagcattcttcagtttggaggtagagaagaagaatgttgattcatcatcttcgtcctttttcaactgcttctctgtctcctcgttctctcaccatttccactgctctctcttcttcttcgacgaagcaacaacacaagctttggtctggtctcgaaaactggagaaagagtcctgtcaacgacctccgtctctggggtcctactggtcctctccttccttcttcttctgactccatctccgccgacttctacggtctcgtctcagctgcatcttctctcgctgatctcggagcactcgttctctcaacctccgatcctctctccaaatctcatatctcccatttagctttctctcgttggcgccgtgagaatctccctgttggctcaatctctcatcttccttcttctccagctcgtcctcccaaacctctcctcgtacgtgttcctcctctcttttttctctcaatctgatttgatcaaattagctaaatttgtttgtattgttgcaggttgcgaccaaccaagtcccaaatccgaaagactcaaaccttcctctcaatgctcatatgcttcataatctagctcatgttgagcttaatgctattgatttggcttgggatactgttgctcgtttctctcctttcttcgaccttttgggtcacaacttctttgatgactttgctcatgttgctgatgatgagagtcgccatttcttgtggtgttcccagagactcgctgagcttggtttcaagtctgttatatttttaaagtttcaaacttttgattactatttgtttcaggacaaccattaaactcttaccctcttcttcttcaaggtatggagatataccggctaataatttgctcatgagggaatgcgagaaaacttccaacaatgtcgctgctcgcttggcttgtatccctcttgttcaggtactgccccacttatctgatatggatgataccacaaatgagacaccagtttgttttaatagcattattcataccaatttagttatacaggaggctagaggacttgatgctggacctaggttggtcaaacggctgacaggatttggagataacaggacttcgaaaatcgtggcgaagatcgctgaggaggaagttgcacatgtagctgttggtgtagactggtttctctctgtgtgtcaaaagatgaaccgtgctccttcccctacatttaaaggcatacccaagtcttttttttcatgcttctatatctcatcttttacccgctcgttttatacaaatatcataaatatgttttcaaccatatgtgctgtgcagatctgatcaaagagtatggtgtcgagttaaggggccctttcaaccactcagctcgggaggtagctggcattccgcgagattggtaaggaatatcatcccaccaagttacactctttcaagaactggctctatatcaacatttcaagttagcgtaacagattaaatgggcttattccatatatctttaggtatgatccatcatgtggcacggaagtggataaaggcgataacgaacagggtgacaaggagcaactctctgcagtatgtttcttctttgttcatgtatcatagctatgcttcgtggaggaggcaaattcttgctgaagattatcttaatgtatgatttttgtcacatcacaacaggtttacgataggctcactcacattatctcaatggagagtgagaattcaagtcttgaaaagcctgccaaatgaaatgatgcagtcagagtcttgatttgatggcgttataactgatgaatgagtgtcaggcgtaatttcttgggctctggaagtacaaattaatgttctcatacaaaatagttgaaacctaacgttagcttatactttttctctcttagtgaggcttctgtttatggtaattttatgtttttgctccttgtgcatgactataatagtggagttgatctaggcgaccaatttatctcatggaattgctctcattcaagatactttgttgttttgttcaatgaatttcaatttgttctttgtccaagtacacaaatagtgaacttgtcactttctatttgcttgtcttgttgatcttggattgcatttttatagacgtgagattcggttcccagattctttgttcttctaaatgaatttttttttgtgtacaaacatattgtgcagaatcttatataagtttttgtaactaatctgtatttagctcttgtagttggttactagttgaggagtcgtcattgtcatcagcatcaacatcatcatcatgatctctcctgtggacatccagcttccatgtcccatcatccatttgaagcatccctttgtttgccagacacctccaggtacttggcactaagtactcgtcctttagagcatccaatcctttattgaccaacgaaatatcccggccaatctccagcttgaataccccgtctgtatcttgcatccctgccatgccgtgcaggtatatctccaggttatggtagttcctgaagttcagagaccgtttcaggtatgttgagttcaaagtattgatctctaacacctcgccaatttctgagtacagtaagagtggataatgtggtgcgacatctggaacatttactattcttagaatgtttagtggttggagtgagtcgactacgtttttgaagttatggtctccaatccgaggactcccgaaagcaaaaactgtgataggaacttgctttttttgaagatttatattgatattattctttttgccatagacaagatctgcagctgatagaactgacataactgcgcccaagctatggcctgtgaaggtgatgcttatttcttcatccttgtaaagttctagcaacctcttgagctctccttgtacctaaaaccaaaaccaagacacgatgccattaggagaaagaaggagaaatggaagtagtgttgttgacgttgtaatgggtcgccccgccacgttttgagctcaacccatttcggccttgataacttgaacctgtcactgaagtgaatgcgatgataaaagagaaaggtgaggacctgttcttgtgcactagtcgtgtcataaggtgagcgagaatcagaagcggtatagatgtcgagccagccacttccaatacgagggttatctttggggtcagttactgggaaaaccgagatagctggctcaagcggaaaatcgaaatcattagcccattcatatggctgtagagttcctctccatgcaacaacaatgtctctcctccctaacatcgcttttccctggtctgtagcaaccgcaatgtaacccatccagttagtctgcacgcgagatgcatcctttgacaaagactttacgatgaaagagattggtaactttatggaagctgttgcgtagatgtacttagtcactttgtacctgaaaatctatcatgggtaagcttacatcgtcgaatcaaagatgaaacattgtgggagtatggtacctgaaagggttggctttaaggaagccggttcgagctaacagtcggttcttggagtaataacaatcaccggcgtatctggacttacggtcccagttaaaggcatcgtaaccaacctgagacatctcgccgtagtgaatgatgtagcggcgaagatccgggtcaagtggatcaagcaggcctttccatttgttttggccacttagcaccttccatctctttggtatgccctccaccatgtttgcctttgtttttttttcacaaacctttttcttcttgttcttgatgtttggagagtaacattgctccttgtgtgaaagaattggataatgcgtgaaggaaatggtccttaatgtatggcccttcacataaatagtgccggtttaagtttattttaagtgtacgtttattacaaatttgtaggattcacatcactttttttaacggttaatcaacgcttaaaacatgtactattgttagttacatcgaaattaaattaattaaagactatttcctctatagcctgtctaattttattcggctaaaccaaaccggaaacatctatccagaaccgaagcaggggcttatacttagcgaccagcgttgttaaggtgcaattgagtacttgaccggtgagtttcaatgtattcatgttctctgctctgcctcattcttgaagattccattatctttcatcaatggtttggaacctgaaactaaatttctcaaaaagagttgtcaccatcaagtaagactggttcgctcgccagagcatgttgtctaatatctggatctttcctgcaaacagaatcagccaccccttatgaccattgtcttcattttccgacattcctctctgtagataaacctttctggcactgcttcagaatcatctgaacattcttttgcaaaatcagacagtcatgattcaggagtttttgaacatggggacttgtgacctcggaaagctcttcttctcatctgtaatggactgattagaccgcctcagagaagttaacaggttataaagatccgcatgacaaagcaagcatcatccttggttcagttttctagctgaacaatacccatggcttctttccatattcatgatttcttttcaaagcatattcatgtaataattagaaggggaggcaatggttttccataaacgaaagaggcttcagcaagcaagtcttgaaccacatctgaacaaagtttctcaacagggtttctgactgtaatgaacttgatcctaaacaaattttgcagtatcagaaaccaagagttaacaaactagaaacatcatagtacgaattacatgtgctactataaagtatgaagtacctggaagcctcaaatttctccagcacatgtttttccatagctcaagaaactgaatcttcttgggtcaaaaatttgtatttatttagaaatgacaaagaaagaaggactcaagaattgtcaacaccaaagtttacaatggaaggatcaacaatcttcagagaaagccaatcagcaccagttttacaacgagtacctttacctgcaaaatgtcaaaagaagagaaaatttcagttttcaagaccaaaaaaaaaatgacttctggagaaacaggcataacataaacacatatgtcagttgactaaaacaaactaaattatacgactctcttaaacttacgtttctgcatattgttaaggatgggacaggaggaaacttgtcccactggaactgcaacaaaacacaaaacctgtgaccaagaaagcagtacaggactgaagcttatataccagaaaccaaactcatttcccaaactccaacttttaaacaaacaaaaatgctgaatgtacttcgaaattctaacctgacccttgccgttttgatttgctttgtcttgatagcttcaaagctatgttccgtcgattcctctgtgtatgacccacacaaaaccctgaagcagcggttcgagaagtggcttaaaacccacagcaaattatatggaggaagggatgagtggatgctacggtttgggatatatcagtctaacgtccagttgattgactacatcaactccctccacttgccctttaagctaacggataatagatttgcagatatgaccaattctgagtttaaggcccattttctcgggttgaacacgtcttccttgaggttacacaagaagcagagaccagtttgtgacccagcaggcaatgtcccggacgctgtggactggaggactcaaggtgctgtgactcctatcagaaatcaaggaaaatgcggtatgaaattatgtttttacataattcattctaaacataaaaccttgcaaacattcattattcaactgatgacattctgattgcgttttgtttttcttgttgcaggaggttgctgggcattctctgcagtagcagctattgaaggcatcaacaagattaaaacagggaatttagtgtctctctcagaacaacaactcatagattgtgatgtcggcacttacaacaaaggctgtagtggcggattaatggaaacagcatttgaattcatcaaaaccaatggtggactcgccacggagaccgactacccatacacaggcatagagggtacctgcgaccaagaaaaatccaaaaataaggtagttacgatacaaggataccaaaaggtagcccaaaacgaggcgagcctacaaatcgctgcagctcaacagccagtatcagttggaatcgatgctggtgggtttatctttcagctctactcctccggtgttttcacaaattactgtggaacaaatctcaaccatggagtgactgttgttggatatggagtagaaggcgatcaaaagtactggatcgtaaagaattcatggggaactggctggggtgaagaaggctacatacggatggagcgtggtgtaagtgaagacacgggtaaatgtggtattgctatgatggcaagctatcccttgcagtgagtccatgaatctccataagcgttagaaccttttccttttggataacaatgctctctgtatgactatctgcaatagcgcagctaaaataattacgattgtaaaataaagtactagagataattgagaggcaggttatcgttaacaggattctaaagtcaagatgcgattataagagaaacatgtgttttctataatacctgcctaagcacatgaggctcgcttgaacgattggtactttctcctagaagcatcctgtttgataacttgcttcttataaaccgtaggtatggcattgggtctagtgatattgaacaaacacaaggatctcaaggtaaaagataatgctcacaacctaagatagaagctaattatgacgactgaaacaagtgacaagataaaacatccacgtaagtccacaaaaaaaatcatcatcagcttccaattataccatcacattttggccacactattacatgctcactcgacacttcaaatataggtatacagcatatagggacaaacggatcattgctataaaaaaaatatatgtttaatcagaaacaacaaaaatgttcccaagttcgggttgtgagtttcattccaggatcgtaactgcagctattcttacaaaatcttaacacttatctgagaaatacctaagacctcagttcagaaaccctttgtctaacagtacaagcaagcttccattcaccgatgttaatcagacgctcaaccactttttgcctaaccttgatatacggtatgaaccctctatcagtcattctcatcaccaccttccctgccaaaatgtattccctaacctccaggcaaccctcgactactacctcataactctcaaactccacagggtaatcccgactttctacaaactcgatcatctcaatggctttccaaatttccctgttggctctgagagctgctgctacttttgtcagcatccctttccgtggagagatcccagctttgctcaccatctctttgacaatcttcaccacatcagtagtctttctagccaaacacaatgaattaatcaccgccccataactttccacatcaggaatacagccagctgcactcatttcctcaacaactttaatcgcctcatccaacttatcaacagcacagagagaggacactaagtaattgcaggttccagtatcaggactgtatccaatcaatttcatctcattaataatatctgcaacagactgggatcctcgtcgccgttcaagccaagcatcagagagaaggagatgagtctgagggttaggtagacagccagaacgaagagtgcgttggaggattgcgaaagacaaaggaagaggatcggaactctgaaggcaataagtaagaagactggagtagacaatcttgggcagtgaacgaggtctcacaggaacaaaactttggaggatttcgtcaatgactctgattctatgatgacgttggaaagcagagagaaaagaaaacaacgttgagttttggtaaggctctttgagtgaaacaacaagttcggggattctaagatactcctttgtttcaacagcacattttatcgccttttcaaccgcttcaaaggacgagattgaccggaaaaacggaatgcagacatcaaaggaccgagaataagcaagaggttttcgcagatgcgtcaagcgaattgccatttcctattctcagagacctgatcaactataataaagtcattaacttggcatctgaaaaagcttctcctcctgtagtaaacctggaacgtaaacagaaagtaacacctggaatcattcaacgctcttaactaatgtcgatgatgttcaattaaccccttaaaaggttcttattttagtggcaaaaatatattttctgcaaaccgggagtttggggaaatcatataaagtcatacctgaatgcgtttaagacaggttcaagctaatcccaggaggaataatccggtaatgggagagtgagctgggaagaacgagattttgcttcacagaggaatatcatcgaacgactggacggcaagatgtgaagaactcaaatgaatagacgatgacttgaggtttagtaaatcggatcaaagtgagtaatacgaaacacccatgagctttgatcgaatacgtttgttcacagatttgatatgtagcagaatggtgtgattaggaaagaaggaatcttgcgttttgattctatcagcctctgttgggctttgaggttttaaaacctaaccggatatattcaaagggtttacgtttaaccggaatttggtcggttcagccacaaaaatttcagatttggacctaggaatagttaacaaattttaatcctataaaattcaggagacgtgtgaaaaaaatgtcaaatgtaaatatgtaacatgcaccaattagtaattacagaactctgtttttggtctaacaccattgatttgtccattacattatgcatacaaaaagaaaaacctaggtctacatagttcagagtgaaaaaaaaactttgatctaatcttcaaatttcatagccaattccaaattatagcgtatacttaattatgtgattttactttcgcaagatggccgtaaaatatgactgaattaccgcacaaggttttactcccgaagatacaccacgaattgcaagaaacaattaaaaattatagttacttagatataaacattataattactttttttttttttttttccgtcaaacattatagttacttagagtgggagatagtgttgtttgaaaccattattaatcactgcataacattgttgcctttgatcgtgctttagattttcccaaccaccttgcacattccttgatgcatatccaccgttgacaatctcccgattcacaccaacaccattgttgttaacactaaaccctcctgatccactcgaattcgtcatcgctaatccgttcttgttgttactattattgttaaatacgcgttgattattatcccaaccaatgagaggctggttatgaaccaagcttttgtataacttgagctcttcacaaatcctcctatactctccataggagccaaggaccggatctttctgtctccatagagcttcccatgttaaagaatcagagagcttggtacggtcctcttcacgtaccgtccgtaccattttttgtacgttactgacaccgaagaccttgtgcacggcctgaaactctttagtcttgcgggctgggaaatacggcgataagatacattcgttgttgcatttcttcctttgatgtttgcatgaagcacaagcttgatgcgacgatgagttattggagatgttactggtgatgctggtgttgttagagttcctttgcatcatgtcatgtccctagtaacggaaacttgaaattttaatacaaatataaatgttagggatcgataaggtttgaagcatcgatatatataaaatttccacacaccgtatgtatattcacaattgacaaggaaataagaaggaaacagatatataactcagagaagaacaaagttttgaacataatgtcaagaagggtcatatacaaacctcttgcctcttttattttccttcatttgtgggttaatagcaattggagatatggatttatattaataataagggatattggtagatgattattatttattatatgttatttttggaaaaaaataaagaagaatattaatggtgcacaaagagtttgtctaatgaacatgaaaagattgtttggtttgatgaaagaaaaaggtgtttggatgaagggtcgataatgatttatgagttttaggttgcccatgaaaaaggacaataacaactaggaaatcaataaacaaaacgaaattttgctttacatatttgatttttgttttttataattataatgggaaaatatgattccaagcattttggatgaaaatgtgtggaatgtaaagaataatactagtagtatgttagatattaatataatttgttggtggcttccatatttaagagtttttatgtaggcataacatggaaagaatgattacaattgcctcttcttcttcttatttttcctcttcttgcatcttagttatgtattacagtgagtaaccgagtataaaaggggaacgaagtatataatgtgtaggaagatgttttgtggagagatcttgttcatagaatttggcatatacaactagattctcgtgatatctttctattattatgtaatgcatttcccgtgttcaatacgtgatagtgatatgcaagatccatgcatggtaatatttacgtaatttttttatatataaaaagtatgacgacatataccgatgaatataaaaaatcttaaaattttaacatgtaccaacttaattaagcaatcgatgtctcggaaacttataagaaaatattgtgtggacactaggtttacaacagttgatacaatagtgcaccggtctgagagatgatcaaaaatcaaaatcacttttaatttcttggttcttttgtagttgaccggtcggttagaaattttttaaaccaaaagaaggttgacggatagatgaataataaacggctgagattgaacggcgataaggataacgaccttatcccaactaaaatcccttcgtacttccctaggagaggagtttcatggtctcgttaccaaattggttttaattagttttctcaaagggtatttatgtaatctcaccaccgttactaattttataaaattaaggaaactatcgttgaaacttcttcatcttccttaaaacaaccacaacgtcactttcttcccggataattgaaatcggtgatcggaatccctagaaatgtcggataatcgtgcactccgacgagctcatgttctcgccaatcacatactccaatcaaatcctccatcttcgaacccgtccctgtcgcgcgagttatgtttgcagtactctccaccggagctcaacgagagctatggattcgatgtcaaggagatgagaaaattacttgacggacacaacgtggtggatcgggactggatttatggactcatgatgcagagcaatctgtttaatcggaaggagagaggaggtaagattttcgtgtcgccggattacaatcagacgatggagcagcagcgtgagatcacaatgaaacggatctggtacttgcttgagaatggggttttcaaaggatggttgacggagacaggtcctgaggccgagctcaggaaattagctctgcttgaggtttgcgggatttatgatcactccgtctccatcaaagttggtgtgcatttcttcctgtggtatgttcgaaatcataatttcattgacatatatatatctctaatttacgtcaagctatgattttttttcattgtggagatgtgctctgcttggtattaatcctaatctgagattgaaaagttcaaatagaaagattaatttgtgctttggtcaatgaaatgtggttatagaattttgaagttatttagcgtcctagggagacagaaaacagtgttaggctttataagtgtttttctgtgatacccaggggtaatgctgtaaagttttttggaacaaagcgtcaccatgaaaagtggctgaagaacaccgaagattatgttgtcaagggctgttttgctatgactgagctaggccatggaagtaatgtaggcatattttcttgattgccattttttttctccatatgtcatggtgatcttccacatttatattgagttctatttatttcttttgatataggtacggggaattgaaacagtgacaacttatgacccaaaaactgaagagtttgtgataaatactccttgtgaatctgctcagaagtattggattggtggggcagctaatgtaagtagtcattgtccctatcctgagtgtacctaaatacttgtttctatttagttcaccctcctgatttgtcatatactaattttgtgatatacttttggttgttcagcatgcaacccacacaattgtgttttcacagcttcatatcaacggaaccaaccagggggtccatgcctttatcgcccaaatcagggatcaagatggcagcatatgtccaaatatccgcattgctgactgtggacacaaaattggtctaaatggtgttgacaatggccggatctggtataacacacaactccgtttacttttattttatcttatactaaggtaacttcaatggaagattgcactttgattgcaggtttgataatcttcgaattc

SEQ ID NO: 1111 - DNA, 36844 bp, Arabidopsis thaliana
gcccaaatcagggatcaagatggcagcatatgtccaaatatccgcattgctgactgtggacacaaaattggtctaaatggtgttgacaatggccggatctggtataacacacaactccgtttacttttattttatcttatactaaggtaacttcaatggaagattgcactttgattgcaggtttgataatcttcgaattccaagagagaatttgttgaatgcagttgctgatgtttcgtctgatgggaagtatgttagctcaattaaagatcctgatcaggtaaatgccaaccttggaaccaatttaaggataaaatttactatacttgccgagttgcagtgtcaatgtttataattttattttcagagatttggagcattcatggcccctttgacttctggccgagtcacaattgcatcaagtgcaatttattctgcaaaggtacagagttcagtagttttattttgatctcgtacataaatcttacgtaagatatgaacctgactgtttcaggaatcaatgtagttgattaagatttttactgtggcaggtcggattatctattgctataaggtactcattatcgagaagagccttctctgttacagctaatggtcctgaagtcctcctccttgattacccaagccatcaaaggcgactgctaccactcctagcaaagacgtaaggagctttataaacattgtagccatcaaattttgaagtgaatgcccgaaagaagtgaaagcatggcctgagacgtagtaatttgtcccaacttcttatagatgagttgttttcattgattatttctcattatcacagatatgctatgagttttgctgcaaatgaattgaagatgatttacgtgaagagaacaccggagaccaacaaagccatccacgttgtttcaagtgggttcaaagctgttctcacctggcacaatatgcacacacttcaggtgagaaccaatacattatacttattgttatgtgagaaagctcctatgagtcatactgaagtttttttttcctattatttctaaggaatgtcgagaagctgtcggagggcaaggtgtgaaaacagaaaatctagttggtcagttgaaaggtgaatttgatgtgcagactacatttgagggtgacaataatgtattgatgcagcaggtaagcggcacattattgtgatttgcatgatcaatactgtaaatttccctgttttgaccatacaattttactttaccgttggggaatttaggtgagcaaggcgcttttcgctgaatatgtatcgtgtaagaagagaaacaaacctttcaagggactgggattggagcacatgaacagtccacgtcctgtattaccgactcaactcacatcatcaaccctcagatgcagccaattccaggtcatatgcctcctcattaactattttcctacttatcatttatttagatgaattttcaactcttaaacatgttcttgtattttgtccctaacagacaaatgtgttctgcttaagagagcgagatcttctggagcaatttacttctgaagttgcacagcttcaagggagaggagaaagtcgagaattctctttcctcctggtaaagcatttttttcacctaaaatttgcttccttttctgttctccgacctttaggattcagtaatagttttcttctcctttccatccgtacttgcagagtcatcaacttgctgaagacttaggtaaagctttcacagagaaagcaatacttcaaaccattttggatgctgaggcaaaactacctactggctcagtaaaggtaggtcaaaaggattattacctgtgacgttttgaacctattcagttgaatcatggttgttttgctagctctagggatcacggatggtacttcaggcttccatgtcatatgattagccattagcgtgcagagtaattgattttaaactatagttttttgctcgatagattgtaaaaagctgtgagacaagtgggatgttttgcttctctaagcacagtaatagttcatcagctttagtcactagcaaaggagactacgcactagcagaggaaataatctaaactaactagtaacgacatccatgtatttgatgacaggatgtgttgggtcttgtaagatcaatgtacgcattgatcagcttggaagaagatccatcgttgctgcgatatggttacctatctcaggataatgttggagatgtgaggagagaagtttcaaagctctgtggagagcttagaccacacgcgcttgcactcgtcacttcattcggcattccagactccttcttgagtccaattgcattcaactgggtcgaagccaatgcttggtcttcagtttagttacctgctagtaacaatctcttccataattcccatatatctcttataaaagttatgtttccacaatatctacagaaactgttgtaagctcgtcataataaaagggtatatatgatatgtatccagggtttattctttacttaaactggtccaaacaaaaatgtttggtaataatttcaaattcttataataattgttattattatgattcttgattggtttgagttgtggataaatttttttgagtacttaatttgtaattcattcaattttcactagacatgtttatatttttaatttatattgaagtttgccagattaattaaggaaacagaaacgactacgttaggagtgaaaacaaattgaatttgtaacgtttctaacgaccaaatgactactcaaatgacaggcaaacagttttcttaacggaaaaaatacagtaaaaataagaaaaaacccgtttgagcacgtttataaaaaattgaagtgggctaattttgtcaagttgatttagctaatgaaacgggcctaactgggcctattttaatcaagtgtacaaaagctccattaccggaagattcttctgtacatatattatatatgtatgtctctgatgtaataaacatgtcacaaacatagtattttcttggactcctgaaaggaatcaaattacacaagtctcaacacgaaacaaataaataaatgaaattcaaagttgtttctctccctctcttactctggaacatcgaaattgatgctgctgtataactgaaaccctattctcggaaaatccctagaaatgtccgaaaatgttgaactccggcgagcccatattctcgctaatcacatactccgttcacctcggccttcttcaaacccctccctcacgccggaagtatgttttcagtactctccaccggagctcaacgagagctatggattcgaagtcaaggagatgagaaaactactcgacggacacaacttagaggaaagagactggctttatgggctcatgatgcagagcaatctgtttaacccgaaacagagaggaggtcagattttcgtctcgcccgattacaatcaaacaatggagcaacagcgccagatcagtatgaagcggatcttttacttgctcgaaaaaggggtctttcaaggatggctaacggagacaggtcctgaagctgagctcaagaagtttgctctctacgaagtttgcgggatttatgattactccctctccgccaaactcggtgttcacttcttgttgtggtaatgtttcaaaaatcacatctttattttctcatttttagagataagtagagagatgttgttcaaaatgaggatttggaaagttcaggggtaatgctgttaagttctttgggacaaagcgtcaccatgaaaagtggctgaaagacactgaagattatgttgtcaagggctgctttgcaatgactgagctaggccatggaactaatgtaggcatattgcagtgtcattttgcatttatccagactatatatgtattggtgatctttgatttggtggctttcaggtacggggaattgaaacagtgactacttatgacccaacaactgaagagtttgtgataaatactccttgtgaatctgctcagaagtattggatcggtgaggcagctaacgtaagtagtcactatgcttaactcccacactcatctgctatctactgacttgttgatatactttggttgttcagcatgcaaaccatgcaattgtgatttctcagcttagtatgaatgggaccaaccaggggattcatgtctttattgctcaaatcagagatcatgatggcaacacatgtcctaacgtccgcatagctgactgtggacacaaaattggtttgaatggtgttgacaatggccgtatatggtaatgcacacaacttaatgttatatagtttttatcttgtacaaagggtgtgtacttcatatggaagattgtaccatgtttataggtttgacaatcttcgaattccaagagagaatttattgaactcagttgctgatgttttagctgatgggaagtatgttagctcaattaaagatcctgatcaggtatatgctataccttggaacttggaacaaatgcttaggataaattttctcatgtttgtggcaatgtattctatttgtttcagagatttggagcattcttggcccctttgacatctggtcgtgtcacaattgcttcaagtgcaatttattctgcaaaggtacaatttttggtatttctatattcacatccttacatacatcttttatcagatatcaacttgattatctctggactaaatgttattgattaagatttttactatgacagctcggattagctgttgctattagatactcactatcgagaagagccttctcagttgcagccaatggtcctgaagttctccttcttgattatccaagccatcaaagacgacttttaccactcctagcaaagacgtaaggatctttctgaccattttgttttccctctcggaaatatatgtgctaaatccttaccattaaaataatacactcagcagcttgctgtttcctccactctgtcttatttctgtcaaagttaatgcttggctcaaataaaacagcttaacttacggagagaagtaaaaaagcattcatggcttgagtgtggggattttgggatgggttatcatttttaaccaaatcttatgtaccctagatatgctatgagttttgctgtaaatgacttgaagatgatttacgtgaagaggacacctgagaccaacaaagccatccatgtcgtttcaagtggattcaaagctgttctcacttggcacaatatgcgaacgcttcaggtgagaagcagtactttttaagcatttatgtgtgagaaaacttctatgagccatactgatgttgtcttttttcttggttctttctaaggaatgtcgtgaagctgttggaggccaaggtttgaaaacagaaaaccgagtaggtcatttaaaaggagaatatgatgtgcagactacatttgagggtgacaataatgtactcatgcagctggtaggctaaggaatataatcaaaggtgaactttctttgttttgacaatacaatttgacttatccattcttatggggaacttaggtgagcaaggcactttttgctgaatatgtatcgtgtaagaagagaaataaacctttcaaaggattgggattggagcacatgaacagtccacgtcctgtattgccgactcaactcacatcatctacactaagatgcagccagttccaggtcagaaatactttcactctcatcgtttattttagatgagcttaactttttgttgaacatctcttgtaatttgtccctgccagaaaagtgtgttttgcttaagagagcgagatcttctagaacggtttacttctgaagttgcagagcttcaagggagaggagaaagcagagagttcttattccttttggttagcatttcttctcacataacctttgtttccggtttctcatatagtaatggtttttttgcttctcctctgcatctcctccagaatcatcaactttctgaagacttaagtaaagctttcacagaaaaagcaatactgcaaaccgttttggatgctgaggccaaattgcctcctggctcagttaaggtaaatatgattactgtcaattagttgaatgatggttgtttttcttctagctaagggtcactgaagaattcagttaattagtttccacatcatgtgatttactgtggaataactgattatagtcaagaaaatgtagcaaatgtgattgaaatccagggcaacaccaggtgattgaaaatgattctataaacctgctgcatctttctttacagggctgatttgtagactctaagagtgaagactactacaggaggaactaaaccaaactaataataaccttcatgtttgcattttgatgacaggatgtgttgggtcttgtaagatcaatgtacgcattgatcagcttggaagaagatccatcgctgctaagatatggtcacctctcaagggataatgttggagatgtgaggaaagaagtttcaaagctctgtggagagcttagacctcacgcacttgcactcgtggcttcattcgggattccagacgccttcttgagtccaattgcattcaactgggtcgaagccaacgcttggtcttcactttagttacttgctagtaataatctcttccactaatcatgattccaagatttctttttgaataaaaatagctatgtaagatctaaactttgtgatgaatctcaacttttgatagttcacaacacaagatttgagactgatatattattagccacactaggtgacatagcttgctttcataatcattggaatccgaaaatgtgaactacaaatcggggtattttcgtctttttcatacgtctaacaaacttttctttagttatagctagctgctgattttgaacttttttgataaatatcagtatcacagcaccgccttctcgttcgttacactgctgacaaacaaacatctccgagagagagagagagatagaggaagaatgaagaatggaggagagaagaagataacagtggaagaatacgttgagttctgcaactctgggaattccatccatttcaccatcgcttacctcaatcaggtttttctctatccatcgattctcctttctcctgacgattctcctcctcactctctctaatcttcgactcgtataatttctctctggcagatccttcatttgcatggtttccgaaagcttcacaaattacagaaggtaacgaccacctatcatcatcatcatctcttcaaaattccttgttcaaatttgcggtatagagcttttggattaaatttttggtttgaaacttgaaaaatccgatttcatcaagagtttctgggaatttggttctcatataatttgaaatcgattgggcctgtttacagaaaattgtagaagaagccgtggactcactggatcttctagatctctctcgctcaactctgaaacaagtcactgactcctcgccgtcatcgtcatccctaactctcgacgaagtgataagcgacatcgaagctctgaaatggcaggaatgctgctttacctcactccagatcatcaattcccaggaaactactccatcagaaatctccaaaccgaaacagaaatcgaacaagagaaagaaagctactatgaagaaatctctcaacactaatttcggtgatgagaatgacaacacaatgatgatgatgctcccaacgaaaaagatgagaaacaaaaagacgacgaagaacctcaaaagcatctccacatttgtcaaagacgcttcatcagcatccaaaccactctctgccaacaatttatcatcaaggttttcttcttttccataaatctcacctttcttaattcaaactctgtgtttttcttcttctttcctttagtgttcttgagaacttttataattgattgggttggtgacttttagtcccattgctttatgaatagataactatgcatttcaaagccttgaaagcaaatacatggcttgttaacttatgattacaaactcaagttcatacatatagaaaaggaaatagttaagaatgagaaatcacatgatagaacaagcgttaggattctcatcactaaacttagaaccagtttggtggctgaagatagaggcatgaacagggtggtggcggtaagacgaatagtcattgctatcgtagccatgcttgtaataattgtaagacgaagtcgggactggtgcggcgtggttgattgggccgttgcagccctgagggttgtagaagtagccgccgttgctgctgcttccgcccatgtggtcagggttataaggaagctgccatagctcagctcgcctgccggtttttctcactttcttcagaaccttcttctgatcggcatagccagtcaccgtcactttctgctgcaccatgtcgatttcaactgcatccactcctgttgtcatcaatttagcagagattagtgatatagtcagatatgttatatatctaggtttgtgattaacacaaaatgtttaaagcaatttgcttgagagatcaaagatctttcacctctcatcttttgaagcgcatttttaactctgctttcgcatcccacacaatccatgtgaactctcatctcaatagtctgaagttggatcagattgagtgttaggttcatgaacaataaaagctaaaacagtaacacatgcaagcaaacattgatgaattagaaagatttaacaaaactaatttttcttaccgtcatcttgaacttttgttgatgcttttaagatgtacgtcgtagtcagataaaaaaaaaatgaagttttcgatgaatattgattgatcaatgaatggcattggcatatgccatatacatagtgttccttgctcttcaagcttacgaacccattttcttgatttaaaataataagttttctacgttaattgaaacacatttaataatgtggggaccatataagaaataagaaattatttttgcaccgactttttatttgtaagtgatgatgagttgggaagaggttgcttgagatgggcatccacaacggaaacttactgtagtttcagtatttttatttcgcggcattgcttatagcttcaaatttcaatataattgaatttatcacattccaaagtttcaaaggaaccaataaccaaccaattatgcttagattgcaaaggagaattgaggtttttcgtgaggtaattttatttgcgaggggtgtttgatcgttgagtggtcttattggaacctcataagttttaaatgttgatggtgaacaatattttagcctgcaatctaaggaaatgaaaatgatcgttgacttttattggtcgtgaattaagaatgagagtgtagagtagacttatggaatccattgaatgtaaacttaggagcaaagcatggacgaatgatatttagtgctcagcgagcgaaactgacggatcttgtccatattagccgaccaattattgttcataatcaaactaactagtgcttaatcataccattgttatatctttggtttaaaggggttcaagttctggttatatatgtggccttgcgttttggtgagtgtgcaagtgatagaactggccttgcgttttggtgaagcccaaatctattgtggcctccatgtatatattcattaataaagccttaaatctataagccttttatcttgcaaaaaagaaacagtatattacggcgataacttctgataagatttgttaattcactcctcaaacaattatcccttatttaagtcacccaaaaaaaaaaaaaaaattatccattatattccttggcagtcacgctacttatttaagcaagaaaaaaaaaaacagagcaacaatgtctctgaaaaccaaaccctagaatttgaaagagcaataataaacagagcacgataagaaacatggaacgagttaaaaaggaataacgatgataaaaaccctaatttaagaaacttattactgcctgacccaggatccgttaacccattcgtgatgctttctcagagagtaaagcgggtactcgagctcctcgtcggtcgtcgaaaagtaaacagagtagatgtttcttctcacagcggtgacctctccgacccaccacccgtctttgtcgaaagcatcgaccttatctccgcagcgaatcaatacgtggagagatttgggaggcatcggacgtagttcgtcggctgagatgacttcgactaaccgtttagattgatccgtgtccgacacaagattcttgtacttaatcttgtagtaagatccctcgggagtctttgatacaaccgtggcaccgaagtaagaccctaagaaaccgtcttctttgctgcagacttcaacttgatctcctttcacgaactccattgttaaggattttagtatgattcaaacgttatcttgtgattaggtttttttcttgtaaagagacgaagagaaggaattggtgtatttataaaagctttgtttcctttttttgtttcgccttttacttctttttaatcttttccttttttttgttagcactgtttgttctctctctttttcctttttctttatttaatgggaactaggattagccaatgaggacccttgttaaatattagtcgtctgatttaacattttcgggatatttttacacgaaattcaaattttagcttaggattgaggggaattgtaatatgtagtaacgaaaaaaactaaattgttatcccctgcgaagttaattattatggtttatggtttcggtgatcaaaagacaatgtgttatggtttcgcatcagatcaccattaaattgatgttattaccagtaccctaatggacctactaatgtctggtgacaatacttatatttaacattttctggtagcatggcgacgacatgcatggtggtaggccattctcattaacatatcttaccaacttaaactaacactgttatatcaaacttaaattaacatgtgtactcgaacatatataatatcatactacgtacgacatatagatgttgttaaaatgctaaccacgttaaagaagttggaggaggacaccaacctaacaatgtcatccacacaagatctggtgtcatcacactaattaatacttccgcttctgctttgacggcgtagattacaaatcaattgaaaatagaaatacatatatattaaaatttatgatttgtcttaagatgttttttaagtgtacacatgttttctttttaatatcgaaaataaagttgatatatatacaaaacggagcatatcacatatatgatatatatctcaaatctgcggatatatattcgcgttttgtgtctacccctacttacactaagtattacccatctactaacatacacattgatgaaaaacatatagtgtttaatcatggatgaacaaaaatgaacttgcaaatgcactggtctttttctttttggtcactttttatatttttaagaatcctgttataatagacacgtacgtacacagataaataatttcaattgccaaactctgacgattcatcgaatttcacagatatgtatatataattgggtagattaataattaatgtatgataaagaaaaatattgtaccacgttagacggcacacaaagacgatcgatctcgatgaaagggaaaaaagggatcacgtgactaatatataattagcattaatgaagaaaaaattagaagacataagccagagaaaaacatatacttataatgggaaacaatcataatttcgaatccgaaaagaaaatgaaaaacaactgtagtgtctcatttatttagtgcataaatagcttcttcttttttgtgttgttggtaagaagtgcataaatagcttcttaattaacgaataataatacagatttcagaataaacattaacgaacgagagccatcttttgtttctggagttccgagggcaatttcacatcagtggctataccgagaacctcaaatagtcgaatgaggtaccaagttatgtctatctgccaccactccaatccttgcctcgccgatgactcaaacgcgtgatggttgttgtgccaactttctcccatcgtaaacaaacttaaccacctgaatatgttcacaagatcgtcaaatccctttttcctaagactaatttgaatatatatatatataggttcttatatagtattatattaccaaacgttacgagatgtgtctttagtattccacgaccttgaaccccaaatatggcatgccgagtttacgagccatgtcacgtgatacccgataaaaattccaacgccctgtcataaaatatattgattttcatttggatacgtataaataatttggtgtgatattgaaaaatatatagtaataattaaatcctaaaacaaattaccccgccgcatgtaaggtaaggtaaaccaccatagagatagaggatggtccaaaacattaagatgtgaacagcaatagtccttcgtagaaacttataaaaccattgcttcttcaagtccaatacgttgtcacgtcctccacactgttgcattactttgtattattgcaacaacgtcataaaacatataatataagaaaatgagagatatctatacgttacattaccttgtatttgatgtattgggtgtcaaatatccacaagatatggctgaacaataatccttctttagggctatgtgggtcgcggtccgaatctgtgaactggtgatggaacctatgtatgctcacccaatccattggatcaccctgaaaatatattttttcttctctaatcatatacttgggaaaaagaaagaaaagcatttgacatggtggtaacacttagttagattctcaaaacgctggtgttaacctgaagagcgaaaacagcagaataagcccaaggatattcgagccattttggtatcttgaagctacggtgagacaagttcctatggaatgagaatgtgatgctgagtgtagtcaacgcgaagagcaccaaaccgaaccgtaaagcttcccatttgaagttaaacggcgccaagagacacaaaaagtgcacaatcacaacgactgacgctcttacgacatcgaccaacggccattgtctctgaaaatacgccctcttttgcatagtactcaccactctgcttcggctggagccatcgtctctagtgggatcacacatatcgacgaattgtatttgtttgagttataagttgtatgaacataagagactgggtatatatgggctgatactgtggcatcaaagtccgcgtcgttaaatgcaattcaccactctccataaatgctctgtctacctcttccattttttttaatctttaatataccggcaatagcacatgttttcacaaattcaaacaagtttttcttgtagcctctgatagtcccaacggccaacgccatttcttttgcaaaatttcgtaaaaatattaacgaattaaatgcgaagctaatccaagaatcaatattaaccttaggtgacgactttacgttctatccgtctcatgcgatgcttatataagctactagattttctaaatctctttaatatatagcatcctgcagggatcctataataataggccaatatataagtttttcttttgttttgttgttaacgtttttttttctttggtgagatgttttgttgttaatgtgaagcttgcttctaatatacttttttctgataaattctaatatagttataagttacttggtttgaagtaattggaactgtctattggagtttatttttgttggaaattactagtaactacatacataacgtagtgtagttgaaagttgatcttagtaaatgtgttatgtgtacgtagtgtagtaaaactgacatgtaaataacatttgcaattttgtagaggctgaaaatcccaacatttttattcattgtttatgagaataatctgttgagacaaattaattattgccgtaaattgaattaagaagtaaataaaactcatgcatctacgattgagttcaatttacggcaatatttattttgtctcaacagattattctattttcatgaatatttctattttcatgaatatggaaatgtttgtaaatgtgtacgtagtgtagttgaaagttgatgttagtaaatgtgtacgtacctagtggagtaaaacagacatgtaaataacatttacaattttcgtttttttttaaaaatatataagtttgttactaagttctatcgatagttctcttatttctaccattttaggatatatagctttcaaaagaaaagaaaataatacctaataatattaaggagctattttggtaagatatgcatagtaaaaaatgacgcttctcaatgtcaaatagtacgaatcttgctattaattagagttgttctataaagagatattaccgaacaattgcaaggcaccgcaatagaacaatgggcaggtaataatgtcactaagaccattattattgatagttttttaggttagtttttagataaagtaggtcttaaatttaatgttataattcaattaattgttaagaatggctcttatataagagccaaatctaatgtttcttaggttaattcttagataaattaggtattaaatgtaatgttttaattcaattaatcttaattcttagataaattaagtattaaatataattgtttgtcatatttgttttaaattttatgtcatgtatgtttcaaattttatgagttgtaataattattaagttttttaaaattataatgtttctaatttttttttaagaatttaagttaagagtccaccattccatattgtcaaaatttcaatcttttatctaaattcttaacttcaaaattttcaaaatcaattataaaaatattcataagaactatattaagattatgctaagaaactaccattaatgatgctctaacatctttattaaaaaaaaaatgttactaacaactttatgaaaacgtataatattaattaatatatatatatatatatgtatatatatatatatgtgtgtgggatgggttgttcgatagtttattacaaattcatacgactttatgtaccccaaattaagacgatcgatctccacgaatgagagacaggaatcacgtgacctacggctacgtgagacagcacccacacgcattttaattctataaaagatcttatgaatatatctccttcataactgaactttttgtattgttttcttttcgatcttaaaaattcttgttcttatttaacattaatgaaactacatatatatattgagcgtaattaataatgcaaatattcatttgaaaacaacattatataatgatcatacaatatcttacttcaacttaagccttttattaaaaaaaaaatagataccttttttgccgcatttaaatcctactccaaagacagaaaacaacaatttatagtggaaaatatcaataagactataacaatcataaactctcatctatattatcctcttttatagtaactttgataactttttaaaaatataaaattctgataaatctctcatgcagatgatcaacgagtcagagccagtttctgtttctggatttccgagggcaatttcacgtcagtggctaacccgagaacctcaaatagtcgaataagataccaagttatgtctatctgccaccactccaatccttgcctcgccgatgactcaaaggcgtggtgattattgtgccaactctctcccattgtaaataagcttagccaccttcaatatacattcacaattcaagatcgatactaagacgtttttatatatagattaatatgcatggggcgtcgtcttaatattaagattaccaaacgttacgagatgtgtctttagtcttccatgatctcgaaccccaaatatggcatgccgagttcacgagccatgtcacgtggtacccaatcacacctccaacgccctgttataacatatatcatgttacatatggatacatacaaattattttgtgtgtatacatatagtttataggaagaaataaatttaccccgccgcatgtaaggtaaggtaaaccaccatagagatagaggacagtccaaaacattaagacgtggaaaccaattgtcattcgtagaaaccaatagaaccattgctgcttcaagtccatcacgttgttacgtcctccacactgttacatgcatattattacaacatcgtatatataggttatatacaagaagacaacatttcttcgctacattaccttatatttgatataacgagtgtcacatatccaccacacatgactgaaccaaaatccttcgatagggctatgtgggtcacggtcagaatctgtgaactggtgatggaacctatgtatgctcacccaatccaacggatcaccctgaaaataatatatcgtctaatcatactctaaaacgaacaggaattgacatatatgtaatacatagttatcaatattaatcggtattaacctgaagagcaaaaacagcaaaataagctaaaggatattcaagccatttcggaagcttaaagctccggtgagccaagttcctatggtatgagaatgtgatgctgagtgaagtcaatgcgtagagcacgaaaccgaaccgtaatgcttcccatttgtagttaaatggtgccaagagacacaaaaagtgcacattgataacggttaacgctcgtattatatcggcccacgaccattctctatgaatatacggccttttttccttactcacggcgcctcttttgttagagccatcttctctaatgggatcacacatcgaccgttgaggggttgtttttctttgagttatgatttgtatgaacattttaacactgaacaacgtatgagtatatatgggctattgttgttgcgtacgtacgtcgacgtgtccaagtagttaaatgcaattgaccactcatcgtaaatgccctatctacttcttccatttgcatatttaatactctggcaccagcacatgttttcactctcctcagcgttgaaataagtttgtttccagccttttttaatatatatattatattttataccattatctaaaaagaaaacattactactatatatccatctacactcagcaactaacacttaactggtgtatgtctccggatgaggattttaataagatatcaacggccaaagataaaactttactccaaatgaatctctactttcacgttcaccataacaaatctttggcttcatttcttacaaatatatacccggccgtatatatatgaagactttatgattaaagacttacgtcatgaaagacacggaatttgatgccatccgtttcatgcagtgattttaagcttcgagggcatctacaatatcccaagatacaattaacatttttcgctgaagtaatttttttttggataatgtggagtaaagttttatcggcatccatcgacaagaacattgattttggtaactgtttggttaagtcctccacaattcctccagttgctttgcttggattcatcctcaattttgtagttaaatgttaaaagttaaaataaaaaaggtcgtatatatatcggaatcaaaagaaaagggaaaaaagaaaaaaactttataggaaactagtgatattttcaaaaagggcaacttcctttggtgtcacatggaaatgcacttgaattctgtctgttgtggttgtgtcttacaatgcttctttaaagcttctatatatagtatagtaatattagagattggagacacgaaaaagtagaaccacaagtattcttaattaaaaaggaacattttccatatatacttatagtaactaaagaaatatatataactaatattatatatgaaataaatacaacactgttagtaaacacattatatctaattttaattacctctaattatgaaaattgtataagattgttttattagtgtcaaaagaagttaattttcaatacaatgttaagagttctcgtcactcgttttattagtgtagtaaccatgatggaatctagaaaacaatgttgttgtggggacaggatttgaacctgtgtggccgcaggttatgagtcttgctaactaccaaactgccctacgctcaccgcattgaaaaataattgaatgcgcatctatataaaaagattcgttttacggcattcataatgcttagcgttctacagatccgataatatcgattaaacttataatattcaacgtaacaaactataaactagttttttttttttttttttgggacaaaacaaactataaactagttaaaattaaatttccagcaatatgttaatctacaagaaactagtcaatcccacaaaaaatacgatctgcaggactgttgttttcgatatatctgatggatccacagttataatgtcacatcacttagcgttgttaaatcgtattgtattgcaagtacacagttttgattgatcataaattcataattaaacattgaagaatggtatttcatattgctaatgatgaaatctctatagcagtagcatgaaatataaaaacgtacgtgggttaatatataaatattgtcaattagtattaagttcaaactcacaaaacagtatatacggtatgtaaaaaccccgtataggaatccatatataggtgagacctagctacattgaaacaacaaatcttttaacattgattgtacgtaaccagagaaatttaatgtggtagctacctttttttttttttttttttgtggtagatagacaacttaatttccgtgtgggcatcaatccctaaggaaaaccagacatatatgagaatcaacaaacgttccttgatccaaaacatgatttattttttcttgggttctgatgttgaaagttgttgagatttgatcatgaaacttcgcggggctataaattaaaagctcttaactcgaacatatgatctaagagagtaaaacagattcaaaataaaactcaaatagaataattgagaatttttgacattttcgttgagttcgtttttttaacttgtgtaccgacctgatcaactagtgcattcatgtggttcagacagaaacaccataacatcaaggtgttttttggtaacaggaaaaaaaaaaaaaaagctacacgcgaagttagaccgagtcagtattttttagcatagatgactagtggggattgatttgatgtatctataaaccttgaaatgtgtgtggaaaaaacttttgacctgtttcattgccaacaaaacagattttagtctactaaacgaataacatcagcgttggaaaaaaatggtggtcctgcttttcaacttgcctcttggaaggaatagtggatcataaaacctctgagttttgttgcttccgatgcaaacaataatatgtgacgcggtcgtgctggccaatttctagctaactttgatgccaatcctaaaaggtccattaagaattggtctgactcatcaaaatctcctaatgtcttcgctgtttcaaaataataagaagaagaatccttaagaatcgcatagaagcaaaaactgtgactcaggggcgtgatccatttaccttggtgtgtagtcgagaaatcgcattggaatgttactatggagagtggaataataataataaggagtcgaatggcttggcatgagagagagaatgctctttactctccctttgtatccttttttccgataagtctgtacatcgcatccttggttcgtgtccattgagaaaacaagaattccttttagcacaattagaaagaaagaaaaagagagtaactcataaactagagtgtttagttttttaacttgatagaataaactcatgtgtagtgcctcgggatattggtagcaggcaaaatgaagactggaagtcttagtttaggagaccacttgatgatatggttatttccagggacttgcttctctttaatgattgatgataaatcagatgcttccatttgagcaaatgtatacccagagaatatcaaagctatgggtaacacaggcagcacaaacctgtcattcataatcagagtaaacgacatggaaaacataattcacaatgaaaagatgttcccatgtgtagtttacatttattcaagtacatccatattacctgaattacttatggcagagtatgctgtatatatctgctaagatccattggataagagataaaagcttttgatttgtagacttgataattcccgcaatgaaaaaaagtgtgaaagtgaaaagcatgacaggaaatagtaccagtgccatgagcgagttccgtaatagtctccaccggatgagaggaagcttcagaaaattgagaggcacaatgacccatgagcagcatatcatacggtccaacagacaggtgaaaccgaggaccaaagacctaacacagcagaagctagtaagcgcaatgaaatgttcaatacaaaacattaaaactaacattaaagaatacagctgcagagttaaaatgcaaaaacgaataaagaggaaacagagggatctgggatctctaactcacttccggttacatcaacctctcaacatagtaggaactaggaactatcaacatagtgtaatggtgagctggcttcactttgttcgtcattaacctaggcaaatcttattggaattgcagtaacatcagattttggagaagcctatattcaaaatcaatattaacaggttctaattttatcttcttagtagaccaaaaaagcttttacatcatctgcaaaagtaacaacacattgttaataccacaattcaagatttcttgtaaaataatgaagaagtatactgaccattacgtaggaagtagtatcaaggcccgtcacatgaagaactttatacaatgggacgcaatgtcaaatgaccgcacggcgcacctatccattatgatcaacctgagaaacactcagcagcatagaattgacacaggttcaatcactcaccacaaaatcagaaaattaaagcgattgcaatttatctttattttggaaacattaccagaatacggtgccaagggattgagataattgaataagaatatctgcctcggagatcgaattcgctctgatttagaagagcgtcactacacgaatcagcgttcttccgcttccttgttgccattgaagaagacgcagcctacaatgagttgaagaggtacagaggaaagctcttaattaaccggaaacgggaagcagcgtcgattttcgccggcagtcggggaagcgcgaagagtttcgccggcggtcagagaaaacgattgagcagatgacaattttacccccagaaaaaaggataaagtggcgcatcattaataaaacgcatataatttttgagttttacaaaaaaaaaaatcgaataaaatgtcgaaagaagaaaaaaaaaagaaaaaaatcgtaaaccctataatttttgctcagaaccctaattccgcaaacgtaacctgtgttcattgcgccgtcttctcaccggagaatgagtactactactactacggctgcacttccgcagcgacaccagtcgaaggttgacccgcagaacgttaacagagccgtgaagtctctgctaaaatggtgggactccaaatccaagaccgagaactctgaatcactcgagaacgacggtttcgtctatctaatcgtgacactgaagagaatccctcagttggatcgtactaaccccttgatgatccctcttcctcatcctctcatcgatctggtcgccgaagatccgccggagctctgtttgatcatcgacgacaaacacaagaacaaaatcacaaaggaagcggctttgaagaagatcgaagcagagaagattccaatcaccacagttattaaagtctccaaattgaaatccgatttacgcaaattagaggaggagaagcgattcgagttgtatttcgcggagaggaggctaatgccgatgttgccgaagctgttggggaaagagtttgttaagaagaataagactccgattgcgattaacttaaggcatggtagttggaaagagcagatcgaaaaagcttgtgaatcagctttgttcttcgttggtacaggtacttgcagtgttgttaaagtagcgaagttgtcaatgggaaggaacgagattgcagagaatgttgtagcggccatgaatgggattggtgatttagttcctggtagatggaagaatgttaaattgtttcatctcaagttacttgagagcttggcattgcctgtttatcaatcagttgcttgatgaatttgtttaaagaagctgatggatgatctggttccagtgagtcacaagttttggtttgttttcttagtggaatttgtgatgctgtaatgtttaagataatgcctagactgaacaaaactgtctagattgattagagtgaaacagatggttttaatacaaatttccatgagtgggtcttttgattgattttactggtatcttcttttgttatgcagatatatagtcacatgaattctctaaaaaagatggtttttggtgatgtattggaaagaatattagttttcctactctattgaattactctccacaaaggtagattccattgatctttctttgtttgacaattgttcttgttcgatatcacagtaacggttatatatcttttcactttccaatccctttgactcagagtcttatttttgtatagtttacgttccccactactgcttgttaatcttacattttcgtaaactagtctcatcgtcattttttttagccctttgcaacttaaattttatctttgtatgaatgctaactgtaattcttttgttggttagtgtaatgaaaaagaatctatcgttaactattgtcttacaaaggcaacacttcaggctaaagggacaaagaaaagtctctttaagttaagcttaatatctaaattgggaaatatgattggagtattcattcatttgataccattattattcagttagaatatttaatggagttctaactcaacttagtaatttagttatcattaaatgctaaggaagtgtttatcagaatttttcagtgctttatcaattaaaaagtagttttctcattggaccgttacattcacgcgctctagtcttccgtgggtcctccattgtctttgaaccatttctgaaatttagaagcaaagagagaggaaaaattagactttactcattgttcagtggttgagagagaaaagagtaaaaaagcacatggcctcattaccattggggcctcagcctcatgctcttgctccgccgctgcagcttcacgacggcgacgctttgaaacgccgtcctgaattggattctgataaggtttatttctccccgtctctttgttttgtgtgttactgttaccgtctgtgtttggtaaacagtgcatttgaaattatcgtttggtggctgttctagatctactccgatctagctcctactttctttgttctatgtcttagttcagtcgaatcgatctatattctcgtgctcttgtgtttgttcgtcgcttgtattgatctgagctcaccggagagtttttttgtttctttctccgacgaggcgttttgataggagactgtgatttttacttcatttgtatgcatgcagtagctagattactcttggtatctcccagctactacttcaaccttctctaccggagatctaagtagcagtaatcttcgaatcttgttgaaaaatttagtgtaaaataatttgagatagtttcttgcgcttgggaaacttacattttcagtaaactaggttgaatatttccccttcatatttgtttttggatatttcgattgtttgtttcaacactgttcactttcaagtacaacaatttgcttgtttggatattatttatttcaacactgttcattctacaaagtacagtttacttgtagatctctgaattcactctcggtaggtttcggagtattcctttagttatggttttcttggcccattgcttctctgtctctgtctctctctcttttctatttgccatcgacatttattctgaattttgtcttatggcttgtccttcactctggcagaacttcttccattgacttgtattttgtatctatgatttttttttttgttctatatctaatacccataaattgtttgacgtctaaaatcactacatttttgaacttctatcaccattgtttacctctggttaacccatgctttactttatttttcttattctttctgcatcttgcttgagtgcttctattggcttgacaactggttagttggtacattttatatgtgttagcttcacgttttcaatataagttaattccgaccacttgtataatagcaataacagcattctcatacagtcatacctatcctgaggtttgttgaaataatcggatgcagtaaatgcttgccatctctattccaccttgtagttgatcaaaatagtttaatgtctatactaatatgtgaggtggattgcaggaaatgtctgcagctgttattgagggaaatgacgctgttactggtcatatcatttccactactattggaggcaaaaacggcgaaccaaagcaggtttgatgctaatgtttgcaaaatctcttagataactaactagtagttaacacttacggttatagcacagtaccatgtgtaaggtttctgcggggtctgggttattcatttcgcatcaaatgctccagcaagtgttactttcccattaaaaccctttttcaagtcaaattaattcatctctcccttacatgatcttcattctgtcccctacagaccattagttacatggctgagcgggttgttggaacaggttcattcgggattgtttttcaggtattttgtgcttctctgtactagcggttccaggacataaattctcttctttctttctgatcaagtctgaaatttacgattttaggcgaaatgcttggaaactggagaatcagtagccattaaaaaggtcttgcaagatcgacgctataaaaaccgtgagttgcaactaatgcgaccaatggatcacccaaatgtcatctccttgaagcactgtttcttctctacaacgagtagagatgagctcttcctcaaccttgttatggagtatgtacctgagactttataccgggttttgaggcactatactagttctaatcagaggatgccaattttctatgtcaagctttacacatatcaagtatgtactgttatttgcagttagttctcacaaatattataatttattagaatttactctgaaactgatttgaaatatctattgtgcagatctttagaggtttggcttacatccatactgttcccggtgtttgccacagagatgtgaaaccacaaaatctcttggtacgttatctagcatgccatgtggtttgtaatcttgactatttctggatctcactttctggtgcatactgtaggttgatcccttgacccatcaggttaagctgtgtgattttggaagtgcaaaagtattggtaagggtgttatcttttcattatctcaccttttttgtgtgttttcggcttggttatgtatctacgcatctagttcactgagctaccatataagtgtgagttataccattaagtgcgagcagcatgttctctgttttggtaacccttttaaatttttggtaattcactattaggtcaaaggtgaaccaaacatatcatatatctgctcccgttattatcgtgctccagaactgatctttggcgccacagagtatacagcatccatagatatatggtctgctggttgtgtactggcagagcttcttctgggccaggttagtgtggatttttatgcgttaattaccttgttaaataaagagtctctgcaaaatgcaaaaagtgcgcacccaatgttatattaagccagtctctctctctctctacagccgttatttccaggagaaaattcagttgatcagcttgtggagatcataaaggtgaagtctcctttattagactaatggatgtgctcttttttgtctttggtattagactagaatctagtaaatatgttaccataagtacacttgctaccttgttttaggttcttggtactccaactcgtgaagaaattcgatgtatgaacccgaactacacagattttaggttcccacaaatcaaagctcacccttggcacaaggtagttcatctcaccttttgttcctggttaagcaattactgaactcattacctacacagtatacattgaagcgattcatttatagcatcaaccatatactgtacccttgacctccaggtttttcataaacggatgcctccagaagcaatagaccttgcatctcggcttcttcaatattcaccaagtctacgctgcactgcggtcagtatctccctcttttttttataatcgaaagtagtcgtcagtgataactctttttgaatcttccaagtgttggataaagctaagattcattttaacatttgtcttgttctctgtctatttttagctcgaagcatgtgctcatccgtttttcaatgaactccgagagccaaacgcccgtcttccaaatggtcgtccattaccgccattgttcaatttcaaacaagaggtaaaaatcaatagcaaaggatgatgtttctttagtggaacttcaacataacccaatttgttctttggatgtggaaacagttaggtggagcttcaatggagctaatcaacaggctaatacctgagcatgtgagacgacaaatgagcacaggattacaaaacagttaaaaactgtgcatgtctgaagagaaagaggagaaaagcaggtttactacttttatttgatagttgacaggttcaacagtatattaaccacgactattatcagcttctatacccgtagtaaagtcatattcagctttttgagaaatcagatgctgataattgcgttttttttttttttattccgtagcctggagagtggagagagacactgttcctcgtgtatttttgtatatgtttttgtctgtaaaacaattctgacagatacgtagagacaaaagaaaaacgaggtgataatattaaaccatgtcatgtccaaaagattagctacagatgtttttttgttttcttctctcaacacaaaagactagagggataaataatcatcctcttaaattaaaagtcgctagatctattttcgaaatgttacgtaggtgatgatttgcatttcttcagtttattacaagtttacaaattacaagtggtgggagtgttgaaaacaaattaccaatcatgtacttaaattttaaaggaccttacaggccaaagttaccaaagcatacacatgatcttaaaagtaatcgtttcttatttcttttttgattgcaagacccaaagagattatcatttgttgtctcaccctaaccaaatcaagccaaatctacaatccccccactctagttagagcagcaacccattctcttaagaaccgatccgtcttctttaacgtttatcgtctctccttttcccggtaaatcagccgactctcctcctccatcaacacttcttttgctcactatcttgtggatctgagtgagcacttccgtgaatgcgttttcaacattggttgcgtctagagctgaagtctccatgaaatagagggattctctctcagcaaaggctttagcctcttctgttttgactgccaccaagtgacgcagatcgcacttgttccctataagcatcaccactatgtttgggtctgtgtgtcctcttagttcccttagccatcttgctgcattctcaaatgttgcgtgccttgtcacgtcgtaaataagcaaagcaccaacagctcctctgtaataagcgcttgtgattgctcggtatctatcatagcataaacaaaaccagcattttctcagatgttgttaacaaagatataataacaactacaataataagttcagtaacattacagattaagtacacaaagttagactattttcgataaccatattacatggtatccatctaccaaatggttactttgtaaagttacaatcgcagagttaatgaagaattctgctgcaaaattcaaaatgttatctatgtctagtgcaagacaagacagaggagatgaaagaaatgttgttttcaacaagtatattgggttcagaagttcatcacagacgagctcagacaaatatcaatgtgtgaaacggatggaacagcacaatactagtatagtaaccgaggtttagataacagatatctacaaacaacattttaacaacgggaattgacctagacaggagaggattgaataagctaatcaagtagacccatatatgagggatacagatctatgaacaagaatcttacaaacacagaagctatgccacaaaagaaaaccattagtagcccaaatgtgaataaaacctaaaagtatattccgagtaaactgcagcctgcgagcgatattcagcacaattgagattctgaaccatattgaaagttgctcaagtctaagagatttacaaattcagacacaaccagtttcgttccgaaaaccagaaaactctagttctgccacaaatagtcgtaactagtaaaccaacaaggaaaaatgaacaagacactttgaacttgtaatatccaaatcaggctacagattcagatacataaatcaaacaccatgaattcataaacagcgaatccaacaagaactcaacaacgaaatcgagccaaaaaggatggttttttaaaaccttatcctaaggattttcaataaagtaagcaggaaaaaaaaagcaagagaggaaacgtaatctgacctctcttgaccagcagtatcccaaatctgagctttgacgactttgccttcgactttagtggttttggtagcgaactcaacaccaatagtagacttggattcgagattgaactcgttcttggtgaaccgagagagcagattcgatttgccgacaccagagtcgccgatcaacacgagcttgaagaggtaatcgtactcttcatcggctctgtaaccagccatcagatgagagatcgaattttgggattagggaattgggttttactgtgttgcttgctgctgtattatttgatgataatgaattaatgattcagatgatgacgatgaaagcttttgtcgggttggctctaaatcacccttttttcttcttctttttgtttttgaacagaaaaagtttaaatttttaaaaagatgattccgcttaattagttgcacattttaggaaatcttctccatatattgttaacaacttccactcacaacataatcatttttaacttaatacagttttctaattacaatttaacaagattaacaataaacagtatacacctacttttctaaaatttatcttcaggatgaagatactatttactttcattttcttaagtttgggtttcaatgaatgtagctactactccttagctagcaacctggagagtttataaaattagagatatttgtattgatttttaaaaatatcaagtttacttttttattagattataaatttttgaaattatgtattactcagaaactttctacggttcacataacaccttactataatgttgctccatccgaacaatcgtgttacttatgcaacatacacaaagaatagctaaaacatttctggtccatctctctactaaggaaaatcttgaaagcccaataattcaataacatcatcctaattagactcatgtatatatattttgttttctcaatatatttattcacatataggtacaattttaaaaatcacaacaactacaatctgacaacacaaaaatcttatcgaggttgtaactgcaagcctacaactaatcaatcattaaagacaatattagacaatgtgcaaccaacaattaatttgaccaactagtttcatacggagtagtctttgtttttttatagaccaacattaaccataaataaatctattcccatatgcttccatttttaattaattcctgttccactaacgaataccatccaaaacaaaaacgtatgacacttgatcactctggttcaccacacgctcaaaagcgtcccctgtttcgacacgtgtcaaacggtccaaaacgaggtcctagacacgtttggtaagtcacttagctattttagccccaaaagtggtccacacatcgcatcgcacacggcatcacgcgtcctcacgttctttctccatatcacgtgtccgatcctccacgcgcttctcctcgcgcgtaacggactcattggtgtactcgtgccagctggcaatagtgcgagtccggctggctaactagccttatccaaattttctaaacggaagggaagtgctattaccactgaggctgtcaccttctttctacgtcacggacaaatccaattggtcctcaagtacgttgtttaatgacatgtacttgtggacagcgaagcaaagcaacgactcggtgacggtcgttcgattccttttaaatgtaaccagaggagagtcttaagccccttcgatttgaccagtaaataatcatagctaaaaccaaaccttttattattaaaaatacacaaaaatatcaaaaacataaaataatatttcatatccaagagagcttccatacacacacgatgtactacgactcttatacgtataactttacgtttattttcactttccctcctttatttcattagtttttaatttttcccctatatttttataatgtcacatgaacacccaatatatatacttttgaactaacaattttaaattcttcatggttgtttttccctactaatataccaaattatttgttataaattaaatattaaaatattttataataatgatgtattagacgacaaatattattcataaaaaatatgtgaaaatttcaaatgtgttcttactactatcatttgtgaaaaagtatgtaaaggccaacctataattgttttaaaataaaaaggaaaagggtattatctctttatggtaagaaacttttgacttttggagtataaatatatagtggtcatagtagtttcgtctatagagtagaggggcatatatgatattattccaaaatacacatatgaggctggaaacagagattttttaatttttattttccgagttttttcatataaaccctagattaaatttcacgtttcatttttttttttgggttagatagagaagatcagattcttcatttgtcaaggaacaaaaaggtgagtctcgattcgtcactaatccaatcagattttttccggctcaaatttcgtttctttcgttttcgggttcctgtgttttactgaattgagggatcgggtcgctccgatttagattttcgtttatctgaaaggtgaatctttcttccgtttttgattagcttttgggttgtaatttcatggatcttgcttgtagaggataagaatgtatcattcattcgattttgtcgtaaagctcagttttttatttttgttctttactcagtgatagaggatgattagtaaatatcattgatttttggatatctgggtattgctcaagcttttgatttggtttgatgggtattcaaattagtggaaatactgattttgtaaaataatttttggtatcgtagatcttgttgagtttgttcgtggagattgaccttactgcatttttgtggtttcttctgatgcagatttattgaagcagtgtttggttttggattcttttgggggattggagacaagcgaagatgatttctaggtcgtacacgaatctgttagacttggcatcagggaatttccctgtcatgggaagagagcgtaggcggcttcctagggtaatgactgttcctggtaatgtctctgagtttgatgaagatcaagcgtatagtgtgtcttccgataatccttcttcggtttcctctgatcgaatgatcattgtggctaaccggctcccattgaaggcggagaaacgaaatggaagctggagttttagttgggatcaagattctctgtatttgcagctcaaggacgggttgcctgaggatatggagattttatatgttggatctttgagcgttgatgttgattcaaatgaacaagacgatgtggcgcagatactgttggacaaatttaaatgtgttcctacgtttttcccacctgatttgcaatcaaagttttacgacggtttttgcaagaggcagatatggccgctttttcactacatgcttccgttttccgctgatcatggtggaagatttgataggtctctttgggaggcttatgtagcgactaacaagctcttcttccagaaagtaattgaggttattaacccagatgatgattttgtctggattcatgactaccatttgatggtcttaccaacttttctgagaaggcggtttaaccggataaggatgggatttttccttcacagtcccttcccctcatctgagatataccggtctcttcctgttcgggaggagatacttaaggcgttactaaacagcgaccttattggctttcacacgttcgattatgctcgtcacttccttacttgctgcagtcggatgttgggtctagaatatcagtctaagagaggttacattgggctggagtattacgggaggactgtgggaatcaagatcatgccagtggggatcaacatgggtcggattcaatcggtgatgagatattcagaagaggagggtaaggtgatggagctcagaaatcgtttcgaaggtaagacagtgttgcttggtatcgatgacatggatattttcaagggtataaacctgaagcttctagcaatggaacaaatgctgaggcagcacccgaattggaggggaagggctgttctggttcagattgtaaatcccgctaggggtaaaggtattgatgtagaggaaatacgtggtgaaatcgaagaaagctgcaggaggatcaatggagagtttgggaaacctggatatcaacctatcatatatattgatactccggtttcgattaatgaaataaatgcttattaccatattgctgagtgcgtggtcgttacagctgttagagatggtatgaaccttactccctacgaatatatcgtttgtagacaaggtttacttgggtctgaatcagactttagtggcccaaagaagagcatgttggttgcatcagagtttattggatgttccccttcgcttagtggggctatacgcgtaaacccatggaacgttgaagctactggagaagcactaaatgaggccctctcaatgagtgatgctgagaaacagctacggcatgagaaacatttccggtatgttagtactcacgatgtagcttattggtcaagaagtttcttgcaagacctagagaggatatgtgtggaccatttcaagaaaaggtgttgggggatggggattagttttggtttcagagttgttgcactcgatcctaattttagaaagctttcaataccgtgcattgtgtcagactacaaaagggcgaaaagcagagcgatactgttggattatgatggcactctgatgcctcaaaactccatcaataaagctccaagccaggaagttcttaactttttggatgcactttgcgaggacaagaagaattcaattttcattgtcagtggaagagggagggaaagtttaagcaagtggttcactccgtgcaaaaaaattggaattgcggcagagcatggatacttcttaaagtacttttcttctctactttttatgaccacttgtttaaaaatataaaattctcctacttaagggttagtaacatgccttgtgtctttttcttaggtggtcaggcagtgaagaatgggagacatgtgggcagagctctgattttgggtggatgcagatcgtggaacctgtaatgaagcagtacactgaatcgactgatggctcttccattgaaatcaaagagagcgctttggtttggcaatatcgggatgcagatccaggctttggttctttacaagcgaaggaaatgctagagcatttagagagtgttctagctaatgagccagtggcagtcaaaagcggtcactacatagtagaagtcaagcctcaggtaagttacctctcttctgctcaatttgagcattaaggttgtcgaagatatctaattatagacgtttgtgcttgttcttgtgtgagaatagggagtgagcaaaggatccgtgtcagaaaagatattttcatcaatggccggaaagggaaaaccggttgatttcgtgttatgtattggagatgacagatctgatgaagacatgtttgaagcgattggtaatgcgatgtcgaaaaggttactctgtgataatgctctagtctttgcatgcacagttgggcaaaagccaagcaaggctaaatactacttggacgatactactgaagtgacatgcatgcttgaatctctagctgaagcatcagaggcttcaaacttttctatgcgtgaacttgatgaagccctttgatttggaaccagatcttttgccaggttttaccctcttatgatctcaatcaattccagttatatttgctcactttctgcgacaatgtatgatcttgttctgataaatacaatgaatgattgatgtgcatagatggctaaagaagaggttagacagacaaagacaaggaatagaagagactgggagtttgttggtctgtatgtgtttgtcagattgaaagaaagaaaagaagaaaagggtagtgaaagagtaataatggggaaaaaaacaaatggtgatgtgaagaagctttgttatttgcagagcaatcaatcaaacaatcaaaggaggaggaaaatagatgtgtttgggttcatcagggaaatgtgtttgcaggatgttgaagttaacaacaagcaaaagcttttcctgatcttttttttttaatattcttattactattattattgttatttgtaattggatgatctcttgaggatatcaaatttggattcggctgtttattggatctgaacgaaaacgaaactgtgaagaaaatgtttgtaaagataacgttgcttgtccattgttgatttttttctttctatttattattatgcttttcttatcgttggggatgtaacttttttgacgctctagtagtataaaaatagtgaacggagaattatatgggttcagtttcagcccaatgggccttacttacggctttttcgtttactgtgcgatcgcttcgagtgtccccccactatttacccttttccttttttgttgcattgatggagtaataatgtgactgactgatgagcttttcaaagtaaaaaacaaaaaaagaatcaatggaggatcatgagaagattgatgggaagaagaagaagaagaagagtgtggctttgattccggctaactacgtctccattcttcagcttcaggaacgttggctgaaggagaaagagaagaaacaaaaggaaaaagactttgtagagagaggagtgaaacagcaggttgatcagagacaacgaaggagagaagaagaagaaaatgtagtgaaggccatggaaacaaaagtgaagctcgaggaacatagtttaagcggaggtgttcgtatgcattgtagtgtgaatcggtggaaaagggatcaagtatgcgttaagaaagaggaaattaaggtttctggaattgtgagcaacaaggacgaagatggtgtagattcgagggagaaaaagaagaagaatccggtgaaagagaacactaggagggttttcaagtccaaaggagagaatgctgctaaggaagtaactcaatgctggatcaagaagaaagtagaagaggaaagagagacaagtgaggtcaagggaactgccagattgattagcaaacaaggttattaccaaaacaagagacatgattggtcgtctacacgtgttattagggcaacaacaagtactatggtttgggtgaagaagggtaagaaagatggagcagttggtgaaaataaagtctgaattatcctttcaaggtttgaactttggatcatttgttttctaggtcttagagtaattgaatcggagctgaataataatgtgtgatgttatcgattatcatggtcttcaggtgttgtaggattattagaactttcccataagcatttgcttgtcaatgtctaaggtttgattcttatcttgtgtctacaattccttggggattgcattgtagtaggtgtgtatgtaagtaaatgtatactatcttgaatcttggagctctatcgcgaagttttattctatgagtaagattgtgacttaacattggatttttttctcagttttgtgtcacgtctcttgcagcttatttcaggaatcggaccaggactagtaatttcaccatgggtctatgtatgactatgcactgaatctaaactttaagccattatggttgagtttgaaataaggccttgtatatcgaattcgtatacatatatactccaactagggaaattaagatgtgctgttacacagtatggggaagtatctcaagataatatacacagagattcaaaggtctcttactcagacagacgctggtgttggtgttgatgtggatgttgaagaagcaacacggttttcaggtgggatttctgtgaattcagataggattgctcggaattcatcgcctgacatagtctctttctcaagaagtatttcaacaatcttgtccatggcttcacgattgtttctaatctggctcaaagctatctcgtacgctttgtctgataatgtcttcaccgctgtatcaatatcatttgcaagcttctcagacattgagtttcttgccatcatcc

SEQ ID NO: 1112 - DNA, 104533 bp, Arabidopsis thaliana
cgtcgtttcgaagctgaaagagagggttgtcgggggacttacggcggcggctaaagcagagttgctctcaatagagtaaaccgtgaaattagcgagaaggatcataacagagaccatcaaagtaggagtagcagagaaaacttgttgaaacaaccaaacgaacgacgcttgcatttcttttctcacacgatgaagaattccttgcaaatcttcgaagagaagaagctctctcatgtgtaacgtaaagctttgaagttctctaatcataaacaccattgaagagaaagctttcttaacagagcaacaagctgattctccgacttggtttaaaactccttcctccatctgtaactttctctttatgatcctaagcgaaagaggaagatctacactgtttgctttcctctcgatgtttgacatttgcaccatctctggccatggcggttccattgaatctgacctgaaattattatggcttcctactatgtccatctttcgagtgtaatcgtcaatgcgtgtatccgattcgttgtcttcttcttcgttagagacttggaatttgagagttagctcctgcatctttttcgcaaactcttcctcggaaaacggatcgacgtttgcgctaaaagctctgcgaatcaactgtgttttaggtcgttttgttgattcccagagctcacaggacttggagtgacggagatttgtcgaagaagtgccgaagggagaagaaggattaagcctctggctctgcatcacggaacgacaagacagagaagaacgtccgtcgtttccgatgatccgtcgtcttgaaggagaagaaacggcggaggaagctagggtttgagaaagggaagaggaatgatgaactataggatgagccacccattgatggaaggtggagcttgttgctactttcactcccattttcttgaaaatatcttcaaatgttggcctcaacaacaaacaaatctggacaaatacagagcaaaaagctggagactagtttcgtgtagaaagcttttccctcactcaagctttcctgcaaatcaaaagatgaatcaagtgagtcaaaaatgaatcggagaaagttattaaatccatgcacacacacactcactcacgggaatgaatcattaacaatcccataaaaaacggatcggagaaaaactgaataagcacgagaaacaatgaaacaccgatatcataaatacaaaaacttcagtgaaagagaagagaagctgaagagactcactctataagaaatgaacgatggtttttgtcccagattatttttctcgaattttctcggaaagaaaaataaaactctctcgggataatcagtggatggagcacgaggcagagagctgccttttatacaaaatgcgatgaagattttaattaagtgaggaaaatatattttagttataaaaaaaataaaaaaaatcacaggtgaaggtagtcaagagaataccggagaaaccggtaacaggtgaacgaaattagtgacatggcacccattacagaaaatgagttgagagaaaaccgggagttatttgcagatttttcttttagatccaacggttctaaatgagccactttaatcgtaacgatctgacaaatttttggaaaatggaaagtaaaaattacaatagtagagggaaaataataacagcctggcaataaaaggtaggccatataaagtggggtcctcgtgtccatgtcatctggcaacgactttttatttagtaaggtaaagtttaattgcgtcttaactcgtttttccaatccgtgtttaatgttaaaaaaaaaatctttttgtattcataatctcacaaaagtcgactatggaactttccgtaaattggaaatgacgtcagagtttttgacacaataatgaaatattgacatttttgtatatctgacagttatttcggatttatccaatattttctgtataagaacaactcaaacatgaaatgcattgaatgagagattcaaacgtctaaagtcaaaaacacatgaattctttcgaaaatggcaattgtgtttaatactctcataccacataagtaatcatcaccataatgctagtaataaaccaaagtaaccgcacacctaggattttagtggttcaaggcttcaagcgaatcggatggggggaaaaagcaattgaatgaagttttaaaagtctaatttgagagagtgtttctttttttctgtgttgaaaattaattttagaaaatatatatggtttactgatttcgtgattttttatgaaagccatgtcactgttcagttttttttttttctctaacaatgaacatattggtgaattaattgactaaataaaaatccaacatttgctatcatattaattaatctgaatcatattttcaaaacttttcaatcaataggagtaaaacaatatgctcaagtccaaaatgtctttgttaagatcacatgttgcacatgctattgacctaacttctgttatcagcagagtgctgctatacatgcagttccataaatttaaactatacattgcataaagacacattgacgatctttcttgcaaagtacatatatattaattacacgatcttgcaggacaagaatcgtttaactagttaatgataattaaccgcggtataggaaacaattcgcgtagatgcaatatctgcatgcatgtaaaagtatatcaaattaattaagaagaagcgacagaattcccaaggttaaataagtaaaaccatatgatatgaaaacaaaatattttttgttggaacgtagcaattgaagggagagggtaaggaagcgacggtcgagaaggaaggagaagtgaccggagagtggtgatacttgtgaccggtaaggaccaagttgacggaagttggcgtcattagggaaagcagcgtctaaagagagcgaaggtggtgaagaagaaattgacggcaacgtccactcctgatatcttattaacggctgatatttattgttcttttgttagtttcagtttcctctgcgtatttaattagttcatgtccttgtcgatgtgcttctcttgtatcatgtttgattttctggttattacaattccattagcttactaaatatgctttaacaatagatatgtacggaattgtctagtagtcccatgtgtaattacagaattcccgttgatctttgctttgctatagaatcgcagatcccccacgtgtgaaatgctggtttaatcacaccacatgctagtgaacgaagcgtttttaacctttgacgtttacacgtgcaaatttctctggctcgttttttcttgatcttctgtttaagtagttaaatagatgcaattaggcgagtcataacttaattttctcacatatatattgatgttgtcattatattatttagtgtgcctaaattaaattactaaaacttttttttttgttacgttaaagagcatttattgtccataactatatatacgtttgtaaaacatattagttgactgttaaaaaaaaaagtggttgactttgttagctagtataataaattagaaaatagccataggattttgtgctgccgactgaaaataataagaatttatcatgtttactctatacgtaaactctccaatcagccgaccaaacaattttctcagagtcggaccagagcctctggaccggtggcctgaaatcgtggacccttagtcttatttaattaggatattcataatctcaatttgaacctgatttagttgtaagaaataaaaccgatatttcaaggttctcatgtttggtaaaaaatacaattttagaaaagctaggtcatcatgggtgtttataagattgtatgaataatttatcgaacgaaagtaatagcttttggagaattgacaatcagcaatggaatgttgtgagacaaccattagattcaaatgctaaatgtcaaaatcttgagttaagtaaaacaaatggaaaatgataaaatgagccatgcactgatatacatatcatctaaaaagttgttcatcgattgcacttacataatacaatgtcggcacaaatgctaaacaaatgtatcgtatttgtttccatcgtataccatactttatcgtttaaacaatagtaaaaataattcaacgatcgaccatgttaggacgacagtaactatgcacaaataagcgaacgatgacggacaacttagtacggaaatgtataactatcatgcttgggttttcgaaaaattgcactcatcataatatataatcctactatattatttgggaagtacattttaaatgtaaccttattttttgtaagtaattatataggtatgccattagaaataaaatttaaagagtaaattaattcatctctttaaaaattaaaaagtcaaatactaatttaattaattaaatttcattaaaaaacgaaatacattattaattttcaaaaaattaaccaattaaaatcaacaaattagatttgatatctaaattatcatattaattttttattaattattatagttcacctctcatctttatatgattctatttttgcgaaaaaataatatcatcgttataaaaaaataattagagttttttcgcatatgccataatttaaacttttaaaaacgaatataaactgttcaatacatgaaaaaatattataacgggtcaaaaatagatttaagaaaatttattactaagtactgggtcataatttaaatatttatattcaatttcatgcatattattttaagaatttataatcttatatacaacaataattaataacatattagatttttttatgtgtatgatgtgattcaatttttaatacaagctggaaaatcctagaattgacgggtttaaatcgatattaatataagatggtatactacaggtgaaactctaaaattaacaatcaaaatacaagtgtataattttaaacactaaacaatataaataatatcaagaaaacatatacaactcgcagtttactatatatttaaaatcaaataaaataatatcatataattaatattttagatattaaattaatgtttgggtttttgaatactctttttagataacgggtaatttccggtccaatcggatatccacgggtttagtaaaactctacccaataaggaaatttcctaaaattttaacccgccctaacccgattttttggttcgggtattgggttggttatcgggtccgttttttcgtcagccctattaaagataatctaatataggccccaattaggtccacaaatataaccaaaatactatacaaaaactaattctaagttaggccaaaaattagatcctctaatacaaaggaaacatgtttcttaccaaaataacttctatacaaattttacacatttacttaaaattacatatgttgtatttattataacaataacatttttaaacaaagtcaatccaatgcagtattatatgtaaatagtaaaacattgaaaaatattatggcatcatttttatactatactatttcttatgtaattcaaacaaagtatacaatttaatttatacaaaatattaatgcccgtgctgtatagcacgggttatgatctagtcttatatatattaaaacactaattctttggttaaccacataagacatatataaagaaggttttggtattttttcaattgtttatataaattttcacatttagtttaaatcgaatttctatagtgaattgtcttaattaatgtcaactgaaataactaatgcgtttatacttgaaactctttcaatcaaccaataagaaatattaaaaggatatacaccatacgagcttattacaacgaaatataagtctacgtagtggctctcgataggatgttatggccaaattatcttcaaatggtgagagcgagtgagatagatagagggagactggcagaagcagcgacacggcaaaaatgctactctcttatcttctttcagccttaattcttttttgttttgttttacattatattctattttggtgcatattgtgatataatatcagcggacttatatggacaattttatgcccaaagaaaagttgacgaagaggtagaccactttgagtcgtttgtctgattcttcacgtcgttttattgttcttttttttttttggtcgtcacgtcgttttattgttcaattaatatcaaataaacaaaactataaattatattactagtatttggatcttaaatccaactctcacaaaaacaaaaacaaaaagcaaatttcagcgtgaacaattggcccatttacacaattcggcccaataaaaattagtcgaaactgggtaggttcaaaagggcatcagaagaacaaaggcgggagacgaaaatgtcgcgattcacgtttcccgctactatcaaatttcatctctttctcgctcctacacaaagtagtatcgaccaagagattgattcgcaagcacgggtaaattcctctgccaaatttcgtttccgatttccttgtgtgacctaacaacgatgcctaccaacgccgggacaagtttgtcttcttacaagcatattgtagccatcggaacgacggtgaaatccgagagccttgaatctgccgcatatgagattccgcggaagagaaagatgagatcggattcagcggcggtgtctggtaattcagtctctacgccgaagaaattgaaatctcatctaccaagttctgttcccaatcccggaatgtcagaaaaggtaaattgttgatgtgcataagttcaattgtgggatcaagtttctttagggaaacgaataagtatcaatcctcagatgttatttgtttgcaggaagttgtggaagattctaatgaaattctgagatatccagtgaatttggctgtgtctgattgtttaggcactaaatctaagtggagtcctagaggtaaaccaacgtgatccattagattcttcaattgtcttatgttaatcatatgtgatgatgatatatatatcagtctatagatgaagagcaaatgagagctgtgaaagaggcattgcacgtgtccaaagcaccatcaacaattctttgccgtgaggacgaacaaattcggattttcgagtttgtgaaaggctgcatagatcagcaaaaggctgggagtttatacatatgtggttgtcctggaactggaaaatcactgtccatggagaaagtagtacaacaagttggtgattggtcaactcaggtatcgatttttgtagttataccataacttgtaagtttctaagcaatgtcatcgacggaaagattgaacattggtgcattttatcaggcaggtttgccaccagtggatacattgtctgtgaattgcacgtcgctgagtaaaacaacagatattttcagcaaggtataactatagaccttagagttcttgatttcagtttaatattgatgcttataggcttattttgttgttagattcttggtgaaatcaagcctggcaagaatgctaacaccaactcttcacctctacaacatcttcagaatttgttttctcaaaaacaagaatcttccagctcaagaatgatgtacggttgttgtgctttgattacataacaatatttctgaaacaaggcagtgttatcttaattcaaactcttttccaggttaataattgcagatgagatggattacttaatcacaaaagaccgaggagtcctttatgatcttttcatgcttacaactttgccattttcaaggtgtatacttataggtactgtcttttgcggtctcagctacgatttatgcatttatttcctctgttcatatgcaattgggacttactctgtcgtttttgatttccaggtgtagcaaatgcaatagaccttgcagatcgtttccttccaaaattgaagtcccttaattgtgagaatttcataaccgtgtaactttgttatagttttgcatgtgcactgaaagtctcaactttgaaaacatagtgttgactcctcagctgctatttctactatttcttgtgcaggcaaacctatggttataacattccgtgcttattctaaagatcagatccttaggatactacaggagaggcttagggtaatacattctaccttgttgcatgctagggtgtcttgtttgtgtcagaaaatctataaaccaaataatattttatgttgtttctgtatatgtctcactaacttttaagctctcggttctgacaggttctttcatatgttgcatttcaaccaaaagccttggagctctgtgccagagtaagaatccatgattccatatccttgctagtctaatattttctctcggtcatgagtcaatcttactttcatctacccatcaattattgatgtttactttatctgcattgtgccagaaagttgctgcagcatcaggtgacatgagaaaggcactatgtgtctgcaggtgagttcaacattttcaagtttttcttcacagagtttgttcttattatttgaaatgtgagtaagatagtgcttgggattcttatgtcgtcaatacgtaatgtagtagttgctaatctaactaatggtcatactgactctcaattagcgaacagaaatcttacattctcctcttattcaaattttcagaagtgctcttgaaatcttagaaatagaaacaagaggatcaactggtccagaatcacaaggtcctactccagatgattcagtggttagtagtatttgtatatttttctttgatacgaatctaatatcaaggtcaaggatggttatagtcttatagaccttggtcttattgtcctcaatattgcaggtgaggatggatcatatggctgctgcattatctaagacttttaaatctcctgtagttgagacaattcagtctcttcctcaacaccaacaagtaagttgcatccacatcgagtcatgttaaaattacatttatgttctaaaacttccatagttaagcaagagtgattttacagaatctaaccggagtcatcacatacttctcttgacacaattcacagatcataatatgtgctgctgcaaaggctttcagagggagcaaaaaggatgcaaccgttggagaggtaaattttcgtccagaaaacaaaacccataactttcattgagttcaaaccaaaaaattgtcctaaattactcatctccctcctaaatgactcatctaccttctcacaacttccactgcagcttaataagttatatctagaaatctgtaaatcttggatgatttctccagctggaatcacagagttcactaacatgtgtacagtgctaaacgatcaggtaactattattgccttctttaactattttctgatggcgagaagcttatggtatacttcatctgttaactgatgatagttaagacttcttcaaaagagtgatttttgatcaaaagtaggtttgttgcttcaggggatattaaaagtcggtcaagctcgtagggataagctaaagagagttagcctgagagtagacgaatcagacatcacgtttgctctgcaggtaaacagcctttttattttattttttgctaatccttaaaactactaataaacactccttcgagataaaattactaagtctaaacatcaatcaacaggagatacgatttttccgcaactgtctactgtgagaaaaaaaaactccattcttacaaaggaaaacatctggtgaaaacaatggccaactaagttgtaagaccatagatagtaaactatgtgggccatcaattaatattattcggacagttagtgaaaattagcctaattaggtattctaataacatttttcccattcatcatttagcatatgtatgtagggtctcgccatatattagtatacatttttatcccctgggaggatgtgtgtgagctgtgaaagactgaaaagagttggtaaagtagtgggtttagtttctttttccagtaaaagtggttagctttttccctctcgtgctggacctatctctttggttttatcatcatacacttcgttaaagaatagcgtaaatagtaaactcgagagtctaaacaaattattggcaaaatgtgtaattaaatatgatggaacggccgacggcggctaaaacgtgtatcagtgcatgcgtagtaaagccatccctcattcatttgtttaaatatcaatatagagcccaaaaacaataaaggaagcattaaacacaagaatagagagagaagaaagaagaagacgatgaaagcagaagcagagatcatcttcgttacatatccatcccctggtcatcttcttgtctccattgaattcgctaaatctctcatcaaacgtgatgatcgcatccacaccatcaccatcctctactgggctttacctctcgctcctcaagcccaccttttcgctaagtccctcgttgcttcacagcctcgaatccgtctccttgcgttgcctgatgttcaaaaccctccaccattggaactcttctttaaagctcccgaagcttatattcttgagtccaccaagaaaacagttcctttagtcagagacgctctctccactctagtttcttcacgtaaagaatccggttcggttcgtgtagtcggtttggttatcgattttttttgtgttccaatgatcgaagtggcaaacgagcttaaccttccttcttacatcttcctaacgtgtaacgctgggtttttaagtatgatgaagtatctccctgagagacatcgcataaccacttctgagctagatttaagctccggcaacgtagaacatccaattcctggctacgtctgctccgtgccgacgaaggttttgcctccaggtctattcgtgagagagtcctacgaggcttgggtcgagattgcagagaagttccctggagccaagggcattttggtaaactcagtcacatgtcttgagcagaatgcatttgattacttcgctcgtcttgatgagaactatcctccggtttacccggtcggaccggttcttagtttgaaggatcgtccgtctccaaatctggacgcatcggaccgggatcggatcatgagatggctcgaggaccagccggagtcgtcaattgtgtatatctgcttcggaagcctcggaatcattggcaagctgcagattgaagagatagctgaagccttggaactcaccggccacaggtttctttggtcaatacgtacaaatccgacggagaaagcgagcccgtacgatctgttgccggagggatttctcgatcggacggccagtaagggattggtgtgtgattgggccccgcaagtagaagttctggcccataaagcgctcggaggattcgtgtctcactgcggttggaactctgtactggagagcttatggttcggtgttccgatcgccacgtggccaatgtacgctgagcaacagttaaacgcattctcgatggtgaaggagttagggttagccgtggagctgcgtttagactacgtttcggcgtacggagagatagtaaaagctgaggagatcgcgggagccatacgatcattgatggacggtgaggatacgccgaggaagagagtgaaggagatggcggaagcggcgaggaatgctttgatggacggaggatcttcgtttgttgcggttaaacgatttctcgacgagttgatcggcggagatgtttagttctattataaacgtcgtcgttcgtgcgtgttttgttttcaatcgcttctaacttttttgggtacaatttcaggttggtttggatttggttaaagtcggtttaagtttagacatcaacttaaataaaattcctaagaaattgaatcactgattgaaaaatagcaccttccagactaacatataccataaagactgccatagtttttgcttcttgaagtacagtatttcacttgtacatataagtttaagtagtgaaaagaaaaatctttagttttaaaaacttagcatgtgtcttttttggtatcaaataagtaagcatgacgaattatcgcaccaacatttgcattagcacgacgaaccatcttcaaacaattctgcgatgaatcgagcagttgccaaagaagacgatcctccatccatcaaagccttccttgccgcatcagccatctccttaaccttttttctcttctcatctccaccgtccatcaaagatcgtacggctctggctatctcatcacaagtcaccaaacccccacgactcgacacgtaatccatccgcaggtccaccgcaagcccaagctctttcaccagcgtgaaggcgttaagctgttgctctgcgtacatcggccacgttgcgacaggaaccccgaaccataagctttcaagcgtggagttccaaccacagtgagacacaaatcctcctattgctttatgggccaacacttccacttgtggagcccaaccacataccaaacctcggcctgctactcggcccatgaacccctccggcaacacatcgttaggattcgtctcgacgtcgccgcttgttctaattgaccaaagaaatctgcagccgacgagttccaaagctcgagctatctccttcacttgcggctcatcaacgcttcctctgctcccgaaacagaggaacaccaccgatgactccggctgatcatcgagccacccaacgatctgatcccgatcgactgcttcttcgttcggactcgctcgatctttcaagctgagaatcggtccgaccgggtaaaccggagggaatttctccaggtgagagaaatagtcaaacgggtgcggctcaagctccgtgaaggaattaaccaaaatacccttcgcatctgcgaatctcggcgctagctctacgtaagcctcgtaagcttccttattgaacaatccaggcggcataaatttcgtcggaatagcgtttatgaatcccggaaccggcaattcttcatcgccggagctcaaatcgaactcagatgcgattttccgatgccgatccggaatatatttcatcatccccaagtatctagcgttacacgtaaggtatatgtaagaaggaagattaagctcgttgccaacatcttttaccaatgaattgcagaataaatcgagaaccaaaccggcgacttgaaccgaatctgagcctccacgacgcgacgcgacgatgctggagacggcgtcttttatcagaggagtatttttcttgatgagttttactatgtaagcttcgggagctctttggtaaagatcgaatggaggaggatcttggatagggggaaggtcgtggagacggattttgggctgggaagcgatgagagatctggcgaagacggaggcgtgaggagaagagggtgaggataagttgagaatagtgatggtgtggatccgatggtcgagattgatgagacgcttggcgaattcaatatggacgagaatatgacctgtggatggaactggaatgaagattagctctgtttccttcaccatctctcttcttttctacttcggcttgagatttgtttggagtaagacaaatgtggaagtggtgttagttggtgtcgtggtgtcgtgtgagtctttgattcatggagctctctgtaatgcaaaccagtcctttaccaaatgaaaatttctaaaatccataaaaaaatcaattaattttttgtgataataagagaaaatattggtcatccatcaacaccaaacgatgcatgtgtatttatcaagccaacaaaatgtaaaaaatggagatatacgtgaacttaagaaaacataaaaaaatttggttgtaattgacatttactttaacaataattatgtcatgtgagtgttagaatgtggttggtaattaaggttttcagttacaaaattgtctgtttcttagatgatgatagaaatcactttacattacacttgtatcgagcttactcaaagactacacagcaatggttgtcgagaaatttacacagcaatgtattatgtatgggacttttggaattttggtcttcaagcacaaatggcgttgattaacatttagtccataataaattgataacatttgtttatttttattacaaattacaaaattatcttgctctgaaagtgaaatggtcaaaactcaaaagtgatccccaagaatatctttgataaaattacatgtggccaccgtagaagacccaccatcaccaacagctttcctcgccactgaagatttttctataaccttctttctcacggggttatcactatccatcaatgatcggacggctgtggctatttcatcggctgacacgatctccaaagtaaccctatcaccatccgccacgtagtcaagccttatctccactgctaagcccaactccttcaccatctcaaatgcgttcagttgttgctccgcatacattggccacgttgcaataggtacaccgtaccatagactctcttggacggaattccacccgcagtgagaaacgaatccacctgttgccttgtgggccaagatatccacttgtggagcccaactacacacaattccacggcccattgttcgatcgacaaatccttctggaagcggctcctgaggatcgccatctcccgccatgttcgtacggatcgcccagatgaacctgcacccgataagctcgagcgcgtgagcaatctctgtgatctgaggtgcagggaagactcccatgctcccgaaacacaggaacaaaaccgacgagtctggttgctcgtcaagccacttcatcatctctttatattgggccgaagctagacccggatttgtacggcccgttaagttgagaaccggcccaacaggatacacgtgagggtaatctcgtccttgagaaaaatgttcagcagcataaggctccacttgggtaaatgaattaaccaaaatacccttggcttcatgtaatcgctcgccgattttgaccagagacccgtaagagagtttatcgaacacacctggcggcagaaccttggcgggaacacggttcacaaacgccggaatatgtaactcttcctcgccggagctctcatcgaactccgacggagtcaaacgttgtcgttccgggagatactgtagaacccctaagaaaccaaagttggaagtcatgaagatataggaaggaaggtttacctcacggccgatgtcgatcaaaccaacgcagaagaaatcaagaatcaagccggcgacatgactactaccacctccggaagatgatgatgatgagactaaatcttggatggtttttctgagacaaggtatgtttttatggatgaaatcgaggatgtaagtctcggaggaagtgtcaagaagcttgatcggaggtggatcgtggatctccgggagactgatgattcggataccaggctcggaggctgttagcgaagcaagagaagcgtcggcgtgaggagcgtaaggaagattcatggagaggattgtaatcatagaaatccgacggtctagattgagtagacgctttccaaactcgatcgttgacaagagatggccggtctccggcagaggaacgaatatgagctctgctgtcttcatctctttacttttttttctttatgatttttctactgaaacgcttgttgctttggtatgtatgaatttatgacatattgatatggtagtggagtcccatgtgttaaactagaaaacaagaaaaactgattataataataattaggcttgacaaatttgtattttaatctcttgtttgggaccttgagcatacaaaagtggaacaataaattagcaacattattgcttagttagatctctggatctcagacattcagatatctgaatgatgtgtattagaatctccattgcagaaaaagaaacagcgagacaattattataaattgacgctaaaaagagtagtagagatatcctactggtactggacttgaaacaaaagttgaagtggaagacagcgaattttattctctgtttctttggccaacaaaagtgtggaacattgatttggcaaaaatcaaaatctctggttttgaatcccccttagcttagttagtattagttgtccgtatcacttaatgtctctctaaatgtcaagagatgaataggtttagtaaaattagtatgtactgtctgatctggtgaccctaagtttttaatttaaataaccacttcttttaagagagacgttgtatatgatttatatacgaatgtgatattaggtgaatatcgtgtcatccgacaaaacacgcaaaatccatgcatgtaagtaaacacaatgtaatgcaattatcaagttaatgtaatgcaattatcaagttaatgtaatgcaattatcaagttaatgtaatgcaattacctttgattaatcgaggattttgtttctttgacttggtatctagttttgggatttttcctgacccaaagtcaaacgtagtttaagatagtttttatgtttagaaaaggaatgttagatccaaagaggacttttttcagcttcattgctctcttaaaatctgtggtaatctctcttccattgttattcttcaagtaaataatgccctttgctcctctctcaacaccatttatcttataaaccctagacactccgccgaatttttacccttctccactggtcatccgcgttttttttccgggtctaaggtcaccggaaaaatggctttccggcgagtgttaaccactgtaatcctcttctgctacttactaatttcatctcaatccattgaattcaaaaactcccagaaaccccacaagatccaaggaccaatcaagactatagtcgttgtagtcatggagaatcgctccttcgatcacatcctcggttggctcaaatcgacccgacccgaaatcgacggattaaccggcaaagagtcaaatcccctcaacgtctccgatccaaattccaaaaagatcttcgtctcagacgacgccgtcttcgtagacatggatccgggtcactcattccaagcgatccgagaacagatattcgggtctaacgatacatccggcgacccgaaaatgaacggattcgcacagcaatcagagagtatggagcctggaatggctaagaacgttatgagcgggttcaaacccgaagtcttaccggtttacaccgagttagcgaacgagttcggagttttcgatcgatggttcgcttcagtaccaacttcgactcaaccgaatcggttctacgttcactcagctacttctcatggatgctcaagcaacgtgaagaaagatctcgttaaagggtttcctcaaaagacgatctttgattcgttagatgagaacggactcagttttgggatttattaccaaaacatccctgcgacgttcttcttcaagtctcttcgtaggcttaagcatttggtgaaattccatagctatgcacttaagttcaagctcgacgctaagcttgggaagcttccgaattattctgtcgtggaacagagatatttcgatatcgatctttttccggctaatgatgatcatccgtcgcatgacgtggcggcgggtcaacggtttgttaaggaagtttatgagacgttacggagtagtccacagtggaaagagatggctttgctcattacttatgatgagcacggtgggttttatgaccatgttcccacgccggttaaaggtgtgcctaaccctgatggtatcattggacctgatccgttttactttgggtttgaccgattgggtgttcgggtccctacctttctgatctcctcctggattgagaagggcactggtatgtgatttgttatatttctgtcattgttgaacatttcgctcttactaatttcagatagttgagtttatattgatctttagtattgaacattttatctccagctttatgtttaaaatgttacatatgatttcacttgaactaatttcatgtcttagtgacatgactttgttcatgttaaccccattagttttgattctaatttcttacttgaatctgctttacatcagtacatgtagattagtctcccgtctttgtgattttgataagactggtgtgggattgatttcgttgcagtgatacatgaacctgaaggtccaacaccacattcacaatttgagcattcttctatccctgcaacggtgaagaaactcttcaacctaaagtctcacttccttacaaagagagatgcatgggctggtacatttgagaaatacttccgtatccgagattctcctcgccaagattgtccaggtctgtttcattctctacctcatttcccactccattacatgctctctgcttttttggctctaaatcctttgcattatgtaatcaccaaataagggccattacaaatatgtaaagtaatgtttcattaagtatctcaccgcatttgtagacagttacagttggttgaacttgagtcaacatagtgtttgaaagatagtcttgaggattgcttcgattgagagctattagtgctatagctttgtttggtttattaatgttaattcacgtcaaggaaattagaacttgcttctttatccgaaacaataatattggaaaaagagttataccttagattgccttcatcaatttcttaccttgatgacgtctaacagagaaactgccggaagtgaaactatcgctgaggccatggggagcaaaagaagactcaaagctctcagaattccaggtggagctgatccaactggcctctcaactcgttggagaccatctcctaaactcatatccagacattgggaagaacatgacagtaagtgaaggcaacaaatacgcagaagacgctgttcagaagtttctggaagcagggatggctgcactggaagcaggagcagacgaaaacactatagtcactatgaggccgtctctgacaaccaggaccagtcccagtgaagggaccaacaagtatattggaagctactgaaatctataactaaaaaacggattttatgtaaatatatgtgccctctgcatgtacccacttttacttagatgcatatatgatgtggtgaaagtatatatattatataatggatcaaagaatatggtaacggaatgtagtacccttgcgatgattgtcgggtatggcctccatctccatagttggaatggatcgaggcttcctgtaatactaaaatgtatccttatcctaaaatagacaaagaatcattgtattatatatagattgggcccatctgattggctaatccgatcctcccagctctttcttggatgttgaagtttaaagtgcatgaaatgaagaaggatggatatcttaatggccaaacttaaagacactttgatgggtaagagacaccatagagctaacttccatcatgtaatgttttaataaataaaacaaacactacatgagacatgtttttacaaacctaattcacctaccaaacttcaaatctaataacatcctataactcttccgtattacttaaaaagaaacatggtaagaaaatataacaaaaaacaaaagttttggccaaactcaagacgttaaggttggttagacatgcaggggaagcattcaatcaatccatttagatcaagttcttgaagctttacaaaacatttagtgttcttaatctctgttttcaccagtttagtgttctttaactctgtttctctctgttggtatgacatttaggaaagtgtcctaaaaggccaagtaataaatgagtttagagaacacaaaatcgacaaggcccatgctggtgactataggcaagtagatatattctcttctgtagtagtagtacacatttcagtattgcactgtgtgatatattgtaagataaataataaatttcttttaattttaacaaaaagaaaaaaaagaaagataaattcgaagaattaaaatagaaacaaactgatgtaaagaaaagtgaacctccgcgtcgagcggcgtactgtataaccaataaaatccagagaatatttcttgaggccactaaacagagaaaacaaaaaaatgaaaggaaagtagaaaaaagagaaaaagttttgcagaaggaagaaaaagaaaaagaagagaaaaaatgggtcttcgtctccgtcttcgtctccctcacaaaagctctcctcgttcaccttcctatctccttctctgtgttcttgctctatccttcttctccttcaccgctcttcttttctacaaggtctatttcctcttactttccttctaaattgatattatattgaaactctgcatatgctttcgtaatcacgtatttggatctgacagaatcatagaatttttgccactttctgtcttcggaattttttattcagtgagtgatttgtcggaaaagctgacaagcgacattgatgatactcggatttttttttctgttttatgttatctccgtgattaatggatgtagcgacagatttggagctgaatgttgcttttattgccctgtgatctaaaagggacaaacacgtgactctgtttctctctgttttttgtttgaaagaacttttgtctcactgagtaatttcgtcgaacaggttgacgactttatagctcagacaaaaactctggccggacataacttggaaccaacaccgtggcatatcttcccacgcaaatctttcagcgcagctacgaaacattctcaggcttaccgaatcctccagtgctcctacttctcatgtccgtacaaagccgtcgtccaaccaaagagtctccactcggaatctgggtcgggtcgtcaaacccatcaaccacaatgcccagacttcttcaggtttgtttgagcgaaccaattactttgaaatgggcttttaacatgattcagaaagcatcaaactttcttttattggcataaaccgttgatttttcattgaattggtgaaaagccaggtggattcaccgggatttagagccgtgggcaaagactggggtgactaaagagcacgtgaagagggcaaaagcgaatgctgcgtttcgagtggtgatactatcagggaagttatacgtggatctctattacgcatgtgtgcagagcagaatgatgttcaccatttgggggattctgcaactgctcaccaagtatccagggatggttcctgatgtcgacatgatgtttgattgtatggacaaacccatcatcaaccagaccgagtaccagtcctttcctgttccgctttttcgatattgcaccaacgaagctcatttggacattccttttccggattggtcgttttggggatggtacatttctctctttttgattgacccttgacttgtttactcaacgcttctctgaatctcgagtgttgtgatgaaggtcggagacaaatctaaggccctgggaagaagagtttggggatataaagcaagggtctaggagaagaagttggtacaacaagcaacctagagcttactggaaaggcaatcccgatgttgtatcgcctatacgactggagctcatgaaatgcaaccattcaaggttatggggagcacagattatgcgccaggttcgcgatgcttagaggccttatagataaagtttaacctaatgggagttatgctgatgtgtgtttttaaatacaggactgggcagaagaagcaaaaggtgggtttgagcaatccaagctttccaaccaatgcaatcaccggtaagtctacccaagattatatcatatatcactcgaggatatgagaaggaggatctaatgtggttggaattctttgcatcataaggtacaaaatctatgcagaaggttatgcgtggtcagtttctctaaagtatatcttatcatgtggttccatgacactcataatatcacctgagtatgaagatttcttcagtagaggcctccttcccaaggaaaattactggcctatctctcccactgatctatgtcggtccatcaaatacgctgttgattggggaaattccaacccctctgaagtatgaattccacatttctcatcatattatcgatttatcggataccattcatgttcctaagacgtttccttgtcacaggctgaaacaattggaaaaagaggacagggttatatggaaagccttagcatgaaccgggtttatgactatatgtttcatctcatcactgagtactcgaaacttcagaagttcaagccagagaagccggcttccgctaatgaagtctgtgcaggatcattgctctgcattgcagaacaaaaagagcgggaactactcgaaagatccagagtcgtaccttctctggatcaaccatgtaaatttccagtagaagataggaataggcttgagtggttgatccaacagaagaataaaacaatcgaaaatgttagatacatggagatgacaagaacacagaggggttctaaatgaattgtctttttagggacatgaatttttggtgtatcctctctctttttttgacatacgtgtgtgttgttcatcagttgtagcacgagatgataattgattacgacttgattaatagaataaagaaagaaaccgtaatcttacaaatacattgggtgatgagagacgcaatgataaataatcagtctgacccagatcttcaaagtaacaaactagagccatgagatacaaatcctaatcctttggtattgggaggaacctaaagtgacatctgaacaacttgaaaactgatagcagcaattgaaatacagtcattcacgtattttctcaacttggtaaggtcagcttattccaaatattgaccaaatccccgagaaatgaaaactaacccgctccaaacttcagattcaagcatttccctcgtcaaactcatcatcatcatcaagcacttcatactcgaaatcttggtctctgttctccatggttttcccgaactgaaatgcctttgtacccattgttgtgaaaggcatcagcccaaatgcacgggctgttttgatctctctagcaatctttctttgagcctttgcgctaatgccagtctgtgcaagagataaataaaaagagggattcatcatgtgaactagcaaaacgccattatgtatcgtaaaagtaagaaacatccatctgacctgcttcctcttaataatgatcccagcttcagtgatgaagtttgcaaggaacctaacattctgtccaacaaaacataattcataggtgagcacaaaaacgaatatgatacactagttgtgaaacatatttacaaattacactcaccctgaaatcagcattcttcagaacttcctcagtagttacctcagacttgctattattctgtctaggattttgcatctgtttttgcatctgtcattaaacaaaagaaaagatgtttagtgcatgtcttaatcaaagaaaaaaagaaaagattaaggagaaattaggactcgtagatccctgcaaaaaccaatctagaaatagaacaatctatacatgaactacacattcatataacatgaatccaaatcactgagagataatatacactgatacaaatgcaacactagacaaaatgagttacttatgatagctataaattgattcagtaacacacttgaaatcaaataataaacatagtcaatagaagtactgttagaaaccataccctagggaagttattcatgccccaactgttgttgaaatcgggcctaaaagagtactccttaaagccatctccttcatccatattgtaagctagtgcagcttctttcaattttccatcaacaccatcagatgaaggatcgaaggtctcgtctttgctcattgaaccaccaccggagtatctcgaccctcctgatctattatagccattgaaatcgcgcttatctttctccgctttactaagatgctggaagaaatcattgcttttctcatcgttgccagtgtaatcgccaaacaacgaatccaaattgtccgatgagtcaaaagaagatcgattctggtttggatctgctcagttcgattcgattccgtttacagttatgatacaatctgagaaaatggatgaacaaaatcgtggaaatgtgaaatggtgtttaccttcgttggcgttggtggcgaggcttctagagacgatgggacgaaatggtcgaaggaaagttacgttgttgagtgaccgagtagcgaaacgagcgatgctcatcttctgaaacttagggtttttcgaatttcggattttccgatctgaggttttggcagagagacagagacggagagtcgctgacacgaaggtgacggatgagagatgattacagtttcagtaaaataaataatgggctcatataaggcctttaatttatttatttttattgtccaggcccatttagttctttgaaggttgctttaagaaaataacttgtaaggcctcgattggcttaataatgggctgatagaaggtttcgatgccaaaaaaggcatgacagaggtgacttgccacttgtaacttgcccatgctgctctccgcaagtcttcacaataatgtatactatttgggaaataatagttgccataaagtttggtttgcttcatcgttaggcacatgtcgaccaaattttggattcggggtagcaaacaaacaaaaacaatttcactttgattttctttttctctttttgattttctaaataatttttcaatttatacataaatgaacataaatatatattgttttcttgaatatatctttaatatgatttacagttacttttgtagattttaaaataaagtgaataaaaaaagaagtacaaaacacattcactcaaaaagctatgatatgacacaaatgtcacatcaaatatgcatgtgattatctaaatgttcgacaggtgccactgaaccatgagaattagataacaattaatcaaagataatcattcagggcttacgtattagaaaaggattacgtataagaagataataataggtttgatttttatctctggtaattattcaattcaaaaagtttgatcaacatcactggatttgtatgaaagttttgtactttccttgaaaaccaaagtggagtctattcaaagaccttttgcttgatattcaatatgacaatcgaggattggtttacttggtctacgctatccatcgaggacaaaattaatcatctaagatgcatcacataaagtttatcaacacgtggcataaaacgaatggatgttataaataacgtcatccacttataaagtcccacagtgtcaaaaggagaccgcgaaggggaccacagatcgaatagtgaccgttggttgccacgcgatttacagatgtcgttagcttcacttttggctctaactagggctactgcgtgctcgttacaggggatctggaactagggttcacgctgattatcgggttttatttctgtattatgttaattatcaatgtgacggtcaaaatatgcctgtgagattaattaaaatttgttcctactatatttgtatatgcattctagtctctcctaagtaagtgtgacgctcttaattaggatttgatcatttaaggtggtgtcacgtatatttatctcccaactatttgaattgaactactgcacacattaatcagagacttggcgaagttgtgagaagttgaataatataccaataattaaatgcttagttgcatatatatgtattatatggaacattataatcatgtatgggttacagggttagtgtggaagaaacacgacgtgagctttaaccagctcgtggcgcaaatcaaatcaaactatttttgggtgtggttgttggactggtctacttctagtagcagcttagccgcgaaggtcgcaataccataaacagaaaattatttcgatgccttgtgatttttggtgacttctttcctaacatacgtcttaaaatacaaatgaccgaaaataggccattttaactttccggcagttgtaaaaggatcgataattgagtaaaaagatgcgtctgcgatcaggaataaaagatgtgcaaaagtaatgtgaaacaataaataaataaaaaatcccctttattagatgatatatatgacaatgacgcagaaaagcatataaaggtggtgtttgggcctctaatcacttgtgcttttcctcttttctcttatgacattcacctaatcttttataaagtttaagcattgtctaccactcatactttttatatattttctctactatatttaagttgacttttctttgtcaatcccaattaatttctctttggatcatttttactaaatatgaaacaattagtagaaagatgtaaaaaggggagagatgcgactccctcatgtttcaagaccttgactattagtatagtttgttcatataccatatgacctagaatataagttatcagaaaaaagaagaattatttaagggagacaaagatcaattgtcgaatcaagaagtcgtgaaaaagcagtgaaacaatttgatgggagagaacaaagaatcaaataattatattttagcactaatttctcatgtcggtaaaccttaaattaatcaaagtactcaatcttggtaaataaaggtttgtgccatacataatcaaagttatcaatcttgtaccccaatttatggttgtaaaaactcttttaacatgctaaaatcttatcatacagaactaaaagctcgtaacattaggagattgaagcaaatgaataattgaagagagaatcagaagatgtaaagtggggaaagacgagagagattctacgagcaccacatattcgtattattatttcaccatcgttataagacatgcaagaaagcaaaaaaaacaaaggagaataaaagaaaaaaatcagacaatatattggaggaccctacaaagcaatataccaccaaaacaacgactcttgtacatatccaagcgtaagattttgtggattgaaccaaaaccatcttttttatatagcaacttttaagctaaagagactaataagaagttttctgataaaaatcatttccagaaatttcacgcttcttttttttttttatatatatttgctgattatttttttggctttttcttgtgtttctgattattgttggtgagaagagtaagtgggctggttttttattggagaaaaggcgttggtgaagtttctacttttgattctgactttttttttgccggcgatgccgacgccggtgactacggcgagagaatgcttgacggaagaagctgctcgtgccctcgacgatgctgttgttgtagctcgtcggagaagccacgcgcagacgacgtctcttcatgcagtttctgctcttttagctatgccgtcgtcgattctccgtgaagtttgcgtctcacgcgccgctaggagtgttccttactcgtcgcgacttcaattccgagctcttgagctctgcgtcggtgtatctctcgacaggcttccgtcgtcgaagtctccggcgacggaagaagatccaccggtttcgaattcgctcatggcggcgatcaaacggtctcaggcgaaccagagacggcatccggagtcgtatcatcttcagcagatccacgctagtaacaacggcgggggaggatgccagacgacggttttgaaagtcgaattgaagtatttcatactctcgatccttgacgatccgattgtgaatcgggtattcggagaagctgggtttcggagctccgaaattaagctcgatgtgcttcaccctccggtaacacaactttcttcccgtttctctagaggtcgttgtccgcctctcttcctctgtaatcttcccaactcagatccgaatcgtgagttcccgtttagtgggagcagtggtttcgatgaaaattcccggaggattggagaagtattaggcaggaaagataagaagaaccctctgcttattggtaactgtgctaatgaagctcttaaaacgttcacggattcgatcaacagtgggaagttagggtttcttcagatggatattagcggattaagcttgattagtatcgagaaggagattagtgagattttagccgatggatcgaaaaacgaagaagagattcgaatgaaagtggatgacctaggaagaactgtagagcaaagtggctcgaaatcggggatagtgcttaatctgggagagctcaaggttttgaccagtgaagccaatgcggctcttgagattttggtgtcgaagctttcggatttgctgaaacatgaaagtaaacaactttcgttcatcggatgtgtatcgagtaatgagacttacacgaagcttattgatcggtttcctactatagagaaggattgggaccttcatgttcttccaatcacagcctctactaaaccttcgactcaaggggtttatcccaaatcgaggtaatgcttttgctatttccattaacattataagtgttatttatgcctatcaaaacaatcagtaaacttgtgggaatagtttattgcttgcgtcaacgtcgataacataaaacttaaatattttgacatatccactttccttctcagctttatgcttcccatttttctgagagtagacattaatgttctgtcttttctcaaaactatgattcgactttgcaactgatcaagttcgtaattggatgaatctgttggttacagcttgatgggatcctttgttccctttggagggttcttctcatcaacatcaaatttcagagttccattgagtagcacagtgaatcagacgctctctagatgccacctctgcaacgagaagtatttgcaagaagtagccgctgttctcaaggccggttcgagtctttctctggctgacaaatgttccgagaagttagccccatggctacgggctattgagaccaaagaagacaagggaataacaggcagcagtaaggtgcgtttttattaacttcttcctcatttgtagtcgcttgtaatggtgttgatatagtatcttgttcttctgattcagtgcaggctttagatgacgctaatacatcagcctcgcaaaccgctgctctacagaagaaatgggacaacatatgccaaagtatccatcacactccggcgtttcctaaacttggttttcagtcggtgagtccgcagttcccagttcagactgagaagagtgtgagaactcctacaagctatttggagacgcctaaactgctgaatccgccaatctcaaagccaaaacctatggaggatcttacggcatcggtgactaaccgcacagtgagtttgcctttgagctgtgttactacagattttgggttgggagtaatctatgcatccaaaaaccaggaatcaaaaacaacgagggagaaaccgatgctggtgactctaaactcttctttagaacatacatatcagaaagatttcaagtctctcagagaaatactctctcgtaaagttgcctggcagaccgaagctgtaaatgccataagccaaattatctgcggatgcaaaaccgactccacgcgaagaaaccaagcaagcggaatttggctggctcttcttggacccgataaagtggggaagaagaaagtggcgatgactctttctgaagtcttctttggtggtaaagtcaattacatatgtgtagattttggggcagagcattgttcccttgatgacaaattcagaggcaaaacagtggtggattacgtaaccggtgagttatctaggaaaccacactctgttgttttactcgaaaacgtggaaaaagctgagttcccggatcagatgagattgtctgaagctgtgagtacggggaaaatccgtgatttgcatggaagagtgattagtatgaaaaatgtgattgttgttgtgacgtctgggattgccaaggataatgccactgaccatgttattaaacctgtgaagtttcctgaggagcaagttctcagcgcgagaagctggaaactgcagataaagctaggagatgctactaaatttggggtaaataagagaaaatatgagctagaaacagcgcaacgtgcagtgaaggtgcaacgttcatatctggatctgaatcttccagtgaatgaaacagaatttagccctgatcatgaggcagaggacagggacgcttggttcgatgaattcattgaaaaagtagatggaaaagtgacgttcaaaccggttgatttcgatgagttagccaagaacattcaagagaagattggttcacattttgagcggtgctttggatccgaaacacatctagaacttgataaagaagtgatccttcagattctggcggcttcatggtcatcattatcatcgggcgaagaagaagggagaacaatagttgatcagtggatgcaaacagttcttgctcgaagctttgctgaagcaaaacagaagtacggttcgaatcccatgttgggcgtgaagctggttgcttcttctagcggcttagcttccggagtagaattgccggcgaaggtggatgtgatatggtgacatgcatatatataaatgaggtaataataaagagttataatcctcagattgtttttctcatggaaagttttttgcttgtgtaaattacaatgtaaaatggctaagctatcacttggtagataggtttgtttaggagtaccaatttgccacatcttttttggcattttgagttttaggtatttctcctaaaattttccccaacttccaaatttagatgaattaaaccatcttctctgtaaccgagtttgttgtatattatgttacgtttgtcgaaatatagaaacgatgctttccacgccgatcaatagatgaaacgatgctttccgctgtgatcaatctaactcttacggatcatgttgcagagatgatgatcatcatcatcgaattagaagaagctgcgtttttttttatctataaagcaaaagtgtctaatctcaatcgatggatccatgttatatatacacacaagagtgagagagattacaatagagccgttggaggcggttatgttttcttattttaatacaaagaggttcaaaggaaaaggaaatttgtgaatactctcttgatattttcttacgaaaccgtactagtcgcttcttcttctattagtgtgacaaggcaattaaatttcctctgaaactcttcttgtctcgtcacttcaagattctgccattcatcccatctctctgcaagcccttctccttctagcatccttactatacttccgacatcgctggtcggtgtaataagcctataacttcacattttattttatttggttaatattatgttagacaagaggtcctaataagaaattcatagttgagagatgttcatatcttgttttgaatgctagctcgaatatctgctcatattcatccacaaagtgaaaacatggatcccttctttcccattgttgggcagctcatcaacgtctctccggtcagcttccgggaatattatagtcttcactagacttccgagaatctttccagttagagtgagtctcccagtcattgcaagatccttcctcacaggtttcttcatggcaagtgataaaaaggatgtgatcatatatggttgcagcctgcgcttgtaccgttagctctaggcaaatcatggaattcgcaaagaaggtgttctcaggttgtctccatgtatgatgtatgttgatgtccaagatcgagccatagcaatttccgttaggaaaagtgaccgttactgtttattttttgactgcataacaattttttttttttttgtcgtgactgcataacaatttatcagagaaaattatttactcacttgcgtttctttcaaaattagttgtttcatcagttttatctgtaattaactcttgagagacaactgcactaataaaataattgttgccatttccactaaaatcattgatattatcaaatattcaatgaagcaaaacacctaaaaacgatctcgatcctcctgatgagaatttgagaatctaaataaaacgaatctgatgatgatatattattaattataacccccccccccccccccccacaacaaaacaaagtaaaaacctaaaacatcggagcttacttgtgccgcaagccatcattagctttgtccttgatcgaaaaccgaattcgagactatccacttattttattatatctagtgtattcgatgtaagctaattacaacaaaaaaaaaaggagagaagaaaatgaaaaaagagttgtaggagaagtttgaaaaataaactttagaagttttttttttttggtagggaaactctagaagttttgagatgcactttctgtatcacatgaatcatgtggaagtggaaaactcatataaatcttataatagatattttaaaataattttacagatatacaagaaatatttcaaatgtttgatacaaaaaatattaaacccataaaactttttctactcttatgcaaaagcaaacattttttactaatcaatctttaaccatagcttataggttttttcaatttaattgttcaattttaaaaatgttgaaaactaactgtgcttagtcaaaagttaataccatttaaattgactatcagtcaaaccagatgattcaatttcaaagtcaataccctgtctttctaaaatgctgaatttcattgaattgttccaagtaaacaacatatgatttcaactgattagaggtcataaagtgaacaagatagagacatagagaagaagaagcacgtggcgaagtggaggggatatggatcagattcggctaatgtcccgaccaaagacaaaggtagtgagccaattgatagcaacgtagaaacggtttctccagctgacgactcgagtcagataagcagacctccatatgaaccagctcagaaaacctgccattgatattcctttcccttcctgcacaagaaaactccctcctcgagtttagctatctactattattgtgttttgagggatttttaagtgaaagagaatgagagccttttcttttaaacataccttgctctcacggagatcaacgagagctttgtatctcccaatagtagccatacttccgagatgtttatacacaaatggttccccaagctccatttcctttgcgctattggcccgtcctcctccagcttttcccatcacgttaaacagattcgccaagtatttgccttctctctcagccaccttcattgatcaaagagacttgtatgttaagactccgagtatagaaaaaaagtaaatagattcttttacaacattagagacctgtgcaagtgcaggaagtgttgatttccctgtgctctcgagataaccgctacagtcaccaattgcaaacacgtcttgtacagaaggtacacgcatccactcatcaataccaatcctatcgaaacagagtgatccaagatcagaaaatgtttttttggagggaaaaaaacagaacaagctttctgttgtgacattggaactaacataccttccacctggatctttaggaaaatcaagagacctcacaaatgaagatggaccaacaccagttgaccagactaagggaccgtaaggaacttcagtgccatcatcaaggattagcttctgaggcttcacttctttcacaatcccacgcacaagcttcactccagactgaagtcaaaactagcagattttcaaaatccaaattctctcaatttaaagcatatgaagtttgcatatggattaactataataaccttgtttaactgcttgattgcatagtgccttagccgatcgtcaaaagaagaaagtatatcccttgcctggaaagaaacaatggacaaaatttcatatttatgaaacagatcatatatatagtagtttttatcaatgaagttataagctaagaaaacctcaatcagagtaacacgaatgtcgtctttcacatgagaatatctctgacgaacatctttcatgatgaaatcactcaattcaccactaaactcaacaccagttggcccacctccaaccacaacgcaatgcaacagcctcttcttctcatcttcacctatgcctaatatataaatttgcgtgtaatgatattagttttggttcaaaggtaaataaataagtggatgatgaatgtgttgtttactatatatacctggaacttcagagagcatgaggttaagaagaagcttcctacggatctcctgagcgtggtgaacctcacggaggaaaatggcgttttctaagacgccattaattccaaatgtggatgcttctgcaccacaagctagtaccagtttgtcataagctatcttgaacttccatggcttcaatgtgctagacccctcagttacagtctcacaatgcacctgtttaaaccaagagcatgattcacacatatcatatacaacagtccaaagcactctgctttcatcacaaacacaaaagtcgcgtttgcgtttacaatttggaaattttgatatacctaaatgtgaacgcaaaattagcgtttgaaacaatgtctaaacgaaactacttctacatccacaaattgtagaaaaatccaaacataaaactacaaaaatagatacatctgcaagacttttcctcaatttcaagaacttcaccaatattaatatccaattagcaattacctcatgattatcagcatcaagtttggagcaattagcaaggaagtaataagaaccgggttctcgtgaaatcgccggttggatacgagagattggttcagcaacagacctaaactcaagcgtaccaacgcaagtagaagccaagagaggagtgaagaccatgtggttcctaggagagacacaaacgacgtcgtaaatactagtatcgatcccttttaatacccgacaacccgcccaacccgacccgagaaccaaaactctcggcttctctccctctttcgtcggagccaaaccgtcgtaacgttgtggctccaacgcattaactacatcctcctttgcttgaaccgtgtcggttacttgttgcttttgcagagcggtgcagaaacgggacgagagagtgtaggattcggggtttctgaacacgtttccgacagacgaagaagtggtctgcgagattcttgctaggtttttgatccacaacatgattctttaggtactcttcttcaatcgagagaagcaaataatactccaaacctaatgtggttaagagaatcgaacaaactctgctacgagccgcctttggtatactgtattattcactgtaatacgtatgagaaaaacctacgtgccagattaggaaatgacaggtggcactctgtttctctttcacccagaataaatggaaaataactcttgatttctttttggtagccacagaaatattaaatgtttagaaaacattttcagtgtatgccattggttgggcgttttttaagtggtaaacaaaatcgagataagttaaaggtgttgaaaaatttcaaaaataaaataacaagaaacctcagcagaacttgatgcgcaagaaacgacaatagaaaaaacatgtgattcactaaagaccgatgtgggccgcaagaaaaggatgtcggagtattcgctgaccttgatcggttgtaattgtatcgcgaggggtgacgtatccagagatcgtcgccccaaagcttattatcactagtttatggcccaatagcccgtttatatacatgatttattattttgggtttatggcccacgataaatgggttacatattgacacgagtttgaaatggtcatgatatggaaggggtcttaatgtcttattgtcatacattagaagtcacttgaaatatctgtagatttagtattcaagttttctaattcaaattttcattatgtggcattatgtagacagtctaagtaacaaaagtatgaaaattatgtgaattctattccaataatatcaccggactcatgaagtttggttatggccgttctatgattctatagtaaattctagttgtaatgagaagcatttactaaacacaacttccaatcatgcatctttctaaaacctcattcacaaacttattcattagcttgacaatcaattataaagaaaaccttaacagtgactagttcaaactcacaatcacgagtagagcattaccataagtaagatcaacttgaaatattttgaacagaggagatcacaacgtttaacagctgaggcattacttaagatttctttgcctattacaacaatctttaaccgcatacaaagtagcacaaaaagatcatcaaaactggaaagcaaggattatatatatacaccaaacggttcataaaaataaaataaaaattttgcaaattatacgtgcttaattatactcttgactactgaaatttttgtctttctttttgctctattttttttatccatctttagcattgtggtcatgtgcttctgtttcggttgtcacctttgttattgggatttttattttttctgttgacaagttgagaaatttttgaaaggtaagaagacaaaataaataaaaagattatgcattgttgaccacggaaaattaaataattatttttaccattcattaaacattgagattagaagatacgagtctaggtgttcattactaatttattaatgtatcagaacgtattatttgatggaaggtttttattgttcagtatataaagagatgacatactgagagaaaatgagtaaaattaaagatcttaaatgtatccaaaaccatatttttttatttttatctttttatttatttaccctctccgacctcctccacgacgccttccaggtggattgtgtttggcgttggccgatggctcgccgtagtcgttggtgctcaccatcaatgatctacccctcaccatcatcttttcgttttctgtcatgcatgcaggtttaacatatattacgaagctaaaacttagataattacgaaagtaattaatccaacgatatactattatggatttcaaaattcgaatgaggagtttatatacaactccaaaatttgatcttttctgtatgtagataggatgatgagctcgatttctcttacctgaaaatgaaaaagttagtcgagccgaagagacgattgaaagtgccaagaaaatgcataaacacagccgaattgcataacaaaaaaccatcttctcttctctttcccctttttctcttcctctttctcttctctattcaactatatctctcgtaaccctctccttttataaacgtgaaatggaaatgtattcattaataataaagattaattaaccttatttttcaaactactttaatatatatatttcggacagtgctacataaccggaatagtgcaatttattgacatggaagcattcctacaaacatatcattttgaatgtctaacccaaattcgagcaaaatacatttataaggaattagggcacaacaaaatttaaaacattttgattaaagattggtgtagatacctgcaaaggcatgtggtttgaaatattttgatattaaaagtctgtctattacaacattttacatcactatataaatcttgtgtttcattgtttcagtggtcttccctgaataaatcatcagcgtaaacgtttcttacaaattaacgtttttcttaatggctagctacaatatcaaattttcgtctaaatattttttgactcgtaaatagcaattatttagattatgattgaattaattcggctagaaatacaggatctgtttcgaaataaagtagctgatgtttaacacgtgtcattgtcttattggagataggagttgactattgcagacaaattgtggattccacactgttaagttaacagttaacacataaacgaagcgaacatgcatgggcagttgacttacaggcaccgtccgatataaaaagtcaacgtctatatttttggcccaaaaaagggattttggggtttccttactttgaaaacgaatatttctgaattctgacgatcatgtggggttttttatgtaatggatgataacctttttgtcgacgttagagagtcagagttattgcgtattctttaaagttttaagttgacatttatctagaaaattatagttatcgcccagctatgtattcaatcatagctgaattcacaagtggtaatgctgttaaaacttaaaagaatgaagttgatttatacacaagattacgttaattttgtgagtcagataattcattggcaaacacagagggacggtgtttctccagaaaacttccgaggcctaatccaccaactgaatcatatttatggacaaccaaacgctaacaatcacataattgacaaccacttaagaaacagtaaccaaccatagcaatggtaataaggctgactaaatcaacaaaccataatccttagtttgaacccatgtcttaaattacttcaccggataaaatttccttaacacaaacaagacaagtacagacactttcctagcatcaataaataaaagatcaatagctcaagtaacaacaaactactatcgttttttgaatccatatttcttacgttcatagaacagatcagttttggcactgccaagattgactatcttaggacaaccatctctatctttctcctgttgtgtacactctttgcagtagtaagcatccgagattccaactcctccgcatatgacacaccgcccttggaacgaaccatagttgcattcatcgcaaatcctaaccagagtacacgggcggacataggaatcacatatgacgcattttccatcacacttctcgcacagtcgcccaatagcaatgccaggttgtttccggcacatgatcaaatcaggatgatgcttggccatgactgcttaaagaagatcttgctcttcctcgattaagaagattttgacctgcaaataacattggttaacaaagtaaagaaaacacaatttttgtttctcagaggcatttcaacaaacacctatcaggcagcagttattctacttacagttccactcaagctgaaacttttctatatccaattctagctaaatcaatggaacgacggtaaattcttgaagttcactgaaaagtgaacaagaaacgaagcaacaatggaaaccatcaattcgctgaatcgaacacagataaacaagagaaagctgttcgagcccaaaacggagcggcgcaaaagaataagcatagacaacgctaaaccctaagaattcagagaaacatgaacacggaacgaaatttctgaatcagtaacatctatcacgcataaatcaaagttaaaaaacaacaaaggaaaatattatcgaaactaacctcgaaggagaacgaagaagaagagaaggtgtctgaactagcgatccctgatctccgagccgccgatccgaacaagagatggctctgcaaataaaacgacccgggtcgggtttctaaagatccatgtaggtccgacttaatatgggctatctcattaaaggctttcctgatgggctttttaattttaggtgttgatttctttcctatttcggccttatttgactttttatcttcccaaagtcatttaatttctggaaaatcgcagttgacaaagaaaaagcagaaaaaatggactgtggcggtggattcatgatttgaaaaagtcaaagagaaagatgagagtggtaacgtttgacctggaagaagaagaagaagcaacggccacagagaaacagagaaagacttgtccaggtcttatattatatattcaagcctctttcttctctctcgttgacactaaacagagaaacacaaacgtctagaagactaacaatcaaatcaatcatcagaaaaaggaaacttttaagttttctacgaaacgatgtcgtcttcagttgccgtttgcaactcaccggtgttctctccgtcttcgtctcttttctgcaacaaaccgttgaacacttctccggcacatgaaaccctaaccctgtctctttcccatctcaatcctcccgtttcttctacttctccttccgccgcgtctcccacatctccgttctgcctccgtctcctgaaaccgccggctaaactagggtttggatcggactctggtccgggaagcattctgaagaggaaacgaccgacgacgcttgatataccggtggctccggttggtattgcagctcctatatcgaatgcagatacgccgagggaggagagtagagcagtggagagggaaggtgatggttactctgtttattgcaagagaggtaaaagagaagctatggaggatcgtttctctgccatcactaatcttcaaggagatcccaaacaggtaatttcaattttcttccgtaatttcgagtttatttactgattattgcttaattagtatgaattgcgatttgaagatgggtaatatataacttaaaatttatttatgctgtgttgttgactcaatgaatcaaattagaagttctaaagattataagaaaattcagtgaatcatatatatgacaaattgtatgagtagttcttgattagatagaaccaatgactagtgttcaagaaaaaaaaaaaagatagatccagtgacttacaaaatggggatttaacatttttagcttttttataaccgcaggcaatattcggagtctatgatggtcacggaggaccaacagcggctgagtttgcggctaagaacttgtgtagtaacattcttggcgagatagttggtgggaggaacgagtcaaagattgaagaagctgtaaaacgtggttatctagcgactgattctgagtttctcaaggaaaaaaacgttaagggcggctcgtgctgtgtcacggctctgatcagcgacggaaatcttgtggtggccaatgctggtgactgccgtgctgttttgagcgttggaggattcgcggaggccttgacttctgaccaccgcccttccagagatgatgaacgaaacagaattgagagctcggtaagaattcttgcaaaagaagttactgttaggttttatcatgattacatggttctgattacgataatcctgcagggcggttatgtggatacattcaatagtgtttggagaattcaaggatcattagcggtatctagaggaataggagatgctcatctcaaacaatggataatatctgaaccagagataaatattctccgaatcaatccccaacacgagttcttgatcttagcatcagatggtctatgggacaaggttagtaatcaggaggcagtagacatagctcgaccattttgcaaagggaccgatcagaaacggaagccattgctggcttgcaagaagctcgttgacctctctgtatcacgaggctccttggacgatattagtgtgatgttgattcagttgtgccacctcttctgaccataggagaaatgtagagacagaataacaacgttagagtctgaagtcattcttaatttcttacattttattttttattgttttctaagcattcactgtgaatgattcacatattcttttattcgtttttaacttcatttagtcatttgagctgttatgatacttgtgtataccatcttagactgtctttactctctattgataatccttatagccttataggtcttctatgtaaaaactcgttaaggcttgtaagttgtatgtgagtactttaccactcaatacattatatattactactcttttatgagataatgtggatcgacttaaatgtgtaggctagtactggtttgtttcaagagttcataaaattcatgttttgaaagttttttacttttacgtttatatggacgcgtatttcttaactacgttagttcataaatatcttaggctcttagccattaccttaatcctataaaatattgaaaagtctgaaagtttagtacggtattaagtacatagtgcaatgtcattttcttaagttgttttccaagtggattctcctagacatgcaaattggaaaatatggtatgggtcctaaaaatcttcaaataatatcttatgttttggacatttctagtaatttattcacccacacatatataaaaggtgaaattagttgccctaagaggatatggaagcagtggtggaccgttcaaatagcacttcacgttcgcggaaggtcaaagcttggccagagaaacaacaaacaaagtacatatataatttagttgcggcggcattttttttcttttggaattaatggaagaaaggtttctgtattttgaaataattcaaagatcaaagaaagattatagtgcatgcataaaagttcgaattctaatggttagctaaatcattagcaagctttgaccaaacttcaatcgtagtttcaaaacactaaattgatatgttatcaaaactttgatctttctaccactaccaacccactataaatcccaagaaagatactattgtagtgatctggctattaaccatcccaagattaattcccaaccaacgatctcctcaattaaaagttaaaaccctatcttttattttctaccttccatcttcaactcgatctccgtgatatctttggataacgtttttgagtaaattcttgtgcttccttcatgatcccaaccaaacaaagaataaaaactaatataatattttcactatgcgtggaggttgatcaagcacgtcaattcccaatatgtgtgttcagacaactcgttaatatgtcaaagaacgtgagccaaccgcttcatgccacgtaagtttccaaatggacccccatttttaaaacccaacccctttcggcaacctcttccttcatctccaacccctttgacaactccgataatttattcggatatcatctacttcgcgtatatattctgttactgtacaccctcaccttctttatgttaattgtttgacgaatataaattaatttatgtccattgcttatgattggctaagacatggtttggattcatgaatccttgataatgatttgtacgtacgtcgactaccgtatattccatgtctgatcatgtcttcaggtcaaccaaatagaaacataccagaaataagtcaataaatcaagcgttccaaatctataggcacgtttttgttcatttgtcttctccacgatcggtgatccgatcacttaagtaaagagacgattttttaaatgttgaggttataaaaacgaaaacgattgcgtgaagctagagggtgtgtgtgattttatctttgctgagtaaaatattagcggacaagatcaaaccgcaacttgagtcttggtggataaggattaaggagacagggcaagtgcattgtttcttaaaaacatcccaagaacttctccaagtgtcattaggagtgacataaaacattttcttctaatttctaaaatgatcctttttctgatttatttgttctcttttcaaaacgactaatcattccataaaagtaaaaaatttgtaaggattaagtctagatttcaatagatgtatatataattaaaattgttaaaatccaaaccgaccatcgaacatggtataatttgttcaaaaatctaatgatagactcgaaagtttgtgttgtacatgacatatccacgtgggaaattttacaaagatgagactttacaaatcgaaaagacaagtgtacaagaatagtccatgtcagaaacaaaaaaaattgcaactttatttcacgttcacattttctgttttgcagttccaaaacacgcatataaatagcttcgtgttgcacaagtacgacatatgaaagttggcacacatggagaaacagagcatcagaaacacttgttcttcttctttaatgttatcctcaccatcttctttttgggttcgtggtgcgtgtatcggcagaggttgtttcggtgcagttagtacggcgatcagcaaaaccaacggtgaagttttcgccgtgaaatccgtggatctcgccacgagtctccccactcaatcagagtctctcgagaacgaaatatctgtcttccgctcgctaaagcctcacccttacatcgtgaagtttctcggcgacggagtctcgaaagaaggaacgacgacgtttaggaatctctacttagagtatctcccaaacggtgacgtggctagtcacagagccggaggaaaaatcgaagacgagactctgctccagcgttacacggcgtgtcttgtctctgctctccgccacgtacactctcaaggattcgttcactgcgacgtcaaggcgaggaacatcctcgtcagccaaagctccatggtcaagttagccgattttgggtcggcgttcagaatccacacaccgagggctctgatcacgccacgtggaagtccgctttggatggctccggaggtgatcagacgagagtaccaaggtccggagagtgacgtctggtctctcggctgcacgatcatcgagatgttcactgggaaacccgcttgggaagaccacggaattgactcgctgagtcgaatcagtttctctgacgagttaccggttttcccctcgaagttgtcggaaatcggccgtgatttcctagaaaagtgtctgaagcgagacccgaatcagaggtggagttgcgatcagcttttgcagcatccatttctctctcagtgtcacaactcatctccgactgagtcatctccgcgttgcgtacttgactgggtcaactcggggtttgacttagaagaagaagaagaggaagtagggagatcagaattcgaagacgcggcgaaggcaataatttgtaatttggcgacgaccggaggagtaatttgggagtcagatggttgggtggaagttagatgccacgcttcggaagaggaagggacaacaatggaatattcgggatccacaagggtagaatcggaatataacacatcatcggatccaaacgatgacgtggctggtgactcggcgataattgacgtttctatgtctcagaatttaccgcctggaaacgggggatcggcggcggcgctgccatatgaatttgtggtggttttacatttattaatggaaattatggtttatactacatgtatctttagggaaattgttctcactatgtatttgttgtatcagtataatcaaagcaataaactcgaaacgttgtcttttaatcacagcctcaagttttgtttgtttgcacatgtgattcggatcggacaaaactatcttttacgcggtgagatgagatcgagtgtcttaattacgagccattgccttatattgataactctcgtttacagccaaatagttgtattttaatgtgaaaaaatattgcgacaaatggttttggttcgtaagctggtggaagactcaagaggccaaaagagactttggttttatgctttagaagacttttgattcatcctaataagtattcggattttggagcatttaaatgaatcatagagggaaccggaccggttgaagatggttgtttgtttcgactaggcctgaaggaccaaggttatgcatgtacgattatgtatcaaactgaacgaagtcgttacatagagtttagctcaagcatatcatcatattcttttttcgatctttaagatttttctctaatctctatgctataaatcattaagatttctctaaaaaaggattaatttcccttgagataaatagctttaaaaataacccagatacaatgggtttatatgggccatatatattttttgtcataagaaatcggcccatagttagcttcaattcaacgccgtataactatgagtcgttccgatttcctgtgttgcgaaacccccaaattctcttctctctatctctctcgcgtacgccgcaccgtagcgaccaattgaatccacgaggaaatctcagtaaatactatggcgaccaacgaacccgagcacgagcacagagacgaggaagaggccggagctaacgaggatgaggacaccggagctcaggtcgctccgatcgttaggcttgaggaggttgccgtcactaccggcgaggaagacgaagatgccgtccttgatctgtaagtgtttttcttaattggtgtttatagtttttctgatctaggtcaactggatctgatcgaatttataaggtttagcttttggtgtgtttgactgaatttttgtttgtgaatctaaaggaaatcgaagctttatcgattcgataaggatgcgaatcagtggaaggagagaggagctggtactgtgaagttcttaaagcataagaacactgggaagattcgtctcgttatgaggcaatctaaaactttgaagatctgtgctaatcacttcggtataatttctatttggactactttgtgttgtttttgagttgcatctggatctgtatttaggttactgtttccttatctagtcttatgcttctgatatttctgcagttaaatcgggcatgagtgttcaggaacacgttgggaatgaaaagtcatgtgtgtggcacgctcgtgactttgctgatggtgaactcaaggatgagcttttctgtatccgatttgcttctattgagagtgagtatgaaaccgaattttgtaatggcttgtgttttgccttatttagtctcagttggtttgatagattcacggattagattactgatggatcttgaccttagcattgctatatggctactttgttaattggaggttctcaaagcttccatcataggcatgcgttattgggttcaggaaatatcaaaataagtactgtggcggttaggttgtggtattgcattgtaaagagataatattgttcttgaggtggtcaagtatgtatttaggctgcaactaatttgatatgccaacatggtcgactgtttctttttttattttgggtaaatattatcagtagtttctgagctgttgatcatattaaccgggaaaagtagagatgcttgtgggtaatcaaatcttattttccttgtcagattgcaaaacatttatgcaaaagttcaaggaagttgctgagtctgaagaagagaaagaagagagcaaagatgccgctgacactgctggccttcttgagaaattgactgtggaagagacaaaaacggaggagaaaaccgaagcgaaagctgtggagacggcaaagactgaagtgaaagcagaagaaaagaaagagagcgaggcagagaaatctggtgaagcaaagaaaacagaagaaagtggtccctcaacataagaagcgtcatcatttaagttgccaaatcctggcgaggtaattaagcctcgaaatgttttgatgcatcatgagtctaccattgtcttggcactatctatctatacatgttttgtcgagtcatatcaagtggttgggggatcgcttggggtcgggttttactgaatgctgagtcgttatgggtctaatagtttttgagtctaaagtgtcgggtgatatgagagatttgggtgaaatattttttcatgttggttatctgaaagagtacattggtttcattgttttaagttttctcatggatcctttttggatggtcttattttgaggatacaaatgtgtttgtccatggacaagaatcagaagtctccattttttttttttcaaaatttaatgcatgtgattttttaatcttaaggtaattgccaattgtttgacaaaaaaaaggtaattgccaatctactttgctctcttgtgttagtcgatgctagtcttgaccctgataaagatccaaaatgtatattaacagtattcataaaattcttcagttataacgaactgttcacggaaaaaaaatgacattgtactatactgtgctaaaattaccaaagcatgatttatataaatcatatccagtaagaccatatgtgaatgaataacaatggattatgcttaggttaagattttattaaatttataacacttttaaaataaatttggaataatacaaacatataaaccattcctataacaccatatttaaacataacaatgaattgcttggatttcaaactttattaaatttggattttaaattttaatttgattgaattatacccccttaattggataaattcaaatatgtcaactttttttttttgtaagatttttttatggaaaaaaaaattgattattcactaaaaagatgacaggttacttataatttaatatatgtaaaccctaaaaagaagaaaatagtttctgttttcactttaggtcttattatctaaacttctttaagaaaatcgcaataaattggtttgagttctaactttaaacacattaatatttgtgtgctatttaaaaaataatttacaaaaaaaaaaacaaattgacagaaaatatcaggttttgtaataagatatttcctgataaatatttagggaatataacatatcaaaagattcaaattctgaaaatcaagaatggtagacatgtgaaagttgtcatcaatatggtccacttttctttgctctataacccaaaattgaccctgacagtcaacttgtacacgcggccaaacctttttataatcatgctatttatttccttcatttttattctatttgctatctaactgatttttcattaacatgataccagaaatgaatttagatggattaattcttttccatccacgacatctggaaacacttatctcctaattaaccttactttttttttagtttgtgtgctccttcataaaatctatattgtttaaaacaaaggtcaataaatataaatatggataagtataataaatctttattggatatttctttttttaaaaaagaaataaatcttttttggatattttcgtggcagcatcataatgagagactacgtcgaaactgctggcaaccacttttgccgcgtttaatttctttctgaggcttatataaatagatcaaaggggaaagtgagatataatacagacaaaacaagagaaaagataaagaaaatgggtttgagaagaacatggttggttttgtacattctcttcatctttcatcttcagcacaatcttccttccgtgagctcacgaccttcctcagtcgatacaaaccacgagactctcccttttagtgtttcaaagccagacgttgttgtgtttgaaggaaaggctcgggaattagctgtcgttatcaaaaaaggaggaggtggaggaggtggaggacgcggaggcggtggagcacgaagcggcggtaggagcaggggaggaggaggtggcagcagtagtagccgcagccgtgactggaaacgcggcggaggggtggttccgattcatacgggtggtggtaatggcagtctgggtggtggatcggcaggatcacatagatcaagcggcagcatgaatcttcgaggaacaatgtgtgcggtctgttggttggctttatcggttttagccggtttagtcttggttcagtagggttcagagtaattattggccatttatttattggttttgtaacgtttatgtttgtggtccggtctgatatttatttgggcaaacggtacattaaggtgtagactgttaatattatatgtagaaagagattcttagcaggattctactggtagtattaagagtgagttatctttagtatgccatttgtaaatggaaatttaatgaaataagaaattgtgaaatttaaacctccctcaatcttaaacgttatatcttttaaacgctaacttgttaaagtgaccaatggatgatttaatcatcatgattattattattcttcattggccaattattgtgggcttattagattcaaatttggttctcctctgttgtgtgtttagactatcaattatataaaaaaaagactaatgatggtaaaactcagcgtttaacttatctttttttcttgagaaatttctaataaatttgaaataaagaccaaaataataaaatcgcaatacatatggttttcaaagattttgcatacgaaatattacaaaataaacttaaacatagagaccaaaagaaacttaaacatagagttattcatttattatactaactctaatttcttagttttcaacattaacacagtcgttgtttagcttgatcttcttatttggtggttcaattttaaattcaatatgaaatttttaatccttttcagactttgtcctctttcctccgaaagactatacgtccataacttctcgactcaccagcgagttatggagaaactcggagaaatcggtagtgcaacaagggcaagtcatgatgtttaacttactttgtaacaaaagataatctcaccttcaaagctgtgatttagactaagagtgccattttggtcaatttatgttcaaattattttacatcattggatcagagaataagttagagttgaaaaacaaaatataaattaaaatttgatattcgttaatatattaacaaaattaaaattaataaataacacatcaagtagtatattaaaaaaattatatttactaaagtgtttatataaaaaaaattataaggccaacaattttatgtttttaagatccgaagatgattgataaaagaatccagatttttcttcaaaatatattaaaatgggcttttttctaaatgattatttattattttgttattattatttttaacaaaagtgcaaagaattttcaaaaagtaaaaaattaaaaaaattctaaaaatacccaaaatttctccacatgcataacaaaaaagtcctttaaaaaaaaaattatttgtcttggtcaagggctgaagacattaagaccatagcctgtgctaatctgcatgtatttgtgtgatctgtcgaataaaaagtacgtgaatttgcttacatattgtaggagcttcctttcatgtataaccttttgctcaattgattatgtaattacaatgtttttaccttgaaaataaaataatacatacatttttaaaatatgtatctcggcagcttaatgagactatttcttcctctttccctttattttttcttaaaaaaaaactctaaagtctaaaccaaattaatataaatagaaagcaaaagggaaaggtgaggcgtgagacacgtaaacaaaaaaaaagaaatgagtttgagaaagacaactttggtgttggtgtacattctcttgatctttcatcttcagcacacatttcatgactctccctttcccaagttgattaactttgaatacgaacacgataacaactttgaccaagctttaaacactccaaccagtgcaagatctccgcgttcgggtctctctcggccaccgccacattagccgtgatctgcatcactcctctgtacgagccgacgcggccgcgaacgcgagccacggctccgattctgatttgtgcggcttgtttccgcgcggcacttgcgagcagcagaatcgtggctggatcccaccgggagaagtaagaagacgtgagttggttgagccacatgacgcacgtgacgcagccggtgccatcgtcgacgccgaacttgagaaactttggggtcagatcacgagagacgattgtgcctactatctctacgcgtgaaacgcacgctccgccaagcagagagaaagagttggattctgtaggtgactgtgtcaggcgttggatgtcacgcgccacgagttttgcgtgtgtgctttggagggatcgatccatggctgggactggagagaagacaaaagatgaacattagcataacaatgaatattagggcaggaaatcgaagtactagaaagctatattgcgggcaagcgatattagggaattgctgatttttttctaataaaaaatcggatgatgaaaatatattctataactttattgtaaagcatacgtactcagattactaaacttttattcattttgtggtagtatagtcgcttcctacggtggattgttaatttccggaaccaattaactgtagaatctttcagggttattttctcctttttaggttggacatcaacgttattaggtgcttagtgcttactttaacttctcaaaaaattagaagctagtaaagaaaccatcttatgatagatgacaattttgagttctcactacatgatgcaagttttccaatgaatctggcacacttgcatacacttaacagaaagttttaagaaaataaaagacaaagcataactcctttttactcttgctttgacgacaaaagaaggttttgttttctagaatcgcgttaacaaaaagatgaaagctaaaaaagtaggagaaactatcgaatggtgcgatgtcattttcgagtctacctttgcttcagatgcaaagaatgatatagtcacaataaatgcctccaatgtgtacatttgttatgtaaatatgtcaaaagagaaatgtagttttggctaaacgagtgaactcaatttactaaattagagagaatttagagcgaagaggtgattatgaaaacattgaaaaggcgatttaaaaacaatcatacgtgtacttaggaggtggactaaaagtgggtgagagactgagacacgaaacttcatgagcaaatgaaaattacttgagacacaagtccaacgcgtacctaatggctcatttccttgaggactaaagctactgaagcttcaacataataaattagcttatatatctttgcttctcatgtgattaggaaggctaagttatgtatttgcttacctgtgacttatttgcggactcagaggatcttcaaacttaatctacataaaaaaaagaataagacaagcgcaaaagagcttagaccgtaaactcgcagtattccaggttcaattctagttcagtctaactacgaagagggtagtcttgttctgtggctacacttgtaatttgcaattaaccacacgcaaaagtgaacatcaaaggtttaggtgagtctatgatgcttctttgggaagtaatttaaaggcatgtgattaaaaaggtgaaaaattgccccccaaagaaaaacaaactcaatcccacatctaatagaacaaggggggatatacagacatgttacctaatggagaagatgattcagatctcctgcgtctggtgaaggagcttcaagcctatctagtgaggaacgataagctggagaaggaaaatcatgagctgcgtcaagaagttgcccgtctaagagcacaagtaagcaatcttaaatcacatgaaaatgagaggaaatcaatgctatggaagaagttgcagagctcatatgatggcagcaacacagacggatctaacctgaaagcgccagagagtgtcaaatccaacacaaagggtcaagaggtcagaaatccaaatcccaagccaacgatccaaggtcagtctacagcaacaaagccgccaccacctccaccacttccatcaaagagaacacttggaaaaagatctgtgcggcgtgctccagaagtcgtagagttttatcgtgccctgacgaagagagagtctcatatggggaacaagatcaatcagaatggagttttgtcgcctgcattcaacagaaacatgattggtgaaatcgagaatcgctccaaatatctttcagatgtaagtactatacaggataaactttgtccatcataacttagaagaggtggctaaatgaacaaccgtatggaattaaatgtccatcataacattaacagatctcctaacggtgtttgcacatttgcagattaaatctgacactgacagacacagagatcatatccatatcttgattagtaaagtggaagctgcaacatttacagacatatcagaagtggagacatttgtgaaatggatagacgaagaactatcttccttggtagatgaaagggcagtcctaaagcatttccctaaatggccagaacgcaaagtagattcactaagagaggctgcttgcaattacaaaaggccaaagaaccttggaaatgagattttgtcattcaaggacaatccaaaagattctctgacgcaggccttgcaaaggattcaatcgttgcaagacaggcgagtatgtctaaagaatataatactagcaactccctgatcttaaccaattacaagaattaaatcgccttaaatcttcacattttcaggttagaggaaagtgttaacaacacagagaagatgagagacagtacagggaaaagatacaaggattttcagataccttgggagtggatgctcgacacaggactgattggacaggtaggtgactgatagatgcagtatacgaataaaatctgatcaactgattatgattgaaaaagaacactagtaacaaattatggactatcacagactattattactaacaacacaccattggttgcacataaagtataatggcacaccattttaccaacttcaagaaaatttgcttagactcacatccaccactacttcaacgaaagatttgaggaacctttaccttgttgcagctaaaatacagctcgctgaggctagctcaggagtatatgaagcgaatagcgaaggagctggaatcaaatggaagtggtaaagaaggaaatcttatgcttcaaggggttcgatttgcctacacaatacaccaggtacatgaagtcataaactaatatgaattacaaaagccatgttagtattaggttctttcctaacattagttcaattcagtttgctggcggttttgatggagaaacattaagcatatttcacgagctaaagaagatcactacaggtgaaaccagaggataaggatgtaactgtttgagtgtcaacgacttgtgaaattatgacgcagtaagaaactagaggactaaattattgtactattgaagccttggttgctttagcaaatattttaatgtctaattgtcttgttcatcccaattttccaaagcaattagccagctaacacagaaacaaaaagcccacattcaaatgtagaaattgaaattggtattgaaatttgaagatagtaatactaaaacacctctggagtcatagattaacaactatcaaatatccaataacacaatcaattttaacaccaagtctcaatccgacggaaaacttcaggcgaaaacgaaaaacaaaaacagagaagcgaaagagcaaacctcggattaatacgagtgacaaacgactctgattccagtttctcttcggcagtcgaattttttatcatcaccatcggttttgtgatttgaggttttcgaaattcatggcgcttaaaacccaaaagagagaagaaattaatggcgctcaataaaactctcaggatctgaacgctgaaggagagtgaactattgacaaggctctattttaagatcgaccaaataaactctcagagcttctcaccagtcggtgacataggcccaataataaaaaacaagcccagcccaaaatgaagctaaaccaagttaaccaatcaccacgtatttgctcttatccggttatcccaatgcaccacagagaataaccggaatttcccagacaaaaaaaagctgcggagctagcgacttcgcttctctctttctctcaaatctcttatccgtttgattttttctgtgtcgcaatctcttcttcttattaattcattcaaaacagaaaagtacgggaaaaaggaattgagacggtgggtttcgatggggtcaggtgcatcgaagaatactgaggaagatgacgatggttccaatggcggaggtggtcagctctacgtttcactcaaaatggaaaactctaaggttgaaggagagctcactcctcatgtctatggctctcttcctctcatcggttcctgggatccttccaaagctgtgagcatctgtttgatttttgttttatcttcttcgtctttccttccgattcattcatcgggaattttgattgcgtttctccgtcgtcttgttgtcaattaattcttctttaacagcttccgatgcaacgtgaatctgcgttaatgtcggagctaagcttcgttgttcctcctgatcacggtattactcagtttggagaacttgtttagcatatttcgtcgaaatccaatgttataatcgcagagtgatttctgtgaattacaatctaagcttctgcatcgccctttttttggtgtgtagagactttggacttcaagtttttgttgaagccaaagaacagaaatacgccctgcatagtggaggagggtgaaaataggcttcttactggtggttcgttgcaaggagatgctagattagctctgtttaggctggaaggtgatgtgattgttgaattccgagtcttcatcaacgctgacagagtttctccaattgatcttgctactagttggagagcttatagggagaacctccagccttctactgtacgtggaattcctgatgtcagcattaatcctgatccaaaatctgctgaggtactttgttcttctacttttttgtttctaccgccattctatctatctgtgatgtattagttatgtgaactaaaacaacaggaatgattttctatgcctccaatttcaaagttttgactgcaacgtccatatcaatatagaattcccatggggagaaataaatcttatggactttgatgtctcatagcagtgtcctttagaaagtttggagctcgatcttgcacattatgaagttcctgctcctgcgccttctgcaaactcgtaccttgtttatgcggcggacaatgcagagaatccacgatctctttcagcttctggttcatttcgtaatgacagtactccaaaagcagcacagagaaattctgaagattctggtgttacggttgatggatccccatctgcaaaggtagtactttgtttagttgcgtggtagatgcatgttctccattaattaactttcggctttctcgtttaatcatccgcatacatctcacccataggaaatgacgatcgttgttcctgattcctcgaatatctattcggcttttggagaggctgagtcaaagtctgtggagacactctcaccgtttcagcagaaagatggtcaaaagggactctttgttgatcgtggtgttggctcccctaggctagtgaagtctcttagtgcaagctcttttttgattgataccaagcaaatcaaggtttggcctgagctagtttctatctttcagtagagtcatctgaaatttgagaattttttatatttttctcacccttgtattcgttttaattttagaattcaatgccagccgctgcaggagctgttgccgcagcagcggtagctgatcaaatgcttggaccgaaagaagatagacatctagcaattgtcctggtatttgtagccacatagatgttggtcatagtttctgcaggtcttttagcttatgtttcctagtttgattgtaaggagctggacgttgttgtggctggctattttatttaacttataaacgtaaatggaaaaaaaaaaaaaaagactggatgttctgattcacaccattcccgtcaaaattgtattaggttggcttgcctgctcgaggaaagacttttactgcagcaaagttgacaagatatctacgctggttgggacatgatactaaacattttaatgttggaaaggttagctattttgttgcaatgattcttgattttttttagcttatcctgtcattacgcgacccttgttggaaagattgactcaaacattgctccgtttctttgcagtaccgacggcttaaacatggagttaacatggtaaggcttggttcttaaaactgagttttataagtttctgtcctccttttagacgatttttgattgacaacgcatgagccttttgtagagtgctgatttcttccgagctgataatcctgaaggtgtagaggcacggactgaggtaaatgaaaaatcgaataatttagttaagccattttccgacagtctcttctaatttgtgtgtgtaaatcgtttttatgatattttaacttaaattcgtcatattttaattcagtggtaatgttaacactgtttatcttcttctttgcacatagttttaatgtatcacatgccactaggtagcagcacttgctatggaggacatgatagcttggatgcaagaaggtggtcaagtaagtatctttcggtttagatgtaagttcctggtttctatatcttgcattgtaaatagtttttagctgtaggttggaatctttgatgcaactaatagcacacgagttcgacggaatatgttgatgaaaatggctgaaggaaagtgtaaggtattgaagctttgatatactgtgatgttgtttctcatttaatggcacggttattcttctgcggaaagcatgcttggttagcagtttctattttcaaagaattgctttgatgcagcgcttgtaatgttgcatggctaccttcgactaatatcggatttggaattatcctcctaactgatttaccttttatctcttatgcagatcatttttctggaaacactatgcaatgatgagcgcattattgaaagaaacatacgtctaaaaatccagcaaagtcctgactattcagaagagtactatgctcgctctataactaatattttctcgtcctctttcacgggtcaactgagtttatgctactctgcagaatggattttgaagctggagtacgagactttagagaccgtttagccaattatgaaaaggtcggtacacaaacctgcactttctaaacgtgtcctaattactttttaaagcttagttaacttttctttgatgcaccatcgtcttggtacttaagacaaatgttgagcttactctttttttttgccaggtttatgagcctgtagaagaaggttcgtacatcaaaatgattgatatggtcagtgggaacggtggacagatacaagtacgtctctgtctgtttctgtaaaattaaattggcgtttcacatggctatttcatctagtcttaatcacgatatggtacttgatcggttcgactgttcatgactgttattctacttttgttgcaggtgaacaatattagtggttaccttcctgggagaattgtatttttcttggtacaaatctgctatacagaattaaataggctctatctcgtacttgtttctatattgacatgtctttagcctatttgcaacatgcaaaatcagcttacaagtaatatacttgcatgggtcactgcgtctatcgccaacagactcaacattcatcgtctaattatataaaaataacctagagtgctcatgacatcatcgttttttaaagcgctgattttcttctaggtgaatacgcatctcaccccacgaccaatactactcactcggcatggagaaagcatggataatgttagaggcagaattggaggagatagcgtaataaggtatgttctctgctctgtctcttccaaatgccgttggtttcagccttttttttttcttctttttttttgaatacctttcagtttttcgttttgtttgccatcacatctgttttctcaatgaatccatcccttaaattggcttgacaagtcttgttgctacttcctcgtatgatcaattttttgtgagatataaatgcgaaaatttgtttctaaccttttgcaactttgaaacgcagtgactctggtaaactttacgcaaagaaacttgccagctttgttgaaaagcgacttaaatctgaaaaagctgcttcggtaagtaccacaaacaaacaacaatatttaggattttgatgcattggaaattgtgtctaagaaagttgataatttgggaattcaatggaagtttctgttaataactgaacctaaatctattgcttttgtttccagtccttggtataacttatccgtgatagctggtttataatggtgagtctatagtttacactttacagattcgatatctgaattacttggtcggtgtaggataatgtcattccactgcatttcttgcaccaatatttatccctagctctgcctaggtaatcatttcctccgttaattcaatggttttaactctagatcgacacacatatctctaccgtatgctcagaggactcaattatagaaaatgtcgcaggaccacaggagactattaattctgggttgatacagtctatcaatttagtattagttcaccatcccacacattaaacgcatccttgaagcctttttggcatggttccctttctcaagggatcagtcagttccgtacttggttgatttggaatcataaaattcttaatcatacgctaatatcgattgattttgtttatcccagatttggaccagtacacttcagagaacaaacctaacagcaagttccattgtcggattccccaaggttggtgtttacctactgtccgaatgtcttctgactcttgaggtgtataatattttgttgcgaggaaatcgatttctcatattttcatcttaggtgcaatggcgtgccctggacgagatcaatgctggagtttgtgatgggatgacatatgaagaggtaaagaagaacatgccagaagaatacgagtaagtgacttgatcaaatccgtatatgtaatgtaaaaaagtgttactagcagctatcccctcgtagaacagaaaataaactctcagacttctctacctcatcttgtggtgcatatgactgcagatctcgaaaaaaggacaaattacgataccgataccctcgtggagagtcctaccttgatgtaatccaacggtatgttcttctcttctacttctttctacgtgaagtcataaactaaacctcaggaaaatatcgctactttgacaatgcaggcttgaacctgtgatcattgagttagaacgacaaagagctcctgtcgtcgtgatatctcaccaggttatactccaaacgatcttgtgcataatgtctaaaaccttaagttctggagggatcaaactatggaagcttaactgtgtaaaacttatgaaaaaaacacaacttgccactaagttctaatttttcctcttactgttggtgtttacgcaggctgttctgagagccttgtatgcatattttgcggatcgtcccctcaaagaaataccccaaatcgaggtaaaatctgaattagaaaatacgagactatcttagaacgattgagctataagctttcagagagtcttggctgcaagccacacacataataacatattttggatgtttcaacagatgccacttcacactataatagagatacagatgggagtttctggtgtgcaagagaaacgctacaaactcatggactgaattcaaacaactattaccacaaattctcaacaaactctcgtcctaaaggtttttatattttacgtatactctgcaaatcagattgcagatatcactgggttgcattttggtaaaccagtttttcctttctccaccaaatctttttccttactctcagatgtcctgtaatttaaaaatgttacttattcttcataataattcacttttatactactaaaatacgaatgaaattactctgccttgtctagtcttttagcatacatactgttcagtttccttgggttagtacttggagttgggaccgagagccaccgttagaaactacgtttagtttgagtggataatgactaaaaaaaaaaaaatcaatcatgttaaattatggggacaaatatctactgaaaatatggtcccggcggggctcgaacccgcgaccttcggctcataagaccaacgctctaaccaactgagctacgggaccattggcaacacttaggtgactaataatagttcttaaagagaacctttggatcaaattgtacgaaattttttattattctccgaacatttcataattcagtattaccgtttatcgttctcatctaagaattctttgagagcatttgcgataggatttggaaagataaatcgatcgtttgatatgatcaccatccaccaggcaacaaatgagattgaatagtcgttataaagctattgatgtgtgtgtgggtggtgggtcgtaagcaccaagtcaccaaccaataatttgaatttattttttcattttttatgcatatttttattgttcgtaaacacattgtgggggctgcaacattgacttctatggcctccttaattatcatagtggtagacaaaaataggcatcggatcccgatcgttttttgttcttttattttatcaacatattctggtgttgagtttttgtaatagataaagagtatatatacactaaatgctagtaaaaaaccggatgaaaaaattcgttaaatttttgaaattatttatgactcttgcttggtttgtttctatcgtttgcaaatatcttattattttaaccaagaatatattatttacatgatttcattacttgtctaaatcatctgggtatccctgaagccatcttaattagaataaatattatatatgtactatataacagctttgaacaaaaagaaaatatgtaatttcgtattatgaaaaaactattcttacctttttcatttggttagtgtcccagctaaataaaaagcttttcgggaatttttattactataaatagaacactagtcataaccatttattttctaactatgtattccttcttgataattaacgtagtgtattccgattaagaaaaaatccataaataaatgtcaagacgtcctgtcaatgggcataccatgatattgtgttatatgttcaaaaggacagtacctaatctcttattgagttattggataaaacaaataaacaacaatacattttaactaaaaaacaaataccaaaacatcaagaaaatgggtagccataattatgcgagtatgttttatttatatgtgggggggggggggggggggaggggggtatatacatgtatatatttaaaactcattgatgtcataaagatcataaggaatcattttgagagataatgaaaataagtctccatgccgaaaccttttggtattatatttaacctagggttatgaccgaaaatcccgtccttagatatatcatatataggtatagcttatggaacctgtaaaaacgggtacaaggtaagtgagatgtctgtgacttctataaggttatagaaaatttgtctaaaaaatcaaaaatgcaagaaaatttaaacatttgaagcacacgcacgcatatgtagtgcagggcgtgggaccaaataggttttttaatttttccatatttggatggtggagatgtactcgactctgaattttcgaacttttatgtttgtcagattccaaataactagtcctttcaatgatatcactcaacacagtggtccatcttttaataagtactcagatgcgttttgaacgagcgaattcggtagtgcccaaaaaaaataaaattgaacgtcgtttatttgctaactaagaaatttctgatatcgataatcaaaacataaatgaatcgcttttgaaaccactcactctcctaatcaataaacgatctggtattgatcactactgttataccgagatttagaggttcgagtgtgtattcgattctaatcttttcaaacgtacgatttgatatgttaacgaccagctaatacagttatacctaccatccctcgttaaaaagtaaaatagacgatttttttctatggttatgttacatacatgcatgtataaatattttccaatattagacagtttagactagattagctagcgttggttttacccggaaacccttcatctttcctttttcctaacaattacaagcaatttggtagaaatataatgacggttcttgcaacataaaacatatattacatatataacatggtaaaatttatcagatatatactatataactggtttcatgaatttgtgattaaatttatagaagtaccaaaataaatatcagaaaacatatttatttctcattataccacaaatttgaaagtctctgaaaccaatatttgtaaatttttgctactatatatttatggtggtaattttgtaaaacaaaatataacatgagtacaatccgcccatacattacaaataaaatttagcatcaactatatagcaatgttttgtgaaagctagttataagatataacacaaggcttttgcatgtatacataagccctcaatttgactatccaaattgtgcattcggagggcctttgggagagattaagacgaaatcatttgcttttgttcttttcatggcctgatgtatatattgatctcatcatataaatatataatctactatgaatatttaattaattaccatataaaatttgttaagagaagaatatgaacaaaaaatgtaaaccaacttccaagtaattattaaattacaaaaactaataattcagatctgtcttccatacttgcaatttcctgattggtttataattccaataactttagaaaataatatctcctaataatagtggtattgataagaatttttttataaaaagatttaagcatagccccacacttgacctaaatagaatagtgaaaagtgtcaagtggcctgtgagtagggccatgaccacgtgatttagtttctcacatttctatttttcctactcttctttctacatcctctacttctttcacaattcacactgttcaacccaaaaccctctgttctttcttttctttttttgtctgatttgaaaattaaataaataaaaccccaaaacctaacaaagcttcacactctttctctctctcttttaactactaaacactaaattatcaatccgctctcttctcaaaaaaaaaaatcgactctaaaatcaaactctctcaaagctccccaaaaaaaccctagttctgaatggaatcggcggattccggacgatccgatccggtaaaaggagacgacccgggtccatctttcgtctcttcaccaccagctacacctagcaggtatgagtcacagaagcgacgcgactggaacacgttcttgcagtacctcaagaaccacaagccgcctctcgcgttgtcacggtgtagcggagcgcatgtgatcgagtttctcaagtacctcgaccagttcggtaagaccaaagtccacgtggcggcttgtccttacttcggccatcagcaacctccgtctccttgctcatgccctctcaagcaagcttggggatctctcgatgctttgatcggacggttgagagctgcctacgaggagaacggtggacggccggattctaacccgttcgccgcacgtgcggttcggatttacttgagggaagtcagagagagtcaggcaaaggctcgtgggattccttacgagaaaaagaaacggaaacggccgccaactgtcaccaccgttagagttgacgtcgcttcttcgagacaaagtgacggagacccttgtaacgtcggtgctccatctgttgccgaggccgtaccgccttagatcgaattatatataatattatagttttcttgattaatgatatatatatacttatctctatgtatgtatggaactcacttcatcttttgttccttagtacctaattattaaattttgttccttttgagttgatctgaaactatgctaagacgctacaacggaggttttttgttttcctgtggatctcggatgcattaagttcttgaattttgaattcttatataaaatgcggaccacacagtttcaactttcaaggactaatgcggttcttatttgtttcatgcaatatatatcttctacaggaattgtatgcagatcttacttttataatcaaatggtatcatgagatttattctcaatgtttcttgaagatttcagagatcagagaagaataagaagatgactgatgaaggagtggtatcctggtaggttgttttcaccctgcgtatttacatacgttatcttgtttgtgtacgtaaaggtatcaggtatgtacgtatacaaatcattttgatgactatttgaacttttatttgcttcatatatatataaaagataatgtcatctttactaatccacaatatttaattttcacaagcgaatagttttaaaatacttttagccggactaaaaaacgtatagatagttagaaatccgtatattcttcataatgcactgtatcacatctgtgtgtctacgcagattcacaagttctaatgctctttttctcttaatataattatttatacggtacatgcatgtaaaactactagtatattcaaagaaaaatctactaaacacttttcctttcaaaattgtgttattaattgccaataagtctcaacatctctggtagtctagctaagcaaaattagcgaccatattattggttagaatgcttaatttgaatccagtctcatgagttgtagctaggtctacgtatgtgctttcatatacgtacagacgcacgtgtacgtaaataaccttggaaagatggtaaaagtcacatgagcagaacaagatcgtgactcttgagacagtattgtttgccactatttccgaccgacatcaggcctcgtgttcactgtgttctaatacgtgtcattccacacgtgtgttcttcaaccttgtaacccctttagcttgtttcccttgtctcttggttaaactcaaaaacattacataatgttttctcagtttgttaatatattcatatttagactaaagtcgtaaattagctaatcgaaatctagaaactagatttcaatgattcaatgattaattagattttatcttagaaaacaattttagtctctataataatgtcgattacctaattgatttttactatagtctatagtcatacagagtgatgatgataagaaataaatgcgattttgaaacacgttgatctggtctaatgaagttatagtcatagctagagtacaatggtgaagtaagggaagtagcgttttcttttccatgtcgtcagtaatgacgtatttattggttgaccattataagatcgtatagttttcgacttttcgtgaccgttcttagcttgtgatggttttacatatgtaaaagtcttcttagcctatatataagcttagcgtttgcattacgagtctatatagtttgagacattctttccctctttgtatgaaagaaggctcagaattagtggtccttcaaaatcattatcaaaatttgttttgttcctaatcaccacatgggctttgataaagacgagccagcagccaagccacattattttattctattataattaatgattatatctgtaaggttgtaaccaattagctacattaattacatttcattttgatcgtgactagaagtttagaggagcaatacatggaccccataaaggttaatatacacgtatgaggaaagtttttcttaatgtctaatcgtttcaactaaaaacaaaggtttaaagtctagattgtttatttacgtttgtgtaatataactatcgattgtgatgtgtaaacataatgtcgagatattgatgttattgttgcggtcaacgtcgaagcgagtagtgggtcacggtcctcactactgttccatcgtcaaccctgataggctcctttcatactacagtctacaacttcaccgaaacaaataagagaaacaaaacccgtctaaaccgaaataggttttttacccaacatgtgattcttgaaaggcctctcacaacccaacaaacatacattttgatgaaacataaagattacacacattcattaaatatcagaatctagatagctttttggggtggtttgttacatgggaaaaagatacaggaagtgttcatagcaggccggtgatgtcgatgtatgacgataaagaggttgtgatacgttccaacacatcccacatcttattcacgcctttccaggacaccagaggggagcgtttcaatttgacactacgaatgaagttgccggttgcatatttggtacatgcgccaggtactttattacctttgtaagccttgcagatgtagcttatgaagttttcatagtcctggtttttaaaaaggagacaatgagcttagttcaaagaccagaaacatcaagaacaaacacatacagagagagaacttctgttccaattgatcaatattaattttatgagcctttgccaacaagcctatgtacaatttcacttcccgtaggctaactacagctaaaagactaaactctccttccaaacttccaagacgcatctaactcacaagattaccatgtagggacttgcactaacatatgataccagctctgagaaattgtacgggttaaagatgatccaaatccctaaagacactaaatctaaagtgatttaaaaccaaatcccaaatcaatccctggagtgaatgcaaatcgtaagtctcaatgactgaccactgagtcctaacaatatcattcatctacaactagtaaggaagtgtggattggctatgtaagtattcagcactgcagaagaacttgaaaagaagcaaataataaacgaacctcataaagtggctgaccatccacgactacccagggcacatacttgtgaggaggctgaagcgcattcgtttctgcagcatagtgcaaagcaagctgcagaaataaaaagattagaaattgaatgcacatgtctgtgaatcataacccagaagcttcaaaacaacaacatggtaaatcggataagcctatgcttcagacaatacaattgcaaaacggtatcatggatacggtaaccgaatgttccaatgctaaaaagcaatcagcaacaagaacttgtggcaaaacaagcaagctacacaaggagaagggacaaacctcattcccatgtccactgctgagacaatctgcaacaggtttcgagttgagattgagcttctcataacacgtctcccacttgtcatacttatgttcagtcaccaacttctcgacacagtatatgaacgggaaatgatcgctctgcaaccaacaaaagtgacgatgtttcttatctcacaaccatgcctcaccaaatgaagttaacgtttcaaatttgtgacagcaacaaaatagatctcatcatcacacttactactttaggccaagcatcaattgcacaagcttctacggtatccaagaagcattcaaatgccccatgctgcaacacaaaagcaacaagatttatgcaaatgagagaagaccaatttgtcaatctcagatgcaaacaacatcaaatttcagttaaggaaagggtgattttctcaaaattgaagcttaattcaatcgaatcggaaacatcgaattcgtaaattgaagaaaacgaaggagtacctggcaaacggcagtgacgttatcggaacggagcttggtattgccccacggagagagatggagatcgacgattgatatgagatcgtcttcgaagagcttcgcgaggtggttaacaatgaaggaagagcagtagggacagagagactcgtagtacaggcccaccgagactttaggcgacgaagatggaagagataccccagaataatcagatgatgatgcaaaggggaaaagaaaaacgtagcagactaggactggaagaagtttgctcggcatcgacgccatggatgcaaatgcaaggtttttgtgtcgtcgccttcttcttcttcaaagaacattcaataaatatgaaagagccgagagaaattagataattgctattcccaatggtaccaatttattacagacacgtgtagcttcgaaagccacgtgtctcactttcattctgtaaccgtcaatagttcaacacaaagtaagctcaggctttgcaaaatttgggtaaacttgtgaactcgacttatcaaaaaggctcattttaaccaaaattgttaactccaaaaaaggttcaggataaagagtcaaataataaacaaggtccataaacaaaggcttgcagataataaaccacttgatgacgagtacacactgctttaaatgttactcggatacataaacactcgaactcgagatccctgcaaaaaaacaatcaaccaactgtattagaagagctaggaaagagataacaacaatttcaaacatatataactgaaatgatttggattaccattgatttaggaggcaagtttgatgtgaatttggctcgaacaacgccactgttaccgtgaggccttgtgactttgccccaaatgcatcggtagtgactaccgttcttcttggtcttggctttgtagatgtaagccatccttttacctttgtaccatgacacttcctcagtggtgttaactccctcgacttggactagtgacgtgttgggatactggtttgacttcgacctgtacatatttacacacaaaacgtgtttaaggacaccattctgacaagatccaaaacagaaacaacactaaatggtagattgttttgcttaagtgtatacgctaaaactttattgccaattggtaaacgtagagctcgtgactataacaagcaaaatcaagatagtctccttattttgtataccctattcccaaattcaacaatctaagatcggacgaagacaagtgagtctactttctcaggaactaacttttgaatcctataagcaactaaactgaggtcataaaaaaagtgtattaaccagtattatcagccaagattcactgtttatgggagctagaacaaaaacgactaaagtggaaaacaacaacaacaaatcatgtatcaatgcgcaccttttgtagccaagtatggttcccctgacatagagtctgcatcacataaaaacaaaattgagtgagacaaaagcttaattaagactaaagttgagataatttggtacacagagattgaaacacatccaaaatccagctgagaaaagctaaaagcgagatccatagaaagtgtaaaaacgccaatgatgccagctaatttcaggagcaatgtgaagctttagcagatacagaattagagaacatagaagatgaataaccaacctgacacgttctccttggcgtcctttcaccatttttgtcgaatcgtccggtggaagaaattagcagttgccttcagaaaacggagacgaaaactcaaaaaaacctaataagcgaatccttatcagtcgcggaggtaattagatggcaagtaaacgtcatcgatttgatattaatgggcctataaatctacatatgggccgaatgtcaactcgtcaggctatcggccccttgcttatgttgtccttaaatgagttcttataatgcgccgtcaaaattaacaattaagatgcgccataacataaaattcaaatcaaagggcacattgaaaattcgaaacaccgctcaaatttctctctggaaaaaatgttcagattcgatgatcgctgatcagacttatctctttatcaatcgggtccaagacagaaggttcttcaatccatccgaagcatctgattctcaatttctcttgtgtgtgtggctagaacagggtttcttctcactgattgtgcaggttcgatgaagaatctcttcggattctcgagttgtctctggttgcaatgaatgtgaaatcgtttttggaagttagatctcgattgagagatttcatgagatctgaatcggttgttatattcggtgagctcaccggagaatccatggtcgcaaaactctccgtacttgaattcttcgctcgtgcttttgctcttctcggtgatatggaggttcgtatactgtccttgtcgattttgaataaattcgaaattatctttcagcttcttgttcgattatgagtgaagatttgcagatggatttgtgcactttactcaacttttctgtaatgtatgtatatatggttgttatatgttgagtagagttgtttggctatgaggtatgaggcattgaatttgcggcagctcaagtctcctagctgtttgtggttaggggtttcacattcagaatggaccaaatttgcagtccaatctatggaaaatggattcccttccattgcaggaaaggtaaattactcttccttctgtagtatatgatctcgttgcttttgggaatggttggagaaattcacataagaggaatggttagagattctgtacatgtttcttggaaagtgagtttactttgtaattgtgttaacaagttcatgcttgtatgatcggaattgttgctttaccaatttattcaattttttggatacatagcaatttgttatttgttacatttttctgttcccacatggaagtacagatcagataggttctttgcttcttttgattttgacttgttcttactatgaggtatgacattttgatgagtttttacgtaggcgtctgaaaatgccctgttgagccttaagaaggatagtcttattgaaccaaaatcagaagataattctgacattttggatgctgctgagaaagtaaggagactaagggattcagctgcctcgttaacatcttcacattcaggtattttcatttatatcgtgtcttctttaaagtttgctgtttgtaacagacttctgactacattttgattgctttcttcgtctctatctaaagtattggtcttaaattactcgttttattcccaccgttcaatgccttcaatgtagtgtgactgttatgtatgggagaatccattgagtttgatagaatcttggaaatctactggttggaaagattgatgatttataaactgactctaccaactattgtttggatccatcataaaggatataaaactgactcgaccaattttaacagagtgtctgttagaatgtatctgattggtctgagtaattttcgaatcacaaacagttcaggcacaaggtgcagggtacttgagaagcaaggaacacagaatacaatccagacagactctacccactaaaaatccagactgcacaggtagcaatctgttcagagaaggaatcaagaagcgtaacgaaagaatgttgcaagatctccgtagtattcggatgaatcgaaatctagaaccagatgtgcgctgtgtttgaactttgatgcaactgatgctacaaactttgctgcttcatgttcattgaaaaacaggtcagctttcgctaacattacaacttagatgttactgaagatcatttttttttctcatagaagaatagaagaagcttaacctcattgatgccttttatgagcaaaatccaaatcatttcaccagacacatttcccataaagattgtttctgttttagcttttggttatcaaaattcgaaattttaccacatcagtatcaccaccttctgaaaagtttccattcagtttttttcttgaaaagtacgaaaactagtttttgttcttacgtttgcattatgaaaatagcaaaaggttaatcaatttgtattattaaacaactctataaatttgaaaatcaaaatgttattttcaaaattgtctaaacttcaaccgttcaaaatctaataaatagattgccacataatttctctttttagtagtatatatcatgtggctcatgtctatgctatcacaagtagacaattgttttctgagatattttctttgtaattgttaaaccaagatatgtcatcatcatcttcctatttttagttttggtcaacttgtgttttcttttccttctaatcatttttgtgatttacaatgcatattcaatgtatacaaatcttgtaattcaacatgtgttaatgtgtaattaattataaaatatataattagcggtatagatacattttcttttaaggatataaaaaaaagttatatacttttcttattttatcatgtctatgtaatatgtgtcaaagtgtcaaattttaatagctgtcatttgctaattttctacatattcatctattggtggaaacatacctattatcatttccttccatcacaactttttttatcatgtatataaatatctaacagatttttcactccatctaatgtgtcgaataacaaattcttacatcaagaagaagaggagtgaaaggccgagatacagatcgaaacatagatatcacttaccaattgataattgggtgacgcctctgtttcagtttagatttcggcttcccattcctcttcatcaagatgtaagaatcttattctcttcttaacttaagatactttgaatacaagaaaatgaattctgaagaagaacagggaaattttatactgttatagctctttcctagccccaatgacgctaggactcggctattagtataaagatgaaaaaagtggctaaatggtctctggttagaggcaaaggaccagtaagagaggtccctcaaattgggtccaagctggactctctaaaccaatcagcttgagattattccatcacttttgggataagatgccacatcgtatcagttacatcacatattaaagtattaaagaaacaccttgctctctaaatattgtatttgtatctatatatagttttcgtatggtgacggatttacaaagaaaaaaaaaatattggagtgaagggaaaacaaaacagagaaaaagataagagatatatggatacacaaaggttgccgaagaaagaagaagaagaagaagaagatcatctactttcttcaaccttcgagtccatcaatggtcactctcgagaccaacacaatcattctatagatgatttcgagagcattttcgacatcaccattgacaatttaagctgctctaacgaactcacgtgggatttctgggaagaagacgaagatgaagatgtaggggaagaagaaaaaagatcgagtactgatcaagaaggctcaagttttgggttttgggagaataagccgacggattatgaagacaaagacttgggtctgaagctgaatctgaaccatcaagaagttatcgatgcttggtctgatcaccagaaacctctgtggacagatacttcaactctggacaattccgtttatgttagtttttatgaatctctttcttgttgtgcaagttatgagtagtgattaatcttgattagtcaatattaatgatttagagtgtatgcagaggggagaagtgccagtgatagaggagaagagaaacatgcgaagagaagcaagtgtgttaaggtacaaagagaaaagacagagtaggctcttctctaagaagataaggtaccaagtccgaaaactcaacgcagataaacgacctcgttttaaggtctctttcttattccttcttctttctacactctagcctttactcatttagtttcatgacaccaattaatattgtgaggcctaactttatatttctcttgcaatggaaatcttttgaattatttgtagggtcggttcgtgaaaagagagacttaaaaggggcaaaaatatctggagaaaaatatctccaacctttgttgtgtctattttctgttattattattcgtagttttgagatatcattatcgacttttacaacttttgtcatattgaaatgaaaatatcttattgacataaaaaagaaaagagatgcaaaaatatctttaagattacatgaagaggagcgaacgtatatggcaagtctttgtcgaattggtggggtcttaaggctaaaaaagggttcaccacatgtgtatgaatcgaaatctactcatccgctgtcgggaccaaactacatatcaactaccacgtttttctcatatgaatattcaaagctaccgtaaatttttataaaattacgtcattagcataagaatgtatgtacatattaatgactattataaaccctaaggcacggataccttatccttccaccaccgaatttcacggattccatatcctttcaccggactagacgaatatgaagctaagatattaatagattggtgaccaaatttgaatcttttcggataaaacttgtttggcatactttcccttagagtcaattattcttcaaacaatgtttaacttaaatctcaagatcttatgtagttaatggtagatatcgtacagtttttttcgtgtttgtcttttgatcgtgtgtaaagtgttggaaaatctaactttgtatataagttctacacctccaaattaacgttcgagcttatcggtattactgctagtgctttctcaaattcctttttagatcatatagtagcccactaggaaaccttacaccaaaacgcccaaataatatgaaaagcccatcatattgtccatccaaagtaggacaattgctgaaaaagcccaacgaatcaaacctgcattgttaccttgcacttggaaaatgaattaaacggcgacgcacctatggatggagactaagttcactcatcaaaaatctaatttcaactctaattatcgtatttaaggtcattggagattcaactcttgtacctgtagtttcttcttctgaaaatcagcaacaaactacaaatcatccaatgatagaatttcagctttaattatcaaacaaattaaagataaccccattgataatatcgccacgtctcatcggatgaaatagtactatctgacacgacacgaatctcttatgagagaaacagaagagcacggaatctccataaatcaaaatacatgatcggagctttctcactatcaaaagctttccggcgacaaaaccaaccatctcctccttatctccaccatgatctcactccactcatcagccattaaagcctctctctacggctctttcccttcttcgttacgatcaacactctctgtttccttctctgctggatctcttattcggcttccttccgtcggcaagcgcaatctctccgtcgtcgtttcctctggaagagactcctcgatgtcatcaaacaatgtttctcgcggatcgtcttcaaaggttcgtccttttgtatatttcttgtatggtgtatataccctcgattgatttaggtcatgaaagatctgaaaactctgttcttgtcaattgttgatgttttgattctttggcatgtgggtgcaattaatttgcctgctcaagttgataacttgccattatcatctaattgtctcgtctctcgttttttacacttggccaggttgctgctgaatctttcttcaggagtgtcttagggcagatggaaactgtttacctaaatcgaaacccgacgcctaaatccgtcttggagcttgttcgatctgttgatgaccagcaactttgctatgatcatctcgctttcagaacgtttggggtataaacatttttggctgcttcaaagttgtaaccattttgacaatgttaagttgctcattattggaatttgtctatggaaatgttttagattggtggttatgggattgactcgcttgcaagctttttccttgactatggatatacaccgatggatgagctaaaatttccggccaaaaagcttagagctttgtggtttgcacctcctaatgcttctgctgttcctggtggcagcggcgttaacggtcctttaccgagagtttttatctcagagctcctggtggaccagatgagttcacagactcaggtaataatatactgtcattggttttgaccctagattatgttatgagctttgaaggcaatttcttttgttttcaggatgtaatcagaaaatacacggaagcatcacctaatgggaaaaagtatgctggactttctagtgctttgggtactttaacttgggaaaagcctctatcttctgagtttgagcaattggctaggtacatatgatcctaggtctctttgtttcttttgctagatcaagctagagtagttgacttaaggtgtgttgggttaaattgattaacagggaaagtgaatacgcagcatggacccttgtcaatggatatgcacttaaccacgtcacgatttctgttcatcggcttaaatctcatctaaacaaaatcaagaagctcaatcagttcctcgaagaaaaaggtatcaaattgaactcagaaggaggagtccttaaaggtatggttactaatctttatcactcaatttaaaagaaattagattctaagctaatctttgtctttctacttttacagttagccctgatggtggtttgcagcaaagctcaactgtagcagattcgatatctttcaagttcgctgatggtgttaccaaatctatcccttgttcatacattgagtttgctgaacgccttgtacttccgcagtaccaaaatatacccgaaagcgaggtaagaaaccactctgattgaatcttaacttatttagaatccggttactgtgaatcgatgcgatcttttccttcccattgcctggagaactcctcttagataccactaatgtaaagatggtgtaccaacattgtggaatgacatttctgaaacctacaaaacgcagatacaagagtctcatcgacgtgatggatttgaggtcggaaatgctgacaagatcttcgagagcacatttcaggagcagctttcccgacgaaccgggtgatagcaaatagtagccacggctttggatatatgtcaatcatgcctcgtacatgtgtaacgagtaaaaagctcaaaactgcttgtaatcttgatcagtaaagatgctaatccaagaactcttaatcaaatatatttatgtgtatatttccgactactttcctagtggtgagaaggaggtaaacaaagataacaggaatagttacaaaacataaaacgataatgatgttgtatggttttgttcttgttctgcatttgagcttgttttaccgattggtaacttctttgttcatgatctcttactttctcatcatcagctttacaaaaaaaaacaaaaaaaaacaaaaacaacttgctgacgtgtcaacgaggtcaaccaattaaagtctcgaaatttatagcaatagagttccggttcgaattttccacctgaaataaaaattgtggaagaaagatcaaatctttgacgacatcaaggaggaggatttggtaagctacagataaaaacaaaagctatgatatgagataatgtagtccaccaccacaccaaattcccccttcaccgtctctcttcgtcggtgattcacattccgatttggtgtcttttttactcttaacaagtcctcaaaaaccctacttttactcgagattttgtctccgccgccgagtaccaagtgcctcccgatctacgccccaatccctaaatggctacggaggctacaaccgtacccaaattccaggaacctgatctccggcaggtttctcagacaccggatttcaaaccggaaatcgctcacgatggtcttaagttctggcaatttatgattgctggttcgattgctggctccgtcgaacacatggcgatgtttcccgtcgataccatcaagacccatatgcaagcgcttcgaccatgtcccttaaaacccgtcggaatccgggaagctttccgttcgattatccaaaaggaaggaccttcagctctgtatcgcgggatctgggctatgggtctcggcgctggacctgctcacgccgtttacttctcattctatgaagtatcgaagaagtatttatccgccggggatcagaacaattccgtcgcgcatgcgatgtccggcgtattcgctactatatcaagcgatgctgttttcactcccatggatatggtgaagcagaggttgcagatgggtgaagggacttataaaggagtctgggattgtgttaagagggttttgcgtgaggaagggattggtgcgttttatgcttcttataggacgacggttctgatgaacgcgccgtttacggctgttcactttgccacttacgaggctgctaagaagggattgatggagttttcgccggatagaattagtgatgaggaaggttggttggttcacgctaccgctggagctgctgctggtggattggcagctgctgtgactacgccgcttgatgttgtcaagacgcagttgcaatgtcaggtgaatgattccttctctctaggattggttgctctttgtctctaatctctacatctttggctagaataatgttggcgatgtgattaggtacacagtggtgttagtgttactagtaaacggtatatgtgttatgcttttatgtgtgcgtagtgctgcagaatgcttctttaaatgatgcttttagtctcgagagttgatgcatttgtgttggatttcgagtctatgtgaaggtctaaagcttcttagatggacttgtttcaccttgtgtggttagatgttgtattttgtgaatagtggtttgtgtaaaaagagctatcaggactactggcagatggtaatcatgtgctagagctgcagcataattttgtggttgcggttttatgttcatcacggtttgacactagtatagagctaccgttgtaggaagagtggttatttggtttcaatgtttttaccagtaagtttgaggtagagtgtgtttaagggtttcaggtaatgacatttcgtggttgagctatcattaattctgtcttagtgtagcatttattgaatgtaggaaaagtttttaatttgtttcgtttcaaatgtgatcttatgaggtgtgaaagatggggaggggtcaaataatttcaggtctagctgtagaatctttagcatttcgagatatgttaaggctttctagtgcatagtacttgtatatcctccgcttaaatgtttttacttgtatatcctccgcttaaatgtttttgactatttgtagttgtgcatctggaatattagtgtttcttgatagagcttagacatcttttgcaaaactcttattgacctagcataaagtttaagagcaatgtccatgatttctttgctataaaatgtgtaaaatatggcctcaatcatctgtgttaatgtgcagggtgtgtgtggatgtgaccgcttcactagtagttctattagccatgtacttagaacgatagtgaaaaaagatggatacagaggacttctaaggggatggctcccgagaatgctcttccatgctcctgcagcagcaatctgttggtccacttatgaaggagttaaatctttctttcaagacttcaatgtcgattcaaacactgcctgaaaaaaagacaaaagggttaggctatttcacactcttgaggatcctgcttttcttatttgtttgtaacatagttttctcaggttttctatgaagtcatttttagattatatattttccaggtttgtgttgatgataatgtcgtcgagaaattttgattagagttgtacaaaactatgttccttccaaatttctaataataacttaacgaggcatacatatatcttacacgtactagacaatttggagaaaaataaatgcttttggaggaacattcaactccttttgcatcatggactaattcacatgagttggagaaaaataagtaactagagaaagtgtagagcacgatccacatgagttgtctccaatctgcgcctttaattctagtctccgagattctctggttagagttttgcgaggtaatcttcaggttttgtatcgtcgtagcttcaatgctccaaacattcccaacatggcggtggaagattcaacggcaccaaaatttaaggaacaagacctccagttgtggcagttgatgattgcaggttcagttgctggttcctttaagaacatgacgatgtttcctgttcgcaccttggatcaacgtatgctgcatcgttcgtattcgcaaagacatgtcggaatccggcaggctctgcgttcggtaatccaaacggaaggaccatcggctctgtaccgtgggatatggtatatgaggcatggagccatgggacccgctcaattcgtacatttctccttctacgatgtatccaagaatttcttgtctaccgggaatccaaacaaccccgtggtgcacgtgatttcctgggccttcacggctgtatggagttatgccgtttcaactcctgttgatatggcgaagctgaggcaccaaaatgggttcggtaactacaaaggcgtctgggattgcgccaaaagggtgactcatgaggaaggaatcagtaagttttgaaattccggatgaaccaagaatcgtattccccaaactcagaaccactgagtatcactttattagaaatctgattaagaagtttacaactaccttaattggttttacacaagatctaaactactttagcttgtcacctgagatttccttaaacacacaagagcagatcacaagaacacactctttgatctctctagaattccaatcagactaaaccttagtctctaataatgaaaagcgttgcactagcttttcactcacaatcacggccccgtctaacaagaaccttagcacctctatttatactatcgaggtctttggtcttctaggttagcgttcgagatcttggatcactccaaatcttcgcatgaatatctcctctccaaactgaactcatcctgttgtgatctccacgtcattcgttcatttggcggcatatccacgtcagcatcaattacttgatcttcactttagtcttctgaaacagcttccagcttgttccagcaatcagcactccttctggtttgtcctgatagaggggtgcactaacaagttcttcactttttacagaacggggattcggatatatgtgtattcttctgctgttcatttcgtgacataggaggcagccaagaggaaactgatagagatatcaccgaaaaagaagaattggtggttggttcatgccaccgcaggagccaccgccggtggattggcagttgctctgacttggccgcttggtattgtagctatgacgctttctcagccgacgggcccttctaaggtgattgacccacatctgaacatttcattggaggattatttaaggaaaacacacacgcacgctcacaatgtaaaagcaaaaacaaaagtagacaatcaaggcataaatataaacaaaatgattttaagatgtgtgtaactaactaatcgaccaggccagacatagcctatgatcttcttcttcttcttcttcttcttataacttatctggtcatgtgcagcatgtcactagggtttcattgagccatgtgttcgtatcctttgtgaaatatgaagggtttatgcctccccagaatgttcatccatgcatcagcaacagccatatgttggtccacttacgaggcggccaaatctttctttcaggacctcaacggcgattcagaacggcctgataaagatcaaacggatgggacagcgaatcgatatcacaacaactaccgagtttttaaattaagctttgtttatcttgatttgttctcctctatttgttttacacaaatataaaaactaaacaataagcaccagtggtctagtggtagaatagtacgtttgattcccggctggtgcatctaagctgtgataaaattggctttagcgtaggttgggtccttcgcatccttctgaattctcagttgataacgccacactcccgatctctttttttttttaaaagctttgatgtttctggaatatcgcaactccgtcaaattcgtatatttgatatctcacactcggataatttgtgtctgtttcaagttccagccgatgcaactaaggtcctgactttgattcatgtttgggcctcatatagtgggcatcttttaatatgggcttatatatatatatatatggatctggtaatccgagtcaactcagtcgtctcaatccgtgtaacaacttcatcgtctttttcagttcaacaacttcatcgtctttttcagttcaacctccgacatctctcgtctccaggtgattgatcccatcgaagggtctatggaaggttcttctactctcctttttcttctgtttaattcttatgaggatccgtaagacacatttgtttcttcggatttttggaaattgagatctgcttaattcgttaaccggatgcattatttgcagagaacaacaacgccgggagcgattccgactctaattccgtcgaagattcacaagactattacgaaccgatctcagccgtcgatttatataactccaacgacgatgaagaagacagttatcttccgatcggtggagatggtctctctaacggccattgtatgattccggatgcagaggtaggaatctcttctattagtataaacgataacacagacagcgaagaagagacagagacggagactggaccggagatccgtagagcgtttgaggaggacgaacggcggagaagatcgccgttagtggaggagaatgccgttagggttatggaggcaatgcgagccatctcattccctggaacggctcctgattgggcctccgatgttaatgaggatcgttggattgatcagcttcgaagattgagaaccacttctcaataagctttctccaatctcgatagttgttttcgtttaagatctttctcaatgttgttcaatgtgacttcttttaaacattcaatataaaaaccagagaatttcaccactctttaagtaacactaaccagtgtttttgctatacaaaacctttacttgatgagtatagtatgttgtatctgatgattcacacacatatatacatagatacgtacatagagttcaaagtatggcctcgctcaactgcatctggaccttgtctgaaagactgaaaccttctgatgctttattatgtgtatgatgacaaatacggtgataaagtttgaatcttgaacatgagagtctggttcttttttttaaatgtaatctgcaacctgaagttcatgaagtctgtcacggttgctccttattactctagctttgtcccctcttatctccagaacctgaagaaacaattccagtttcagaatctctgtgtggacttatgtaagaaagacatgaaacgcgacgagtcaagaaccaatattgctagatacctctggtctagagtcaagaacaccactggacattcctacatcaactctccatatgccgcaaccatattcactatcaacaacaaaaactcatgtttcaagattgtcgtgaagtttctctattacaagttttggggttgagtttgataaatgtaccagttaacccctgataactggggagtatgcccgaccaccatcgctttggcacctacagcttcaagagtgtcgtgaagaattttatttacctgataagaaaaagaagtcaggaaacacattaaaccaagctgatgatgatatctgtcttagcagttttgagattttggtgattaaaattctacttgcctgttcaatttgatagtcctcaagctcagaagtctctcttgagtaaagtcggctccagactacactgtcatatcctcgagtcgcaatgaacggcatctgaggactgtcttcatagttagtagggcttctcatccaagtagagacttctctgtttatcctctctatgccgtatgcaactgtgcaaggacattataagcatatgatatatcaaatccaaaagatcaccgagaggaaatgttgagatagatttgactgtccttaccatggtgaggaaggagaccaccgtggcagaagagccagttattaacacggagaataactccgtgacgcgacaattcacatgctaaacgaccacctggtctgagaaggaccgaccttgcaattactcccttttgcctctgtcctaatggttttcccaccgacttttggttaaccaacgaatacaaaaactaagaaaactcagagaggacaaggcaaaatgaagtacctttactacattccattgatcccaataggtttgagaactcctcctatcttctttccattgtcttgactcaaaaatccaattcctaaacgctttgtcccagtcttgtgcatagtcctccaagtagtcaagaaaatcagtacactcatcaaatgctctcgcatctacatatctgaaatccccttcaacattcattgtctcgtggttcccattaacctttaaaatgtgacaagaagttactctttgttagtcctatcaattatcatcattctagaactagcaaattaaaatgtgtagagtgcaaaagcttctctgtgtaaaatttacttatgaaattcaagtatgatagcaatcaaaaacctggaaaacagctccaccattagccttggcctgatcatcaagtgacctcaataaggagagtattgcgatttcatcatcaccgcgatcaagtatatctcctacctgaactagtacctgtattttcattatgatttcacaactcataagcatttaactcaaaagaatcagtcatcataatgaacctcaagatgcgtaatgttgaactctagcagatactgtcaataatatcatcaagcaaaccatttaacacgatactgaaccactaagagataatgtacatacggtgtcttggccgacccactggtctcgtccgtcggagctcaagacgccagccaactgaagtgcgtctctggctttacccagatcgccatgaaggtctccaactgtgagtgcatatccaaaaccaaaacctactcaattttgttgtcaaattatcaaaaagattgaaacttttcagattaatggtggcgaacctgcaacgatacgacgagcaggagcagagacgaaagtgggtggatctccattgatgacaatcggcttcagagcaagttcgttaccattagaagtgctcaacaaagaggaagaagaaggttctaaaagtttctgggggtgagaaggaggaagtggaagtaaggaattgaggtaaagggaagccattggtattggtggtggagaagcaatgatccaccagagctttgatgaaatcacttaacatttgtgttcgtctggtctataatttgtgtgacttgtctccaattgcatgctcagtaatcaaatcccttttatctatctactggctgaggtttttcctctcaatttttggtttttctgtttttaataaaataaaagataaccacaaagacaaaaattgggcctctcaaccttatcaaacttatcgatcccaaaaatgaataatatgtccattgggccatctaaagcccaagtgtactggacgccgaaaattcaacgtaacgaagtcatcggcccataaccaatttccatgatgaccaaacgcacaacgcggttgttaaattgcgttcacgttctgtaaacatcaaaccagacagaaccaaaagagaaaaatcgaaacgaagacaaagtcgtggtcgtggcactaagaaattacagattccattaaaatacaaacagaagcacacaactaagtcagacatggttcccgcgtttaatctccgaagactttgtcaatattatagtcttcgtctatggattttcgtctttattctcccaattccaccaattccgtaatttccccgaacattattaattcccatccaatcatatggctgaagccggtgacgagaatctttacgccgccgccagagacatcgccagagctctcggcaaggatccaagtgccgccggagatatcttacagattctctccggttatggcgcttccggaaaccgcggcggagatcctcgacccaccccatcccgcggcggctcaaacgtcaactttgaccgagccctcacctctttagagagacagatctccagctacatcgtggaagatcgaccgatctggtctgatcccgttgactcgcgcaccttcctcgactctgttgatgagctacttgcgattgccggagacttgagatccatggccggagataaatccgtcgccgtctgtcaatcccgtgccgatgagctgattcaacaggtgatgtttaggcttcaagaagagtttggatttgtaatggaccgagcccctgactcgtttgactcggacgatgagttccccggcgaagaagacaacgacacaagcgacggggtaattaattcatctgtaaatttattactaaattagttttggaattagaattagaaaattcggtttactatcggttatattgtggttaagtgattcacaattgaataggtaatcgttgctcgtccaatcactgattacaaaatcgtgatcgaggcgttacaatctagcgttattggcgatctaaacgcgatcgctgtgcgcatggtcgctggtggatttgcaaaagagtgttcaagagtgtacagcagtcgacgaagagagtttctagaggagagtttgtcgaggttacatctcagaggactaagtatggaggaagtgcaagagagtccatggcaagatcttgaagacgaaatcgaccgttggattaaagccgtaacgctgatattccacgttttcttcccgagcgagcgtcttctctgcgatcgcgttttctctgatcttcctgtttcctctgtaaccgatctttctttcatggaagtttgtcgcggaaccacaacacagcttctgaatttcgcagacgcgatcgctttaggaagccgtttacctgaacgtttgtttaaggttgtggatttatacgaagcgatgcaagaccttattcctaagatggaaacgctattttctgatcgatattgttcgccgctaaggcatgaggcgctcgcgattcataaacggttaggagaagcgattagagggatatttatggagctggagaatttaatccgacgtgaccctcccaaaacagcgtttcctggcggtgggattcacccgatcacgcggtacgtgatgaattatctgcgtgcggcgtgtaaatcgcggcaatcgttggagcagatacttgaccagacaggaaatgaaaccggatcagatacgagaccgttgtctgtgcaaatcatatgggttttggagttgttggagagtaacttggaaggcaagaaaagaacttatcgtgatccgtctttgtgtttcttgttcatgatgaacaatgacaagtatattcttgataaggctaaggataacgagctaggtttagtcctaggagaagattggattgtgaagcacgcagcgaaactgaggcaataccattctaattaccgaaggagctcatggaaccaagtggtgggattgcttaggaccgatggtccgtatcccaagttagtagagaacctaagattgttcaaatcacagttcgatgaggtgtgtaaggtgcaatctcaatgggttgttagtgatgggcaattgagggaggagttaagaagctctgttgccggaattgtatctccggcgtactcgaatttcatcagaagattgaaggagtcaccggagattaatgggaggcgtggagagccgtttattccgtatactgttgaagatgtggagtttataatcaaacggttgttcaaggaaagctcaagttgattaaattagatatgaaaagaaattaaaaaattcttattaattgaatttttttgtaaaattgtgaatcattctgtgtttttttatctttcttgggtgaataatgttcatggatcggtggaatcaccttttcgacattgatttgttcatgtattgcttttttgatgtaagaaatttccttaaggttaaaatataattcgtttgggtttcaaaacggacttacgagcattgtgctatagagttacaacttaccaggatagagtagtataatatcataatagtatacatgtaaaacctagcttaagcaaatacgaaagattatgtgaacccacagggaaataattatagattgactacagattaattaatatatatgaaagcaaaatgaaaatcaagagagtacgtggaaaatttgttcaacaagactgagactgatgactatgtaagcaatttgggaaggatgaatatcgtcccagaaaaggtactggttagggttaggacaaatccgagttaaagcattgcacaagtacgctaactctatttctccagtcccgcaacatcctctcgtcgtctcctttaaccctgtcccattcaaaggaataacattgataactacttagctttgtaataaaatgaaatattttatagtcttgaatgttctcttataacaaactataatttcaaaacctgtaaaaaaaattatcagtaaaaatcctgtaaaatacatgcacttcacacgtatgtgatatatactaatatgagagaattgtgcggagaaaattggattatgctttgggtttgattgatttcttttttcttattttgcatttatgcaatatcttttttaaatgatccaatataacaacctcaaatatattttttccaaatacaatataatctagaaagagatgcaattgatcaaaactcaaggaaaactagatttagtgcgaaacgttatttgcatgggagtaaaggaaacgtaacgttaccgtatctttgaggattagtggccatgtcgaacaatgctccgtagatatcgccgtagaagatgacacttccagtgaggttggattgcatctccgtcaaggagttttttagcttctggttaaactcttgtgaatctgagttttgtttgtcgatgcatcgtctctcgttctgcttttgcatagccattgtcatctgaattggtaaacacccgaccggcggtagacccaacaccattattttacggcatccaatgtcatatagttcctataataatatacatcaacaacacaaaattaacattgtcgaaaccaaaatatggaaaagaaattaaaataaaataaaataattctataattaaaaaccatatgtatggtttaataggattgtttacttgaacgaagttgtgtacattcgagagaatgaagctttgatagccatcaacgccaagcttctgacgacgagaaggagtatcgtagagatttagattgaaatcgttagttccggagcttacaatcaccagagcctcgctgactatcgaggccgctttctcgtccccgacgatctggctcaacctctccacgtaacttctgagcatatccgcctgtttatcaacggatagagttgaagttgctcgatctgtgaggttgtcgtaaccggaaccagccgaagcaaagcacactccggtgatgatatcggaatcagacaagtgagggtctaggaaaggaggaacggtgtctttgattcccataagagatgctatgaagtccggaataagtttaccgttagagaatcttccggtagcgttgtggccggggaaattgcagccgtaaggagggaaattagcccggatgtaggttttgatgtagttgttgttgccggtatcgattgttgaatccccgaatacaagaatagccgggaacattgatacgttaacgttggtcacgttaatcacatatgcatggcatgtcgtcgagaattgcattgtcgttatgatcatgaatataattacatggatcaacattttgtctcttcttctctcttttctttcttccctttataggacgactcggttgattattggagtctactagtactatatgtaatgtatgtctcatattaaaataaaaaataatccccttgaactgttgacattttaggcaaaaactcatggccattgttttaatgggccaatcaaatgggctttatagagagcccatagtattgagctttttttcttttctttctagagcttaaaatagataattttgctgacgcctgagttttgaatttgagagttgtttgttaaaactcttacttactttcgtttttaattagattaatcttgtcgcaatatgtatgaatgtatcacaagttcattatttttcttttttgacagctttcaactttctaagccacaaaaacccatcttcagtctttaacatcagagattcagagtgacttctttcttcttcatacccccactccatgactccaatatatgtttgtccgaactcatctacaaaaatcacagacatactgtcattcaatcatttaagagtatttttatatcaatcataaaaaaaaatagatagaaattatatggtcgagtaattgtatagtgagacagtagttgataaatgattaataatagcgttacaaccaaaagaattaatgcatgcacatattatcttctgaaacgttaaaatatgtacatagaaggaaacccacgagatcatgcaaaagattatacaccaataatgtatatttatgtggttgttatgttaacgtatatatcttggtagaatctcttaaaaaactagattctcctaagtaataacacgctgccaaacaaacaaaaaaagtccaaacacggaaacgagtttggtatagaagttcgtgcaggaggagatcaattaagattacgaaaatcatttaggctccaaaacaaaaagatattgcacacgagggaaaatctaaacaaacgtgtgttgtaggctggaaagatctctaatatctatgctaagaattttaattattgcattggtttgtctttattcgatcaggtacgttccccctaaaacaccaattcatcccataatctatactataatactaattactagtgatttccgttggttttagaaaaaagtgttgctaaaatgaaatcttcctcggcgttgggagaataagtattaataacataatgaatgttattaaaaaatgaaatgcttgtgaaaatgttgaccatgctatatactttatattcattaatgtttcatactttcttaccaactcttaatgttcaagtgattgatcctaaaaaagcatgatataggcttcaaatcatttgacagcaatttcaatcatgattagttcttataattgtataaagttaaataacaggaatacctcactttttatatatacaaattctcaaaaatagtttgaatcaccctgttagacataaggccaatgtggagattgtgaaagcactgagttcgtattccttacgtactttccagttataaaagacatgtttaatttccatattccttacgtatagattgtagaatgagatgaaatggagctagtattcgaagtttgtaaatggagctacaaaataatactccttacgtatagattgtagaatgagaggaaatggagctagaattcgaagcttgtaaatggagctacaaaataacatttgaacccaaagacgccagttatacttatcataacttatattccccaattatataattacatttgcatattctctggattaataatgtattcggataattgagaaaagagggaagaaattgacaattaatgctttgtaaaataagtttttaaatagtgcaaacttgattaagtggttaattaacaatccaccgtgaaagttgtgaaattgtggaacaagacaggtttggctcacgttcttcaattatgatctcattaaaccttttttaagattcgtaagaaagatttagtctttaacacattgtggcgcacacacacccaaaatctcatctgtgttttggccattctctgattaaacaaatcaattcaggaatttaatctcccattaatttatgttttcggcgcctatcgtacgtcgtcggtgctttgaaacctccgtacaacgaagcttcttctttcatgtcgcgcgttataattcgtttccaagatttattttctgccaccagatttattttgtttaattaatacattctcttataatgctattttagttgatcagtaatcattggttgttcacaatgctttctactaaatctttttttcggagaagatgttatagaaaataaacttttaaatcggaataatttgttatgagataattgaataaatgagaaataaaagagttaaaaagacaggaaaaaattgaaaatgacaattgtttctactgcttgataatattagaagaataattctgttaaatcctaaaccatgaaaggatatacatgttttaacacgtaaaatactatcttgccataaaagtatatatcaaaaagcatttagcatcatctttgtaattcaacttatattgaatcacaacatagaatggttatatctatgtgcaactacaacctcaacaattactaattaaattttaggcacgtgaatacactgtgagaaccatattatttcacattcagattctaacttagaatttaaagactgagctcctctattttctaagccagtaaataatcgatttcggtttacgcgctcttatatgacgcattcaataattatatttattcaactttaaaagtacataagtattgatgtggtcctgtggattacttgtcccctgatccagttctcttgcttaatcaagtaagcttaattactcattaaaccccaaaaccaacgggtcttcaactgcataagtacttaagccccgcaagttgcagataccttagttaagtacatattacgtacgtacggtattgactttaattagtgcgagaatcatatcattaacagaaactcttaaaagcaacacaatagtttaagtaactcaagttttatactactataaataaacatacttaaattaatggtttctatatttgtcagtgctattatgggttatatcatttaaataacaacgtaaacgaatatatcaatatgtataagcgaattaaggaaaaatacattttcataatattgttttgtccttcaagacagctgttttccttttcaggaattaattttaaaaaaaaaactattttccttcttttatttaattttaaactcgttcaaccgatgcttgaacattaaaagtataaagtaaacattatgcatttgattgtattgtattgcttaataaatttaattagcagatacttttttggaaatgaataatgaagagaccatatgagggcgtcttagtcttctccctaaccaaattgaattattcacttaagaaaatggccaaaattactttcccaattaagacccaaagtatggaattaaccaaaaatataattttggagattctagaatacgaaacaagtagtaaactcaactaaattgtacgtatggattcctaaaaccgttcaaaaagtatacatctatgagttcttcttattctctgtacttctatttttctatttatatatacacatcgaaatcttcattgttcaacatatatttatatctccaaaagtgaagtagcttgagcacatacaacgagaaaatgtagttctgaatactaacgagaaaaaacttatttgagttaaaaataatggattcgttacttccaacattgatatcaaatcctacttaagtattcgtagtgtaaagtaccctttaaatttaaatagataatcctttttcagtttccaagtctttggtcattgtttcacattattaattacgagtaatttatctaatcccaacacgctcctagtttcaagatttggtattattcgagaacgaataccagaaaaaagtcattttctctccttcaaaatttgtcacatagctagccttataatatctttactcgacttatttcgtcataattatttactattatagtctccatcagagtttcaattcagagatctaagaatctatgtatataaagattaatgtaactttactctgtttcgaagttcgaactttagtaatatttttaaatatttgtgtttgtttttgtaaatttaataacggacttgcagttatcaggatgtttcagactgatttggagtggctaacaaatcgaaacagatttatgtgtgtatataacttatgttttcttggtcttgaatagttgaattcacatcaaaaaaattcaacggtcttatgacgttatcatacttttaagggtaagagcctatatgattagtgagataggaatttatatagttttgagtaaattcaaacaatagccataacttagataataatacatgagggtggattcaagttaatagcgagaagacacgagggcatttaagtcatttactgtttgtagacgtatggtcaatcccgctttggtgttacgtgaagtgttggctcctatataacctcgtcttctccaacttgttcttccccataaatctgataatcaatatatatcaaatactcaaaacaaaagagaaagaaattaaagagagagatgggaaacagcctaaggtgttgtctggcttgtgttcttccatgtggagcactagatttgatcaggatcgttcatctaaacggctacgttgaggagatcacacggtcaataaccgccggagagatcctccaagcaaaccctaaccatgtcctaagcaaaccatgttctcaaggagttgtccgcaaaatcttgatcttgtctcctgaatccgagctcaaacgaggaagcatctattttctcatccccgattcttccttgccggagaagaaaaggcggagaaaggacactcctcgccggaagaagaatctccaaaaccctagtgccgacgccgccggccgagaaattaaaggtgatgaggaatgtgtgaagttgtgtgagaagtacttagaagaagtagtgtcgtcggcgtcgacaggtaaagagcaccgtcatcgccggcggcacagcagatcggcgtcagtatccacgtggcgacctctccttgacagtatctctgaggatcttaattaattcctctttcctttaaatctcttttttttttgttgcttctagctaatggtgttttttgtccggaagccggatttttatcattctctttttcattttttctctctttttttttggttttggggaaattttcacgaaaagagttatataatgtggataagatctgtgttaaaattcggttgtgatttcgagtcacctgagaatgatgatattcaatctgataatcattgatcaaaagcgaaacatatattgttgaacatgttaacattagtataaattacatggaataagaataaataaagagaacggttaaaggaaaattttaaatggaactgaatcaaagaaccagccttgtgagtgtgtgatcgaattgtagactaaaaaagcataaatgaaatgattaatgactatgataaaatgtgtttttaacggaaatactactttgaatgattagacttaattatataagttaggtcgttattgaatgataatagttagtgctcaggttttcacatgtaagtggaccaatcgaaaagcctttgaagctgaaataaaaaccatatgtttcaaataatataaacattaatcatataaataagggaaaacaacttgtaatgttaagtgttaaccatatgtggacaagacaatgtatcaatgattatgcatcagaaaaagaagttaacgaacaatttcctcttctcatgtaccatgaattttattgtgtatagatttgttttcaacttttagctacctgtgtttgaatatttataatacacgcgttaccaacaaaaaaagagagacttatctatatataagattctaagattcgatttaacatgtcagatgtggtaacgcagttgtacttattgtatcaaaaattatactttcacaaattaacacctaataatattgcaagaaatataaaattgttcatttgttaccagttaaatcaaatttatatgagtttgatggattcttcagctggaattaaaaaataataatataaagttgataattttgttattggacaaaaggttggagatgactacaactgcaagttaagatatttatagaaaaatgtaactattgcaataaatatcagaataaagaataaattattcttcttcttattattaaaacaaatgacccccaaaaaaagataaatgaaagctggcgagcccatctgaatatgctgccttcacatggataccttcttctatgccccatctctattatacattcattttttttcttaacactctttctttttcgtcttatttattcctctctatggtcgacgatttactagtaataatttgtttgtataataatgtgtatgcaactatgcatacattactatgtttggtccaaacagcccatcttctccatacgcccgagccattaatgcttccaattttctttttcttacgaaataaattctaagttttgataataaaaatactatatatgtacgtaattaaacttaattagctagaagattccaacttcgttcacttacgtcttacttgttagctagcctatgcctcacaaagatcaattaattcttataatcgttttaaattgacacttgttttgtttcataagttgagtgtagttttcggtgaaacatacatactgatgctctcatctaccgccaaaaacttataacgtagttcctgttatttgaataggagcgacgaagtgtaattaaattttagagacccactcgctctcacaatgatccgtcgatacgtaactctctcacatcgaaagaatgacacgtccgttgtttctgtccacataatagcaactttgagatccccacatctttggaatataaacgaacccactttcaatttctcgaaaataaacttgggggtgaaatagcgttaatcaatgttcagacttcagtgcaatactagtagcttttgcttttggaaacatttgtttagataacatgtcttaaattaatcattaggaaaaaagaaaaaaacagttagggtaaatccgcctatatatgtgtggcgggactgggatctcgtattaaaggcacgtctcaatcaaatctattctatgagatttatttatgttttataaatgaaattatgaattaggttcagctagtacaagtgtacaacagacaaattgattaacattttcagaatagttagatgatattgacatttgtcatgattgatttgatgctgatcgttttgttgctaactattttctttacgtgtgaatgcctaatttttgtgcatcgactaaatttttctatgtaataagcatcaatcttttttttataatgttttatgaagaatgtaatactatactaatattttcgtgagttaatgaccaacgctaaaaatttacattctttatttatgtataagtgaaaaaaatagtaaaagaaaaaagaaaaagagactaatttaacggttgctgtgaagatcaacagaagtaaagccttcttcaacagagaaacgagggtgcactcttggatccccaaccctatgaggtgaagctggcaatttatagctattatccatcgctagagaatctccttcttgttgatgaatcactagcaccgagaaatgaaaatccgacgacgcaaacatgtctccgatcacacctagctcagggcactcgctccagtctgtaagtccgtataacaccgacgactcaaggtcatggtcacgacccacaaccaccagatcgaatgaatcccctagtgaactaatcacttgcgtggtttccacgccatctctcactatctcttctctgtaactgattttcggtttgctcattgcgaaattcttgaaatcgtttataaggtaggactctgctaattcggattccacatctactacgtggttctgctggagggagctcttatggcggaaatggatcatcgtgacgcttacttccgggtgctctgcgattctcatggagaaagctagggcttctgcgtcatctcggccttcgatgaagatcactgcgacgtttcgccatgtgtagctcatgaggaccgagcggcggccttctgtttctcctcgatcgatgaatattccgacagaacaaggtgccttttctagcacgttaaggtttatgttacggattgatgggttcacgtggtctaccgtcccgtctatcgcgtactgtttgtggaaagggatgacgatgagcgtcgctttcttgtcgagggcgagagtgcaaatgtcatcgttgatgctggagaatggagctgcagctgtgaaatgctgagccattagggttccttggttctgctgttcgaatcgttggaaaccgttgacgatgtgagtggattgaactgtgttgggatcgagtttgttcatctgatgatgcggcacgagcacggcgtgcgctcgacctttaagctcgacaaggtggagtgtgaagacagagatcgggctgaacctactcgggtaagaagcttctagaagattaaccatggaaggtacattttcaacgttgtagacacagagcaggagccggaactgaaggttccgttgtctcgtatcgaggatcgttcgcttactcttgcttctgtagcgtttagacgggtcatagaggcaaactacgaggaaccgcgaaatacctgtcacgagcaagagcgtgatgataaggagattgaagcattctgtgtttagaacctgcaaaatatgaatgaaaaagtttgataatgtgttcatggaccgatcttatgtttagagaaatctgatcacacaaatgcaaacaaaacaatataccttttcgtctttccacatgacacatgtgtaaatctcaatgactccttggcaacacatcaagagggccaaagaaaatgcgtctccgatttgtatgttgcaataagcggaagctgctgctgttcctaggaatttgcagccgtaggtgatgagtataacggcctcaatgatcttcacgtggctttctccgataatgaagaaattggtctgcaatccactaatggagatgaaacaagggagcataaggctcgttgcaaacatttcgagctttgtggtgagcccggtccctaaaggaggtccatccgggagtgatactccgagccagaacgctccaaacgccgcatggaccccgagaacttcggaggtcaagcttatcgtcagcaggaccattatgatcgggaagaatgggatctcgcctgctttatcgatcgaaatgcttcttctctctgtcaaccagatgatagccggtctgcagacgaagaaaatcacgaggataagagcagtcacccaaacgaaagaccaaacgctagctagtgtcccatcccgcaagaacattctgaaaacaagtgcaactatccagctaaaggcctcacagacaatggagcagtttgtggctaaccgtccaagatcagagttaaggatgttaagctcagctaagacggttgtggtgaccgggaatgaggtcattgcattgagggagatcactgtgcttatgcagtggacaacgtctggcgggaggttgtaagtgtttttcaaaaagaggacagtgaggttaccgagggagaatggcaaggcgtaggaagctgtgccaatgagtatggctttggaaccagctttacgaatgatgctagcgtcgattcttagtccaagtaagaagagatggatgaagaacccgaggtttgagagcgtttgtaaagtgattttgccgcttatggggaggaacatctgcatatatgcgctgctttggccaaagagagacggtcctaggatgatcccagcctgcgtttaaaaatttcgcaaaaagagagaaatgaaaagagctccagactccatagactagtctaagttttgttctgagattcctcgattacagaaaaagaaagaaatatagacaacttattaccaagacttgggcagagatcatgccttgcttcaagggcttgaggaggcggtagagaagccttgaggtgatgatgatgacggacatttgcagcaacataagtggcattgcgtatttgagagggtcactgcccaagaaaacaccctttgaggtcaacatgtggtttttctggcacaccatgttttccaccaagaatggcccatgaactttgcctctctgcatcgagttcacctcctccaggtctagctttgacatcgctctgttctttttgtgcgtaccaaagacagtgagaagaacgtggaggaagagagatttctctctaaatatgcagaacctacttgatgccgacagatgagaatctcttagtgagagatgaagaacaaaacagaggactctgtttttattttggggaattgttgattatcttgctatcatcagatctagaatggtatctaagttttgtttaaaggtcagagacaaaaagggaagtgagagaaaaagagagagagagatgaagcatatttgttgcctctatttatcgaatgcgactattttttggctggttgatgtcagtaaccccataatcttctcatttctaaattcgtggttttagttcccccaaagtcctaataataataaggcatttaaaatgagattttctccaaccaaatcactctcaattcttcgatctcattacattctggtctaaagcttcggggtcattcacaccactaatcggaaacgaaccaaataaaataagacagtttgcttttaaacagctactaattagtatatcattaccattcatccgcataacaaaactctggttttcacttcttggcaaaagagacgaccattggattctgcggagtgatcttgaaaccctgaagagcctgcatggccatggaagactgaacatcgtcttcatactccacaaacgcaattccgggttttgcttcgatcattcttatctctttgaatcctgggtattgctcaaagagcagctgaagcatcatactattcgtctcaatgggaagattatgaatgaagagtatgttgtttggtggcatcgtgtcttgcccactcggctggaaaggaggctgtgaaattacagagacgggtattaggaaacaaggatttacagactaagttgcgataatgacgtctgtcagaagataatattgtattgttggaatgatgcgagaaagagaaattgccacaggcattccgttctgagtagttgcgccattaggcatgcttggttgttgagtttcttcagcatgtcgcttcctttcaactgaaagtgatgtgcagttttgttaaacatcagatgcgaagtaaaacacagatgaaatgagctgaaaagatctgaacttgtgatggaaacgaaagtttaaacctttctcttcttgcttcatcttcttttcttttggaacaaaagacccttcggctttagtaacataatctgactttgattttgcatattgtatccgctgcacccacagagatcacacatcacgatttgaataataatattgcatttagctttttctagtcttttacttagtaatcacttgtgtaatgatataccctcaacatctaatgtcgttgtacttccttcaattttatataacaacaagtatcagcaagcaaactcaattttccctccaagtaaatctctgcaactttctaagcttatagtctcacataacaagataaaatcatttttcggtagcgggatagataaacctggaacataagagaggaaaaaggtaccataggcttatcatagaaaggaaagttctgcatctgacggacagcgttgctagcagcggtgacttcagtaaaaacaacccatgcttgtccccggagcttaggagtctttaacgcaaccacatcaagtaatcttccaaactgagagaacaaacagtaaagagacctcttcagctctgaaaaaaacaagtggaaacattaaacaatgatctgcttgaacagcattactcttagacaaacaaaagcagcagctaaagaacttaaggtcattgacttcaatcaaacaatctaaacaaatttcatggcaaaagcaatcgcctttcctacttaattacttaaataaagcacctttgttagagtatctctagttcaggtctattaagattagacagaaattctaaatccctaatacttagaaagataactctaaatgcatctaatctaaccttcgtaaacatcaaattaagcaactttaaactcagacaactcattcaagagaagctcacacaagcattaccaagctacttaagcattgcaaaaactcttagaaaatcaccgatgcaattatatgaatttcgtaagcattaccttctttcttgatcttctcattgatatgttttatgtagattgactgatttggtggtatatcagccgttaacatctttcaactgagctccgcgaagacgacgatggtcgatggtcacagccctgagaaaatttagcgagccctaagagccaagaagagagaagaaatcgtggcgtttccaatttacacaaggcgtctaatttgtttttttatgtaaacatcttaccgttaccgaagagtaaaacaacacgtagttttataatattattaaaaaacgtctggacgttcgaaaggggattttgatgttttgttaggccctatctctttccccttttcttcgttcgcatctctatcttcttccgttgtctactgtttttcgttaaaccctacgattcttctttttttcaacgactgctcggatctttctcagtagagggaaccatgaatccctcactcgtcaccgccattaacgctccaatttcaccttctcctcggtctcctcttctttctcacttcctacctactttacctcaccgtttctccaagtctgagtgtctatctcgccgtcgttatcgagtttcgttccctcgtagctcagctgcttcctccgaccaactatcagtatctacgcaggcgaagaatcccggtatccatgggaataagaaggagctcactggattgcaaccgattgttgagaaaatgacaccgccggtgaggctagcgacttcagctgttgtattagcggcgtctttagctactggttacggccttgggctccgtttagccggctccaggaatattgcctttggtggggctgctgttgctggagccgccggtggagctgtcgtatatgcgttgaactctgctgtaccggaggtagctgctatcagtttgcataattatgttgccgaattcgaagatcctgcctctgtgacgaaagatgatgtagaaaagatcgctgataggtgagtgcttcatttaattgtcaatttgtgtctgggatttataaacaaaagtttgcttaaacgatccttcttatatgttgcaggtacggtgtcaacaaaggagacgaagcattccaggctgagatttgtgatatttattgccgg

SEQ ID NO: 1113 - DNA, 104830 bp, Arabidopsis thaliana
gaattcatcatctattcacttaacccacaaataaaaaaactctcttttacttcactttctcactgaatttctgatttgtcttgttgttgtggtgcaggagactagaatgagagataggtttactttgtacgcacgaggcggtgaaggtggtagtggttgttctagcgtccgccggagccgtgccgatcgctatggcaaacctgatggtactattctgatattgttaccgattgataattaggttgaatcattcccaaatccatagttatcgtttaggtttggtatacttagaattggaatactgtttgagtgattgattgattcaaaaaatgttttatgtttatgtaatgtaattgagcttagtttaggtggtaatggtgggagaggaggtgatgtgattttagaatgcacacacgcagtttgggatttcagtggattacaacctcatattgtaagtgtatctgtcactcttttcgtgttctcggggaacatgtctcatgagaatttctctgaactggttatatcaatgagttttgcagaaaggtgggaaagctggacacggaacttccaaaaacaggataggaaacagaggagaagacaaggttttattatgttctcattagttgttcctgtgcttctttcttttattgttcgggaattaagatgttgtttcgcgcttgtttgtgttaccataggtcctgctagtgcctattgggacagtgattcatcttcaggagggtgagattccatctcaggttgaaaatgagtctcccaaagatttggatccatgggaccttcctggctcactggttgaggatcctgcatccgaggagaattctgatgttcatcaggaaactatgtctgagtctgatcaagatgatactgagcaggagagtttaacgagacagttaggcatgccaaaggaagctgattttgaagacgacgatgaagagattgatcaaatcaggtataatgttgccgaattgacacaacaaggtcagagagtaatcattgctcgtggcggtgaaggtggtttgggtaatgtttccgctacacgttatgtaagaggcagtaagtttgctaaatccacaatccgtcaaaccaatttgaggagcatggaagacgatgctgaagaggatgatgaaaggtcgagtattaaagccggtttgctcggttctgaggctgttctgatattagaactcaagagcatcgccgacgttggccttgttgggatgccaaacgcagggaaaagcactcttcttggtgcattatcccgagctaaaccccgtgtaggtcactacgcgttcacgacactccgtcccaatttaggaaacgtaaactacgatgatttctccatgacagtagcggatattccaggtcttataaaaggagctcatcagaacagagggctaggccataactttctccgccacatcgaacggaccaaagtcttggcttacgttgtggatttagcatcggggctagacggttgcgaaggactgacgccgtggcaacaactgagagatctggtgatggagcttgagttccacgaagaagggttatccgataggtcatctttgattgtggcgaataagatcgatgaggaaggtgcggaagagagattgaaagaacttaagaggagagtgaaaggagtgaagatatttccggtttgcgcggttcttgaagaaggcgtggctgagctgaaagatggtctgaaaatgcttgtcgacggtaatggtgagccatcggagagattaaaattggagaatatatgtgttgactagtttattccagtagatggacaaattgaattgtcttggagaagtggctcaactattgtccaatgaaatagtttaacgatttattgtagtcaattttcttttttatatgattatgcaaaatgcgaggagtattttagtcaaaacgtgaaaatatgtatagccttttaaattatggttttcgttagagaggagacatatacacatacaaacgcaaaagaatacatatactatttatgatttaggttacaaataaaaacattacacagcaggaacaagtcaagcaagcttaatagttactcttactcattacgcaacacaatgccaagtctttattccaacatacacaaagatctcttagcataaaacacatttttttcccattttccttggtttgagaccatgctgataatttcttcaacagttacagcttgacccgcagctgcagtttgatccacagctacagttatcacactccttgttgtagttcttctcgcaactttgtcataccaaaaaaacaacagaagtataagatttcaaaaatttatcttaaggaatatgtaaccacatgtatattagatatatatgcatgataagttaatgaagagagaatctagggtttacctgcacgaatcaccacatttgcaggaggagccacatccacagttagaacctgccatttctcttacttctctttgattgattttgtagttttctttttcttcttctgatgctttatgtgatttcaactaagggaatggccagtatatatagaagaatataaaatatcggttttatatccaccatacatttcctatatatatatattatcttttgtcaacctccctatatatattttatattttcctgtaagttttagtttcgtatatgatagggttagcaaagtttttgtatatgagatatacatatagctttcttgttggactatataatccctctagatatagattttctaatttcggcagattttgagtaaatatccaaaaaaatctcactatcttgacaagattacaaaataatcttttaatttaactatttaagacaacatgtataaaacctatatcttaactaaaaactctatattattgcaactatataatctaaatgtctattatcttaaataaataaaaatgccactaccactttttgatattataggccaagttattgatcagtaaaacgaggccggcacgtaggaactaggaagtcaaaaaataatatttttgtgatggaacgtaaattcaccaattcaggaccttgaaggggcaagaagccaactaaaacaccagccccaaccctagtgcaaattaccattctatataatgaccccatctacgatttattccttctatttccctttacgtaaagtagcgacgttcgtgaattcctaagaagttagactaacaggtttgtgtggttcttaaatttttgggtaaaaattaggaaaaaagtttatattcctacccaaactttcggcaccagagacaaattaggtttgttcagaaaatcagtcgctcatcgacagacttaacaccacaaaatcatcagaatttctttgggacaaaatggaaaatgttcttcacggctccacctaccaaaatttcgatatcaagctcaaaagcatacacaaactataactaattccatagttacgtaatcttaacttcgaattcaacaacacatgcatgcatcgactgaatcttcaacaaatgcaatcaaacacacaaaattgctaccaaaaaaatatgattttttttttatgatttcaattttcatccggcacttagtccaaaactttttttgtgtgtcaacattttttaaaaaaatctttaaacggatatctgatctaagagcatgttcataggtgatacttacaaaatatttttaagaaattttttagtattatttataatgtttgtttaataaatatatataagattttttgcttttatcaaatgtgaccaatcagaagaaaccacgtcagatgatactgatatgacaaatatgatactgatcaaacatattctaattgctttactaatataaaaataatttttggacttgtgatactctaaaaatatcacccatatacatggtctaatatatggatcgtaaaaaactcatatataatattaataagtagtagaagagcgtagaccatgtcctgggtcgtcgtccaaatgaccacaagaagatttcaaaacagaggaaaatatttctcattaaataagttttcctgacgcataagataacattattacaagattcagaaaaagaaaggtgaaaggataatgtttctcctactatataagatgtgtacatctgaaaaaatatgaatatatttgtaacgtttgactgttattacatgattaatacgatataaatattaacattttttttcaaaataaaagtaatatagtaaggaaatgaaaagaggcatgaagcatgcctctttttttggtcggctgccgtttacaattgccaattgcgatagttactcttcttgcgtgtacgacttttgtttttttttacatattcgccaataatttgacgttttctattagtttgtttgatactctgttgtcttgctaaaactcaataaaacattaaattactttcttgaatgaagctggaacaaatctaacataaatagaaaatgatgggcaagttgatgttattcgtaaatttatttagattatattatataaaaagcaatccaattatatatctcatatatacaatttcttatcttactttgtcaatgtcatatacgtaactaaaacttgcggaaatagaaaatgccacgtgtatggtggacataatccgaatctctctctttcttctataaatagtggccattcccattggttgaaatcacaaaagcatcataagaagaagaagaaactacaatagttaatcaatcaaagagaagtaagagaaatggcagattctaactgtggatgtggctcctcctgcaaatgtggtgactcttgcaggtaaacccctagattctctcttctttacatttatatgcatatatgtagactatgtagttcgagcttcatggtacaaaattcaataaactcttcttatgacttcgtttacaattgtgtttgtgaatagacacaaaagattagttttgtttactttagattcaaaacacttcgggcctatcctgtatatatgctgatcagatgcatgtggttgattaatctttaatctcatcatattaattactaattttttgtttgtttgattaatttgtgtgtggtaaagttgcgagaagaactacaacaaggagtgcgacaactgtagctgtggatcaaactgcagctgtgggtcaaactgtaactgttgatgaaattattatggtctaaaatcatatatatggcagaaaaattggggaaaatatgtgttttatgctaagagatgtgtgtgtgttgttggaataaagacgtgaccgttgtgttgcgtatcaactctcttaagctttgacttttcccagctttgtattttcctatgtatggtaatggtgtgattgtgtaatgttttcatatgtaacgtaaaaaaaatatttatgtgacattgacttttgtgactactaagatttgtatatgtctcctccgttttttatttaggatttaagttcaatcagctaaattaatcataaacaatttaagtaaatattcatatgagaagaagtcaaccatattcttatcgggccttatatgttaatgttaaaaggttacgggccagtaaggtcccaaaaaagaagaagagatgagatccattattgctctcatgaggcaacgagaatatttcgttcaggcaattcgtcgaacaacttgcgtggcctcacctgcgttgaatcaaactaacttccaagcttcgagctttctcactaccctaatatcttcgaagaaatctccggaagagacatgtatcggatcggaggaagaagaagaggagcccaacaagtgtttgtctttgagaatcgagaagcttccgaagggcgtaactgttgggtctgctttacagagctggatgggtgatgggtttccagttcatggtggagatgtttatcacgccattaatcgattgaggaaactcggacgaaacaaacgtgcccttgaggttcgaattcttacttgcttctctcttttgaacgaagaatcagttttatgggtctgaatagtttagaaaaagttagatacttttttggtacaggattgttgtatcaatgtgattttgccagtttgaattcagatgagtaatttgggaatgctacttgatagaaatgagtttcttttgatgaagatactcttgaatgtgagctgaaacattttggtatgtttgattcagttgatggagtggataatcagggaaagaccttaccgtcttggtgagctagagtactcttacttgctcgaatttacagtcaaacttcatggcgtctcgcaaggagaaaagctatttacccgtgtccctcaagagtttcagaacgagcttctttacaacaaccttgtgattgcttgtttagaccaaggtgtcataaggcttgcgctagagtatatgaagaagatgagagaactcggttaccgtacttcccatttggtctacaaccgtcttataattcgcaactctgctcccggacgaagaaagctaatagcaaaagaccttgcgctcatgaaagctgacaaggcgactcctcatgtctcaacgtatcatatcttgatgaagcttgaggctaatgaacataacatcgatggggtgctgaaggcttttgatggtatgaagaaagcgggagttgagccaaatgaggtgtcttactgtatattggctatggcacatgctgttgcgagattgtatacagttgcagaagcctataccgaggaaatagaaaaatctatcacaggggataattggtcgaccttggatatattgatgattctatatgggcgtttagggaaagaaaaagagctagcgagaacgtggaatgtcataagagggtttcatcatgttagatccaagagttacttactggcaaccgaagcgtttgctcgagtagggaaccttgatagagcggaagagctctggttagagatgaaaaacgtaaaaggacttaaagaaactgagcaattcaactctctgctctcggtatactgcaaggacggtttgatagagaaggcaattggtgtattccgcgagatgacaggaaacgggtttaagcctaattccataacgtatagacatcttgctcttggatgtgctaaagccaaactgatgaaggaagctctcaaaaacattgagatgggtttgaatctaaagacgagcaaaagcataggaagctcaacgccgtggctggagacgactctatcgatcatagagtgttttgcagagaaaggtgatgtagagaactcagagaaactgtttgaagaggtgaagaatgcaaagtataataggtatgcgtttgtgtacaacgctctgttcaaagcttatgtgaaggctaaagtgtatgaccctaatctgttcaagaggatggttctaggtggagctaggcctgatgctgagtcatacagtttgttgaaacttgtcgaacaatataagccctgacacaatcaagtctgctccaatttttttgattgattggatagttagtgacttgtgggtttaagaagttgttcgtaaaagtatagtttaagaagttgttcgtaaacttacaattaaaaatcagacttgaaaaaagcaaaagtattattagttaacccaacatttcccgcaagaagttgaacaagccattaaagagaagtaacgatgagccatgtactcttgtttttcttcttatttgtcatcgtcgtcttgatcactctctttacaaatgtttaagttttcattaagaaaaccccaaaattcttctcgcaccattcaaagcaaggaaaaacattttcccatctctcatagtctctgaatctgagatcccggcggaataaatcgaagatcgcattggcttcgttcgtttaccaccgttgtaaaaattgagtcacttgccatcgtgaaggaggagcattgggccaattgggcatatggcttcattattatttattcatttgggttaagttgggcctagcctgaaaatagaaataaaatttggtgaattcatatgggccgaaaaagctgagaacaagcccaaagatggtgatggggaaatcatttttgagctggaagaaaggcaaaaaaagtaatagaggtttcgtgagcaacatgattcaacggtagaagaggtaatgtatattggctatgggaaatgctgttgctggatttttgtatacagttaacttacttggtcacgggctcgaagggagctgagctagtcgcgtacgttggttggttggttgagccgtgcacctaaagcagctttgtaccgacgcgacaccacgtggcggacatgcttttgcgtggacattggacctttgtctctctggggtccctccgatgggtcaaactagcaaaagtcaaaccgtcgaatattcgttcacactgtcacatccaaaatcagacaaaatggtaaattacatcaaaactctttttctatataaacaaaaaaatattgtcgacggttggatttacatattttttaataaaaaaaaagaaggaaaaagagtatgccatgttctcccgtcgattatataggaactacttgttcgtttcttcaaaaattattgggaattaataactctgtatataactagatttatttctaaattaatactctttctctttctcaatatttgtagtttaaggtttttgcatacaaattaagaaaacatataaatttcatttaatttattttttttctacaaaaacattattaattataactaattcaaccaataaaaaaatataatataaaatataattggttaaaatctattaaatacatttaatgtttgcatagaaaaatcaaaacaacatttatattgaaaaaataaaaaaccctttaaattacatttaattagaaacagagggagtagtttttatgccactaaattctgtatatcaatcgttactatcggatccaaatatccttcattttgtttggttgacaaatttcttttcataaaatacaacatcaaattgttttaagttatttagtatcgtaataaaatcttaaattttttcacattttacctaaaaaaaataaaaaatcataacaacgtatttctcaatttacaattgctactcaaagatgttctctttcttttatcaccgcatgtccacatctccatcataatcttccattgttttcaaagctaacagaatttgtttaagagtaaaaacacatttaaaaacattaaaaaatgctaagatggagatgcggggtatcgatccccgtacctctcgcatgctaagcgagcgctctaccatctgagctacatcccctacttgcattgttaaataaagttaccgtatatattattttattcgggtttggaaactttttctatctcaactcaagtttccataatttgaatttcatgaatagcaatcaaattcggcgatttgtgagaggataaaatccgaccaaaaaatctcgatcatcaaaatttgacagttaagttagaaaggcaaataaactttacaatggtaaaaaaaaaagcaatacaaggcgaagaaaagctcaacaatgaggcattattgttgtccttagagaaattatagtgaataataagtgtaaagtgtttttaactcgtgagcataattcaaatccatacataaggcagcagcatctgtaagattattgaagttgcgttagtcaattttcttaaaagatatatgtaggactaaccatcgagtcaatgacaatctttgtcggtctcctctctggatttaataatatgttaattcttatcgaagaagacctcaaaacttgtggacgatatacgagtatagaacgggcccagtcccctaatgaattaagttttgtattttattcaaatttcaacgaaccatcacacacatgttgtggttttcatcaaagtgtaataatcaacgatagtatcccatgcatgatacacgaaaaagaaaaataatctgaatgaatgaaccaacgtacgtagggtttagctggaaagatgctcttaatactcacggacattgtctcattccatcatgcaaataatacttctttttcttttcacatatgcaaataatactaattatgtagaaaaaatcatattttgtttattttattttagtagctacaaattcatttaaataattttaaatcttatagaaaaggatatttgaataaagcctatactaatccgaattttcaagacactggtttttgcattaacgttacgagcttaacgttaagtgagccgcaccgagccaagcctaagtcctctagctggagctttaacatggaggactacaatacaatgttaacgtcagatccaacggctgagagcgattgaacacgcttctgtgatgtgaagggcttaatcttttctatgctgacttcatcatcatatcttctttttttgtagtaccaaaaaggctaaaacgaaaacgatttagagaaatgacaacaataataaaaagtggggataatttttgatttctgatagaaagaaagagaaacaaagaaaggcgggaccgatccgccattaatgctaccacccaactacaaggcttttctcacacactctcttctctcaatctcttggctcagaacaaagaagataaaaaaaaaaggtgagtaagaatttgtctttaattatttcttcatgtgttagttgttaggttacttaaatcggcaaaagagatttgatgaacttggtcatatgctttaaagtgtgcatacatttttggggttgttactagttgtcaaatcttttcctttaaaccaatttgatttccttctcatcttttccagcttccattgattaaaagtttctacctttttcttatcttcaagtgtgatatattgtgagaagattgcagaagcgtgtccaacttggttccctctctctctgaaattactcaatcatggggatttgcttgagtgctcaggtcaaagctgagagctcaggtaaacacattacttcaaatgctttttcctatcacaaactatgagccttctcgtaggaatcttttggcttctgttcctctgttattctgtcaaggcaaagtacttagatttgttgtttcattaccttaaagttttgatttttccaatctgaggttagggttttaggtgtttctgtcagatttggttcgaatgtatgacgaaactaatactttttttgttcttatttggttggcttaggagcgagtacgaagtatgacgccaaagatataggaagtcttgggagcaaggcttcgtctgtgtctgtaagaccaagccctcgaactgagggtgagatcttacagtctccaaatctcaagagttttagctttgctgagcttaaatcagcaaccaggaattttagaccagacagtgtgcttggtgaaggtggattcggttgtgttttcaaaggatggattgatgagaagtctctcactgcctcaagaccaggcacgggtttggttattgccgtcaaaaagcttaaccaagatggttggcaaggtcaccaggagtggctggtaataatgctataagttaaaatatgccaattttggttcttgtttgtttttcattaatcttcagttttgatgattttgcaggctgaagtgaattaccttggtcagttttctcaccgtcaccttgtgaagctgattggttattgcctagaggatgagcaccgtcttcttgtttacgagttcatgcctcggggtagcttggagaatcatcttttcaggagtatgtcgtccttactcttaagtctaatcccaggctgaggtcaaacttaaagctttgttatgacgtttgtgaatattcaggtttgtttttcttgggttacaggaggtttgtacttccaaccgttatcttggaaacttcggttgaaagttgctcttggtgctgcaaagggacttgcttttcttcacagttccgagacaagagtgatataccgagatttcaagacttctaatatccttcttgactcggtaatttaaacttttactcattgttaataacttgatatgattgccatgacagaactgcaaaagttttaagctttatgatggaaaatttctggtacataatctcaggagtacaacgcaaagctttctgattttgggttggctaaggatgggccaataggtgataaaagtcatgtctctacacgagtcatgggtacacacggatatgcagctcctgaataccttgcaaccggtaagtgtcggatcctttttggtcaaatctttgttttctggaattggcttcttcatatgaatgatcactttacattttccttaggtcatctaacaacaaagagtgatgtctatagcttcggggttgtccttctggagctgttgtctggtcgtcgagcagtggacaagaaccgcccatctggagagaggaaccttgtggagtgggctaaaccatacctcgtaaacaaaagaaagatattccgagtcattgataatcgtcttcaggaccagtactctatggaagaagcatgtaaagtggctactctgtctctgagatgtctcaccacagagattaagctgagaccaaacatgagcgaggttgtttcgcacctcgaacacattcagtctttaaatgctgctataggaggaaatatggataaaacagatagaagaatgcgtaggagaagtgacagtgttgtcagcaaaaaagtgaatgcaggttttgctcgacagactgctgttggcagtacagttgttgcttatcctcgcccatcagcctcgccactgtatgtttgaatagggttaaacacgtcctgggtctgtgttcagtgttcttggtaaaacatttgcaggacatgaagttcctatatcatgtcctgagaatggaatctggatgtacagtttttgtctctcttaatgtaagaattctgtttaaatacagttcacctctcattacactacgacaaacatttaattttgatctttgtaacatgaggattcatcaacataatgataagttcgttcgcatatctgcttgttatgaatgctgcaaagtaaagagtaaaagactaacgtgccttggggttcacatctgtgccaaagcttaagttaatgtccatggatctcgatgtgtctatgtctcttgtcctgttgttttcagataccagacactccttcagctcatgaacaacatgggacatgttgggtcttttcaaggaagaaggattcacacatgtcattgctaattcaagagctttccatgcagaaccagagtcatagaccccttgaagtttaggatccataatattgctaatgtctcctctagtaagcataagtttcacccattctgctatgtgaggcatgtcgcggttatgatcgatcaccggtttgtttgtaataatttctagcagtacaacaccaaaactgtagacatcactcttctcagacaacctattagtttggtagtatctgcaagacgaaatgattatgattcttttgttttaaccggtagagaagatagttttcagaaagagctaaaattcttactcatgatcaaggtatccaaatgttccagcaacaagtgtagacacatgagattcatccccaatgggaaaagatctagaaagcccaaaatctgcaagcttagcttgtaattgatcgtccaatagtatgttagaactttttacatctctatgaactatcagcggtttgcaaccaatatgcaagtactccaaacctgtctccaaagttctttggtgtttaacaaaacaatagaaagtttgatcaagtggtgttaaaaggaaatgaaaatgacgaacctgacgctgcatcaacagctatgtttagtctatcaacccagctaatgatggagctacctgcatgtattagcatagacatgaatgtcacatatcaacacgatgcatttctgtcatgatatatgcatgagaatatacatgtgttacctgaaaaatgttttttcaaatcgccattgaccatgtactggtagatgagggccagatgatctttttcatcacagtatccaacaagacttaccagatttgtgtggtaaacccttagaagaagttctacctatccaaatatgtacaatatataatatacgtcaacttagccttacaaaaatgtataaaaattcataagggtgccaaagaaacctctgttttgaactctttatagccttgagctgatgatggagagagtagcttgaccgctacttcttcagtaccatttatataaccatgatagaccattccaaatcctcctttacccaaaaccctttcaaatttctttgtcatggcaagaacttcggcatatgtatatcttttctttattgtttctattgattgttggcttggtgatggacctagaaccatacacaaataattagaaatcactttataattatgtatgcatacaataatatttctggtttgatgaatttgatacagataccttttctgcttgatgagcgtcttttaatacaaacaaaaagcagagcgatcattgctattatagcagccaaagaagcaagtgatgcaacaactggtaacatgatgctatttttctttttgttgcatgaactggaaaaacataggtttggatttccctgaatgctagtattgtaaacaagctaatcaagtgttagtgaagacatactgcaaattaagatatcatatttcaatgaccatcaactattgaagactaaatatagttgagaagatcttacttcaacttcaacccatttttcactttgttgagaagagcttgagggactgatccactaaggttgtttccgcttaagtttctgcctaggtaaaaaataaacatcaacagactcggataataaattggcaatgtgattcatatgagtgaccaagtaacttacatgactaacaatgatttcattttggctagaaattcaggtactccacctgttagattattatttgaaaagtccctatcatatgcaaaaatgaattaattgattatatgtttggccttgataaacagagtattcaagtaaaacagagtattcaggtaaaacagagtatgtgtttgaccttgataaaaaattggcaatgtgttcatacttacaattttttaagctccgtaagattttggatctcaggaactataattccagttagttcacttgaggacaagtctctggtggtaattaaagatcataacacacatttaaagtgtaagatgttacgaaatgcagagcttaacaaaaaactgttttaatgttacgaatagccatggacgtacaaggaatggattcttggtggtgtagacatattggtgtactcgcaggtaagaccatcccacaataattgttgaggaacacatggatctccttgccaactaattctacttaatccatagcttgtttctatgctcttgatagcaaggactaacacacaataacagaatgaaaacacttaagtatatacaaaaaagtatatatatactcagattttgctgacataccgtcatttgcattagtttcagactgcggaaactccactgttataaaagcctcaatagcattgaggaggggagggagagttgattttggagtttttattagttgcaaatggcatgtccctccttcacatttaactggtgatgtattgaatagagtacccactagaaactcgtcaggactaacaggtccatagttaacatcttggcctgcgctaatgttgaattccctggtatcattttcccttaaggattggatctcagcgacgtggaggtatgcataaactaagtcgtcaggtgtttccaaattccaagaaatggttaatggtgaactcacatttgcaggtgtggctgccgtaaccactacgtcttccggtatgtcatagccgttatcatcagaagtgttgaccgtgagacttgttcttaacagtctccattccggcatgaaaaatggactccaaagacgatcatggacatcttctggatacctgaagagaaaggatggaaagtattaccgaacagtgtatccagtggaaaccaatctattcattaccaattggttttgagttggcttaccgaacagtttctttggaatcagtcaaatggacgcggaacaatgtcttgagggaaccagattgaggaatataagtattatttctcaatggtcgtagttctaaagctgatattagcggcgtagttgttcccgtcttaacaagacaaatctgcaaagaagttgaccttggtatgtgaatgatttccgcccttgttccgtttacatttctttgcaaatcgaccgtggtccatatatttggaccaagataaaggtcgaactttgggtgtgtgttaagattatcgtagtttccataagtaaacatggctacgatcagatagtttgtgccttgtatgacgataagagtataacagtttcgtactccatctggaaaatatctcaaaaccgtgtatggctttatatactccatccccggaacattttgaatcttgccgctttttccacttttgatgaaatcggcgtctgatgtgaatgttaactttgttaatggttcggtataaggagactcatcggcttgcaacccgcaatccaaactgatgaatcctgataaaggcaaaagaaaaaaaacagagaaataatttggtaaaaaaataagtttggaaactgaattaatgactaaattgtgataggaaacatgtttagtcaaagttaaaagaagaaaacctgaaacaaaaaaagttataccttgttgatcttgtgctcgaagaaaatcggaaatgcctaaagacaaaactaggaaggccaatagaagtccacggaggtttttcattttcccacctctgtccaaaaaaaaaaaaggattacgaattgccaatgtacttgcaatataaaacatgccaaatcaaacctttggatataaaaaacggatgaattgttaaataattatttattaacttatatttctgcttggggcggatcataacgggaaatatgtcaacgttcacataccaataacaataagccacctattgagttggaccgatcttctaaccaaattcgaaataatttgtctaataatttgattatggtaagacttttctcaagtggaattataaaatctgacaagtgtgtgtcatgtttaaattttataaaaaaggtttgcaagtggaaattagtagaactgattgattctaattggttatcatcaagcacacctatagtagattaacctgagaaaatgagttattaccgtgtgtgtgaagggatgtcatattcatatatggcaaagtcaccgatcgtgtcagaatcaaaccacgaatataagcaaaagtgaacaaatgaatcgagatttttaaaatatagagagtatataacctggttgcatatttttcatttcaaaaattttataatcaaccactaacgtcttgatttattttatatggatattataccagtggttagctgttattattcgttagataaaaccatggcaaaagtttaagtttttaaaacaaaatttatacgtagacgtcaccatgattaattccatttgcagcttataacactaaaaatttgtccatttcaaaactttggtagtagtaagttttgttagttgtgaacgaagaaatcatcaaaaatggacacttgcaccaggcttctgtttgctgcgtgtgccactttatccatcttacatcttgttcaatctcagaatcaacaaggtctttttatcatctgtttttcttttttacaataattttggaaataaaccattctaaatttttttttgagatagaactttatataagaaaaacaatatgtacctctcccttttcggtcttaccaggattcatcagtttggattgtggattagcttctaacgagtctccttacaacgaagcaaatagcaatctgacgtacatatccgatgctgatttcattcaaggaggaaaaactggtaatgtccaaaaagacttgcttatgaaactcaggaagccatatacggttttgagatactttccggatggaatccgaaattgttacagtctaaatgtcaagcaagacacaaattatctaatcagggttatgtttcgatatggaaactatgacgggcttaacaattctccaagattcgacctctatcttggtcctaatatttggacaaccatagatatggggaagtcaggtgatggagttctggaggagatcattcacatcacaaggtctaacatcttggacatatgtctcgtcaagacagggacgagtacaccaatgatatcatccatagagttgagacccttgctatatgatacttatattgctcaaaccggttccttgaggaattataaccggttctatttcaccgattcaaacaactatatacggtaccttattttcaccttatgctttataaataaccaaagtagattatgagcagaaactttaatctccacaaaaactttaatattattgtcatttaagccatctagcgtaaaccaagattatacagtattaattattgttattagttgatgtaaagtaaaatatataacttgattttggcagttatccccaagatgtgcatgatagaatttgggtgccgttgatattaccagaatggacgcatataaacacaagtcaccacgttattgattctatagatggctatgacccaccacaagatgtacttaggaccggcgccatgcccgctaatgccagtgatccaatgaccattacctggaatttgaagacggctactgaccaggtttacggttatatttacatcgccgagatcatggaagtccaggccaatgaaactagagaattcgaagttgtggtaaataataaagttcatttcgatcctttccgtcctaccagatttgaagcacaagttatgttcaacaatgtaccactgacatgcgagggaggattttgtcgtctgcaacttataaaaactccgaaatcgactcttccacccttgatgaatgctttcgaaattttcacgggcattgagtttcctcaatcagaaacaaatcaaaatgatggtatgttgcctttgaacaaatatgcatatagctttttacacgtattatttcttgctaatttgcaccatgtttcagtcattgctgtaaagaatattcaagctagttatggactgaacagaatcagctggcagggcgatccatgtgtccctaaacagtttttgtggactggcttaagctgcaacgtaattgatgtgtccacaccaccaagaatcgtgaaattgtgagagcatttattctaactcaatgttgttagcaaatcttaagccctgaaatgtatctgatgtgatatgtcttggatcttccaaacagagatttgtcttcaagtggattaaatggagttataccacctagcatacaaaatctaactcaacttcaagaactgtacgtatctctataacaaaatgaagatgtattcaaaacacttgttaacaattttttgttgcaacagggacctgtcccaaaacaacttgactggtaaagtgcctgaatttctagccaagatgaaatatttgttggtcatgtaagtgttgttgaaagcaaaataagccatttttatcataatgttttacatttactaactagatgatctactgatttgtctatatattcacagaaacttaagtggaaacaaacttagcggtttggttcctcaagcccttcttgatagaaaaaaggaaggattaaagctattgtaagatttctttttgagatgatctttattgatttactacgtgcccactctcgtttctgaaattcactacgttctttattctttagggttgacgaaaatatgatttgtgtgtcttgcggtacaagattcccaacagctgcggttgcggcatctgtttctgcagtggccattatcatacttgtgttagttctcatatttgttttaagaaggagaaagccatctgctgggaaaggtacttaaaggagaataacatatagaagaatataatcccatattgtatagctctcatggaattctgttaaatttttctatgcagttacacgctcatccttcaaatcggaaaatagaagatttacttactctgacgttaacaaaatgacaaataactttcaagttgttattggtaaaggagggttcggtgttgtctatcaaggttgtttaaataatgaacaagcagctattaaagtgctttctcattcatcagctcagggctataaagaattcaaaacagaggtattcttattaaatcttttactaaagttttggaaaaagaggttaatgtttgagatcaggaatcaattggttacacttttttctttatgtcgtccttgattgttaggtcgaactacttttaagagttcaccatgaaaagttagtaagcctcattggatattgtgatgatgataatggcttagctctcatctacgagttaatgggaaagggaaacttaaaagagcatctctcaggtaaaacacatgaaaatttgatacaacaatttataggttctctttcaaacaaacttcttaagccacttggttgttattgcaggaaaacctggttgttctgttttgagctggccgataagacttaaaatagctcttgaatccgccataggtgtgtagaaatattattatatatagtttaagctgatatatataaattctctcttaaactccatatttatgataattagttaacatacgaggtttaacatatggtaggaattgagtatttgcatactggatgcaagccaaaaatcgttcatagagatgtcaaaagtactaatatattgttgagtgaagaatttgaggccaaaattgctgatttcggactctcaagatccttcctaataggaaatgaagctcaacctacggttgttgctggaacatttggatatcttgatccggagtaagtagtggaggatttatatcacattgtacatttaaacatgcatgtcttcgatcgattttcttgctttctgaaaaaaaaagtgaaccatatctttaaaatcttttgttataggtaccacaaaaccagcttgttaagcatgaagagtgatgtatatagctttggggttgtcttactggaaatcatcagcggccaagatgtgattgatttatcccgtgaaaattgtaacatagtggaatggaccagttttatactcgaaaatggtgatattgaaagtatagtggatccaaacctccatcaagattatgacacaagttctgcatggaaagttgttgaattggcaatgtcatgtgtgaaccgtacttccaaagagagaccaaacatgtctcaggtcgttcatgtgctaaacgaatgtttggaaacatgtgaaaagtggagaaaaagccaagaggtggacttaagcagtcctctggaactgagcatagttgtagacaccgaaataaacccaaaggcacgttagtcattattctcatggttgggtgtataatgatcagtctgtataatttgtattatgaagcgtctattgcacaatttgggtgttaagtctgtatgttgaacgtgttgatacttaatagcttcttcttgtgctatcgaaagttgaaagtactcttttaattatacaagaagaatatccactcatacagatatttgtgattttattcggtttaaagaatctgtttatgcggttcggttttttcggtgggcttggaaattcactgggtttttattttgtgggccgaaagtgtaggctgtggtgtagaaatgttattttttgggctgtaggaactttgtaagcccaagaagaaatcctaatttcatcttcttgaaacacgtgttctttgtccttcgcgatttcgatgctaccgacagagaagaagaagaagaagacgagcttcacttcggtatttactctcagatccatcgttccgttcaaagtttccagcatttagaaggactattcaattcggattctcggcaggttgggaaagaactgaagaaccgttcggttcagtgatgccaaagtatatttgaagcattgccgatcggttgatagctgcaaaccgaattgatcgatcggttaggttaattaggtttaggttaaagtattttgcatcagaaaatagatagggttctcaatgaaaacaaatttgttattataaaataaaatagaagaagaaaaactgaaaaagacaaaataaaataaacaggagaatgacatggcttggactgaaaggaaaaaaaaaacattacatggcatgtgtgactcaacgttattgtcgaagtttgtgtgttgtaaaaaaagccggacgatccgacagagacaacacgtggccgaatcagggggaagtacgtgagacagtggtggtgacccaagaagggagaagaagaacaggtcttcagggtggggtttactggttatagccggttattcgctcttcttcttttttcagacacgtcctctgtgttactactctcgtataagaccaggggtttaagcccttgtctccttccgtgcttttttcccacattaaggggtttttcgatttcccacaacaaaaaataaataataagacagaaacttttttgctttgtgtgggttgatgagaaaataagatcataaacattctgatctcaccttgtttcagaagaaaaggtgagattatttttgaagtttttttggatctgcaatttgaattgcggttttttatgtttatagttttctagcttgagggttttttgatgttgtaatttggtttctcacagaagctgaaccgtgtttgtttttcatgaaaatattacaagaccagaattgttcattatttttcttggtaaattcatgctctgttttcactctacggtcattaatcaaatgaggctttagatcgtggaaatttcaataacttggattctagctagggttttacaaaaaatgatgtctgaaattggaaataatctgctatcacatatacagtatgtgagattttcttgcaacgtaagaaattttatagataaatgctaatacattgttggactcagtaacctaattgtttttctccagggatcttgtaatccgtgagaatgccttcgttttgttgaatgattgaaatgttcttcaaatcatggtgttgcaaaagaggcccgattatggattcaatggctatgaggtgcctcacacacctcgagctgccagatcaccaagagtaaatacaattcttaacttttttgtgtgtttcttatcagttttatatatgttctaatgttcccttctgatatatatgtttgtgttttgtgttttgctagaagagtgctttcaagaagaaaagcgaaaaccatcaaatatcgtctttcgatttgttggctgcagtagctggaaaactgctgcttgaaggtgggaattcttcttcctcaagtaacaatacctctggtaataatgaagatcagtgtgcagttaagaaagagccgcttaacggcggcgatataatggtggaagaagagactacaaattctgatcatgataataataatgctgaacggagtttctttgtctctgagattcttcaaaaatctcatgaaatgcaaagctttaatagatctccaagtccccttaaagagttccattttggatcttcttctggtataacttctgattcctctgagaagtttgaaactcaagaattggcgtatgatgaatccaagatcaataatggtgattgctataggtcagagtctaatgataagaaatcaatgcttggagggttaaattttgaagcaaagttatcaaggaatgttgtaggtaaggatgagaaacatataggtagtggattcaggaaacctattccccaaaatccttcaacatgctccgatgatgtagatttacacggtaaggaaaatgatgatggcgaaaacttctcagcctgttacagaacaaaatcatttaggtcaactctgcgtattggagatagaagaataaggaaagtttgggcttccaagtattgtaaagtccctccaaagctgaaagatacaacagtaactaattcaggtgaacattatggaccatttgtgagcaagtcatatgtacttttcaagatgttatggtttatttatgtgtctttgtctgaaaatgttttagacttggacttgaagtctgattactatagcaagaaacattgtcttaaaagcttaagatcagagaggaactatccaataaagaaaaggagatactttgatggttatacagcatcacaatccgaggaaacaaataaaaatgaaggccagtctggttcacctcgaaagggtatattatcggaagctagtcatttaacgtcaaaaatcactttacgatgatatagtgattaactttgaactttgtttttggcagcttcagcttttctatcatccatagcttgtcagaagcagcctgcagcattccaatcaccaagagattctaataacggtatctatttctattgaggttttttgttatttttaccaatcagatttttgtattaattctgttcattttttcttgttgtgcttagtgaaacttggaatcaagtcatttagagtccctgaacttttcattgaaattccagagacagctactgtcggttcgctaaaggttaggatttttcggcttataattttctggaaggatctccttcatgtttatggataatgattgatgaaactttacttcttctcgctagaggacagtgttggaagctgtgacctcgatacttggaggtggattacgcataggtgttctggttcatgggaaaaaggttagagacgacagtaaaatgcttctacagactggactctctctagacactctttcagacactttagggttttgtcttgagccaaatcctccacaatccacaaaaccactatctcctgaagattctgactttgcacgtccctgtaatgtacctcacactctaacaaggtcagtctctatccagaggtcaatgtatgctgcttctttctttagtgtagagaagaactctgtttctgatgttttccaaaacttttttgacatcattaggtgtctcccatcaccagggaagcatgctaaaccgagtaactctgtagaaagtgaccttgactccaaaccctctgcaccaaataggggtaaaaccatctactcgagagccttgattcctgtatctcctctgcatgctcaggcgttgacagtagtcccacctcggaaaaccaagcgatctgaagtggcacagcgtaggatccgtcgacctttttctgttgctgaagtagaggcccttgttcaagctgtggagagacttgggaccggaaggtaactaaattttttatgttcaccaaagtataagacttaatttccatcaataattggttcaagatagttctaagattgttgtgcatatctatctgcaggtggcgtgacgtaaaattgcgagcttttgataatgctaagcaccgtacttacgttgatttgaaggtaaaataaaactctctccttacagtgaatgaggtctatgtttcttgtgcaagaagtaactaattttgggattgattaggacaaatggaagacgctggtgcacacagcaagaatatcaccgcaacaaaggagaggtgagccagttccacaggagctcttagaccgggtactaacggctcatgcctactggtcccagcaacaggggaaacaccagttactagagggaccccagcagctcgagaccagtcttggtctataggccgggattaaatattatcttcgcaacgtgataatggacgttagcaggataaacctggaatttattcgttcatatatacttttttgtttgtttgtttatctgttttatgcatgtatttgagaagattcaatgtaaaaaaaaaggaatggattgtgtggtaaagaagaagaagaagaagaagatatatagatgaagatatgtgaagtcctatgtaattgtcacagtgcttggttgtaataagaggtttcttccttttggtgccttgcaaaattgagatcctgataagattccttgacaagaaaaggtagagttgataaggagaaaaggaaacataacatacgtaccaataattattcactttggctttttgtggtaatagctatgcgacttttttcaatggctaaacagacttttttggacacttacagaagaaaagagaataagatgggagatactttaggatctcatagatcaaccgagagaaataaatgaagttgtcattttcattatttcatatctttctcaaaagtcgacacctatcgatgagtaaacttttttgctagcatcgtttgctatgtggctacgaaagtaaaaaaaatggatgtgttcatgaagctacgattagtccaatcttttagtgggaagcgaaagtaaggtgcaattaatgtaagaaattcatgatattgctacagcgaaattgtcttgttccaaacttccaagcttagcacatcgtctgatctctcaattttttcttttgtcttattttgctttaaaagtgcagtattttaaaaattgtcatttgctagttcctagtattgtcataatctttgttgttgaaattgttcaattattagccaacactagaatattattatatgtttttaagtaaatttcaagattgggataccatttgtggaccgaaagcaacaacacagttgcgctagcagtgtcactaaggaaggccgacatcaatcatatatcgcaagagacggaccttactggcttcgttatgtattctcttcggaatttatcctcgttgttcttggccatgaatattttcttccaagttttttttggtctctccaaagtccaaaccatctctcccgcatatattaaggttaagatgatttttaaaaaggagataacaaattttataattggaattattatcttagtcgggtcaacgaaaaactagtgagcagccaggaatgttgaaatataagatatgggaagaaaagtaaaatgactatgaaataataaagtgtgacttgtataacgattatcaaaacataatacacagtaactttttgaatctcaggccatcttgtgcatattccttaaaattcttacgatattgagattgatttttttggtggtatggtatccatagagtgacttgtatatctatttcttttcttgccaaaaaattgttcaataaatctattttatgtagtcactaatcagtaatcactgctgtcaaaaataaaataaaatgtaatcactaatcagtaatcactgctgtcaaaaataaaataaaatgtaatcactaatcagtaatcatatagtacgttatctttctatgaaagtaacattgtttcattcgtgtactttctagattggtctcaccacacaaaaataatgctgttttggaaagaaaagaatcataaaatctcatcgccttaacatcctttacattataattcgtattcactaaactaattaaataataaaattaatatctgaaataaaattaaaactaaagaaattgataaatttccaaataaatatcagtttctagtaaaagtaaacaataaacagtgaaaattgaaacttgtcttgattcggaaagattcttttcagacaacagatagacccaagaagttgcctgatcgacttatatttctgagtgaaatttaaaagaaaagaaaagagacaagggcatattcttttatattatctctgtagagagagtaaaaacaattaattagttcttatctttcatctgcttcatcatcttctttctagtctctctctctctcttcaccgcgtacacagtaacacagaccctttttccctcttactcaaggttcttctttgtcatcttgttgccgaatccacaaagaggtacgctttcttctctgaaatctccctgctttgtaatttttactctcttctcttctcatcttcttcagtgctctgcttttttggttttggtgattgatcaggagaataaagattcgacctttattagatattaacgactctggatttttgggtttttggagttggatccacatgggttcttatccggatggattccctggatccatggacgagttggatttcaataaggactttgatttgcctccctcctcaaaccaaaccttaggtttagctaatgggttctatttagatgacttagatttctcatccttggatcctccagaggcatatccctcccagaacaacaacaacaacaacatcaacaacaaagctgtagcaggagatctgttatcatcttcatctgatgacgctgatttctctgattctgttttgaagtatataagccaagttcttatggaagaggatatggaagagaagccttgtatgtttcatgacgctttggctcttcaagctgctgagaaatctctctatgaggctcttggtgagaaatacccttcttcgtcttctgcttcttctgtggatcatcctgagagattggctagtgatagccctgacggttcttgttcaggtggtgcttttagtgattacgctagcaccactaccactacttcctctgattctcactggagtgttgatggtttggagaatagaccttcttggttacatacacctatgccgagtaattttgttttccagtctacttctaggtccaacagtgtcaccggtggtggtggtggtggtaatagtgcggtttacggttcaggttttggcgatgatttggtttcgaatatgtttaaagatgatgaattggctatgcagttcaagaaaggggttgaggaagctagtaagttccttcctaagtcttctcagctctttattgatgtggatagttacatccctatgaattctggttccaaggaaaatggttctgaggtttttgttaagacggagaagaaagatgagacagagcatcatcatcatcatagctatgctcctcctcccaacagattaactggtaagaaaagccattggcgcgacgaagatgaagatttcgttgaagaaagaagtaacaagcaatcagctgtttatgttgaggaaagcgagctttctgaaatgtttgataagatcttggtatgtggccctgggaaacctgtatgcattcttaaccagaactttcctacagaatccgctaaagtcgtgaccgcacagtcaaatggagcaaagattcgtgggaagaaatcaacttctactagtcatagtaacgattctaagaaagaaactgctgatttgaggactcttttggtgttatgtgcacaagctgtatcagtggatgatcgtagaaccgccaacgaaatgctaaggcagatacgagagcattcttcgcctctaggcaatggttcagagcggttggctcattattttgcaaatagtcttgaagcacgcttagctgggaccggtacacagatctacaccgctttatcttcgaagaaaacgtctgcagcagacatgttgaaggcttaccagacatacatgtcggtctgccctttcaagaaagctgctatcatatttgctaaccacagcatgatgcgtttcactgcaaacgccaacacgatccacataatagatttcggaatatcttacggttttcagtggcctgctctgattcatcgcctctcgctcagcagacctggtggttcgcctaagcttcgaattaccggtatagagcttcctcagcgcggttttagaccagcggaaggagttcaggagacaggtcatcgcttggctcgatactgtcagcgacacaatgttccgtttgagtacaacgcaattgctcagaaatgggaaacgatccaagtcgaagacttaaagcttcgacaaggagagtatgtggttgtgaactctttgttccgtttcaggaaccttctagatgagaccgttctggtaaacagcccgagagatgcagttttgaagctgataagaaaaataaacccgaatgtcttcattccagcgatcttaagcgggaattacaacgcgccattctttgtcacgaggttcagagaagcgttgtttcattactcggctgtgtttgatatgtgtgactcgaagctagctagggaagacgagatgaggctgatgtatgagaaagagttttatgggagagagattgtgaatgttgtggcttgtgaaggaacagagagagtggagagaccagagacatataagcagtggcaggcgagactgatccgagccggatttagacagcttccgcttgagaaggaactgatgcagaatctgaagttgaaaatcgaaaacgggtacgataaaaacttcgatgttgatcaaaacggtaactggttacttcaagggtggaaaggtagaatcgtgtatgcttcatctctatgggttccttcgtcttcatagatgttgtttcttacgttctaagcgactgggatttatgtagggcttttctgttgatagtctctcgccaacacgagtggattaagttcagagttagggttcttgaacactagaatgttgttatattatgcttgtgacatagcgtgtgtaagagtgtagcctaagagatatagtactcattgcatgatcttttgctatatgttcatgtaatcttttgttgcataaataatgaaaagttacatttttttcagtgtcttgtttatacagttctattgcagagtgtgacatctcgtcatctcgtactacaaaacacaccgaaaagtagataatcatgtactaggacgacataatcagaaataataatgaaaactttaaaacctggaaagtgaaaacccctatgaaagcctactagtactaatcagaagtattacatcattttaactaaagtcttacaattattgattgaacaacaaacaacaaacaacaaacaataatttcaaaatcaaacaaataatccatccaataaactttcctaactattatatccaggatttgtttataacgccgaaagagttgaatatttatttggagacagaaaaatatagttactcaaaaacgtgacacccactcaatttcgagtttttctgacataaaagtatttcttcatgtactagtacaataatacgtggtgagaatctcacaatatatgtcagaatggcattgtgggatcagatctggaggggtccttttcactttcttgtgtttatttattgtcgctgttctatataattattacgatgaagtcactttatgttatcatatttcgtttgtttgttgatatagtattcatcagctaacatcaactattttttaaataattcgtactggtcaaataatcaactccacctatcaggaacctttaataatcttgctctccaagttttacatatgattttttgtcaacttgaaactgttggaatcacatatttattttatatgcaaacacatttgactttacatcaaaataataataatcataaaacaagagttgatcaagtaacatatacataattttgatatagacaccatctaaaagcggccggaatatgtaatttagaaattttgttagtatttttagaatccaagatcgtacatatgtaaatcaaaaacatcacttctatggttcacataattataaattaataatttgtacggtttgaccgcatctattatatatataaaaaaatgtctaacatatcccaaatgagaagcatctcgagctatttataaaatactatacaaattttaaaaatcagtaagtacacttgttgttattaagaaaataatgatcctaagtaactcgtcgacatattcaattttggcaactactttcttgaagcaaacaaaattataagctagtatcaacaaacatatggatcatttaagcttcgataagcggtcaacatatgggggaattaggagacaaatcactacttaaaaagaaccactagtcattactttttgtggataacatgacaatcactacaataaaaactgggcccatcaagcccaagaatactcttaatgacaagtcaaaagagagatagttttgagttttgactcctcggacgaatcgcaagactggtcttgtccccctttcgagtttcccgggaaacttcctccttcctctaatctctctacagttctcaatttcttgcttcttctctcacgcttagcaattatacccaatcccatttgaatattactcttcgccaacatgtccttaaattatctctttttaatgaattgatcgataaagttctcacctttatgcctcctcctactttttccacttaatcatcccacttcctcttcagatgtaagcaatgttgtctagagtcctcctctgattcagatttcgttgctgaatcttttgtaaaactctgttctttgtatgtcgagaagccaaattcagggaatttagggttttacaaaaaaataaaaaagagtttctttttttggatgatggaatcgaattactcaggtgtggtcaacggctacgatgtgagtttcttaccaacttcgattccggatcttggattcggtgttccttcttctagtgattttgatcttcggatggatcaatactatcaccaaccttcgatttgggttccagatcaagatcatcacttttctccaccagctgatgagattgattctgaaaacacccttttgaaatatgtaaaccagctccttatggaagagagtctcgctgagaagcagtctatcttctatgattccttggctcttcgacaaaccgaggaaatgttgcagcaagtcatcagcgactcgcagactcagtcttctatacctaataattcgattactaccagtagtagtagtaatagtggtgattatagtaacagcagcaattctagtgtacgcatcgagaatgaagtgttgtttgataataaacatcttggtgattctggtgttgtgtcatttccagggtctaacatgttgcgtggaggtgagcaattcgggcagccagcgaatgagattcttgtcaggagtatgtttagtgatgcagaatcagttctgcagtttaagagagggttagaggaagctagcaagtttcttcctaatactgatcaatggatctttaatcttgagcctgagatggaaagagttgttccggtgaaagtagaggaaggatggtcagctatctcgaaaactaggaagaatcatcacgagcgggaagaagaagaagatgatctagaggaagctaggaggaggagtaagcaattcgcagtgaatgaggaagatgggaaattaacagaaatgtttgataaggttttgcttcttgatggtgaatgcgatccgcagattatcgaagatggcgaaaatggttcaagcaaggctctggttaagaaaggccgcgcgaaaaagaagagtcgagcggttgatttccgcacacttctcacactatgcgcacaatctgtttctgcaggggataagattacggctgatgatttgctgaggcagataaggaagcaatgttcacctgttggtgatgcatcacagagactagctcatttcttcgccaatgcacttgaggcgcgtcttgaaggtagcacaggaactatgatccagagttattacgattccatttcctccaagaaacgaacagctgcacagattcttaaatcctatagtgtgttcttgtctgcgtctccgtttatgactttgatctatttcttctccaacaagatgattcttgatgctgccaaggatgcttcggttcttcatatagtcgattttgggatcctttatggtttccagtggccgatgtttatacagcacttatcaaagagcaaccccggactacggaaactacggattaccggtatcgagattcctcaacatgggcttcgtccaactgaaagaatacaggatacaggtcgaagactgacagagtattgcaaacggtttggtgttccatttgaatacaatgcaattgcgtctaagaactgggaaacaatcaagatggaggagttcaagatccgaccaaacgaagttcttgcagttaatgctgtgctccgattcaagaacctccgagatgtgattccaggggaagaggattgcccgagggacggatttctaaaactgatcagagacatgaaccctaacgttttcctcagctcgacagtcaatggatctttcaacgcaccgttcttcaccacacggttcaaagaagctttgtttcactactcggcactctttgacttgtttggtgcgactctgtccaaagaaaacccggagaggatacatttcgaaggggagttttacgggagagaagtgatgaatgtgatagcatgtgaaggagtagatagagtggagagacctgagacgtacaagcaatggcaagtgaggatgataagggctggatttaaacagaagccagtggaggcagagcttgtgcagttatttagggaaaagatgaagaaatggggttatcataaagactttgtccttgatgaagatagtaattggttcttacaaggttggaaaggtcgcatcctcttctcttcttcttgttgggtcccttcttagcttttgtgttcatcacagaatatccatgtaatcccaagtcctgttttattatttttgttctagaggcagagcttgtggagtcattgatgtatcatttgttttggtgtacttaatttgctttacttttgctgtatacaatgacattctactgtctaaatacgatgagtttgaaattggaaaaagatagattttatatataaagtgaaaactttgttacttttccagaaagaacaatcaatccctccgtgctaaaacagaaagatacagaagcgtgttttgttattgccttggattaaatgtacaatgagtagtagtaacctttgggtgtctccaacagctacgtcggaactacctgtggctcaagaggcggaattccatcatcctccacaggcttcaccggcacagactccttctggctctccttctccgactcttcaaatccagatttaaacctgtcgtaattcgttgtctcacccgacttaaacggacgctcgcccaatactttagtgagatcatcctgatgcaaaacctccttctctagcaagagctcagcgatctgagccacttgctctttgtgttcctctatcagctcaaccgtccgcttgtaagctttccccacccattctcggacctcttcatctatcatcgcaccggttctgttgctgtacggcttggagaactcgtcttcccgttgtgggaatgaaagcaatcctatcttgtcgctgaatccgtacactgccacttgcgcataagtcatcttagtcaccttttccagatcgttctgagccccagtggatattcttccaatcaatacctgcaatcaaaacccaccagaaaaattaacaggattcacatcttcaacaacaaataacagaaagtttatgacctgaaaccttaatgagttcttgacttctgtaagaggaaacaactcaacaaactgtctaccaaccaactgtctatgtcctaatttatggtttctatttctttatttccttttcctggagtgctttgcttagcattttaatatgaggatgttagagaactttgtaggtttatgggttttcaacaatagacaaaactttgggctttgtttaatgattttacgttttgggtttggttggtccttttgcaactttttggatttttatcactcttaacaccaccagttcacacccagaagaagttgaagttgatagaaagatttacctgttcagctgcccggcccccgagagtcatgcaagtcatatcaaagagttgttcttttgtcatgagcaagttttcatttggaacatactgggcaaatccgagcgctgctgtgccacgaggaacaatagtcacctttagcaacggttccgcatgttccaggaaccacccagcaaccgcatggccagattcatgatatgcaactgtacggcgctccagcttgcttattacctgcggtcatgaaaccaccaaaagagattgtagaacattcaggtttccgttgtagaaagaaaaaaaaatcgtgctgataatatacgtcaccaatttgttgggtttcaaatttgagatttatcctagattcctaaggagcaggttccaatataaacgaaaatgaacaaataataatataaaaaactggcaatacgccaaacagttgaattttgttgataaaggcgaaagcacatacccggtttttcttctccagaccaccaataacacgatcgattgcagagtcaaagtgcgccattgtaactgttgctccttcatgtctggcagcaataagagccgcctcgttacagacattcgcaatgtcagctccagcaaatccgggagtgagggctgcaagcctttgtgagtaatatgagggctcgtgatcaagtttgatcttcttcaggtatatctggaatatctgatcacggcctttaatatcaggtttatctatggttatctggcgatcaaaccggccaggccgtaataaagctttatcaagaatatctggcctgttagtcccagcaaggacgacaactccagcggtagtaccaaatccatccatttcaactagcagttgattaagtgtgctttcacgctcatcatttccaccagagaaacctccacgtcccctcgcacggccaatcgcatcgatctcatcaataaatattatgctaggtgcacactgtctagcctcttgaaacaagtttctcactctggaaggtccaacaccaacaaacatctccatgaaatctgaaccagatattgagagaaacggtacagctgattctcctgcagtagcttttgctagaagggtctttccagtcccgggtgggccaactaaaagcgcaccttttgggattttagctcccaaatcttcatatttctttgggttctgaaggaaatgcacaaattccataatttcttgtttagcctcctcgcatcccgcaacatctttaaaatatatctggcaaaaaacaaaatagatcagtagtaaatctcaatagcatcatgaattggaaatgaagatggtaattcaacttctccaccctgattgaaatgctgaccttattcttggagtttttatctgctctcgttatttgagctttccctatattgaaaattccacggccagccttcccaccaggtccgcctaaacctcccagtccaccttgcatccgtcttgccccaaaaattagcgtagccacgagaagtaaagtcggtgcaaatctcaatagttcctggtaccagatagtttcactgacgtaggtgacaggaacaaagtcatgagaattaacgcctatagcttcttgggcctcttctagtttctcctcaaatgattcaacactaccaatattaaagtagtacttatactgaccaccacgtcctttagcaggaactccattaccaggaccttgaacaacttcttccgttgtttggctttttggtgaactcctcacatagacttttgcgacttctttattggaaacatctatgtgatccactaaaccagcctcgaggagcttgtttttgaactcctggaaactaatctgaaccaacaaatataacacggataattagttgacattcctcaggcccacacgtctgcagttatatagataacatgatacacagagtatagttggacatgcttgcctgttgctgttctcgggaaccaagagagaaagtagaaaggattaaagcaatggccataagaggaattaacatattttgatattcatttgagaacgcgtccccagcattttcgttttcatttttctttgaaccatctgcatcgcaacaaatacatattcaattactacaatcttcaaacaaactttcacaatcctttcaaaatgaatagttgtcaacaatcctacaattgtgtgcctaattatcaattcaataagacgataaaatgattcccgaaactctcaaatgtatcaactagtctactcaatttcttttccatagtaccaaatggattcgacatccaaaaatacgagaatgttacataaaccgtcacctctggattcagatttctgctcattcttgggtgctttcttactgtcttttggatagtagttctcataatctgcaaaagaaaagcaatttaggcttccaattctctctcaaattactgtgaacacctaatttgatccgtataaaaatttagggtttgctacatactcttcttctttggggtttgactagaaaagaaccgacgcaatctagggttagcgaaagcacggcttaaatcaccggcttctagtccctttcgagcagcaaaagaagcaaagtgccgcctcaaaaaccctaatccaccatccacctgattgacggccgcctcgagattctgcggcgctcgtaacctcccttggttaaataccgccgatctcacaccaccgccgtacacaaatccctaatttcaccggaaaattgaaaaaaataggaaattaaacacaaaattaacaagcgtcggaaaaaaagcatcacaacgaaacgaaccttagaacgtgaggatcgagcgagggaagaaccaagcttggagaatatcattgtcagataatcagaacgaacaaaagtgagctcgcataatatatagaaacccaaaatcggagatctaatcaaaacccaaaaggagaaagatggcagctttggtttcagatagagcaaagtaacaaaattttaacaagtgaaaatgtggtgattgaaaaaaataaagagcccagaacgaaatttgtgatttttatggtgtttgttgaggacaacaatttatgtcacacttttgagctgcttgggaaccaagacatcaacgcgttccagactccaacatatgttgttgttccgtggattatttcaaccggtttagtctttcaactaaaaaccaaccggttatttatttcgcaaatctttaacgtggttaatggccttagctccagtaaattcgggcccttgtttagcttaatgggcttcgttttaactaagccacattataaacgagcatttgactcgagtggggtatgtgtggcaactattcccacctgaatataactacgctttagcacgtggcagtacgttcctccacgtgtaagtttctagaccgcaagtacctagcaacttccagaacaagctacggtcacttccaaaactagtgtaataaagaagcaatctaattaagaaccttattaggaaagtgcgagagagcggacaaaaatggaggagaaaaactacgacgacggagatacggtgacggttgatgatgattatcagatgggatgcacgacgcctacacgtgatgattgccggataccagcatatccgccttgtccacctccggtgagaaggaagagatcgctactaggctttgggaagaagagggaaccaccgaagaagggatattttcagccgccggatctagacttgttcttctcggtggtagcagcctcccaagcggcaacctagttgcgcttagattgtgactcctctttgacttatattgtcccgttggtgtgtgtgtattagattgtgactcctctgtgacttatattgtcccgttggtgtgtgtgtatatatatttagtgtttcggcttctttttttggatgtagtcatgtaggatacgcagaacaatgtttgtatgaactttatgttgaactagtttggttttgaacttttgatgttaattattccttttttgttttgtttgttttctgtcaggttgggaaaaatataagtgtttttctatatttaatatagaaatggtctttgtattatttgtagtcatggacgcgttttaagttttcataaccgctacactagttattttctctccaagaataaattgaaagctatgtgggttaatatggcataacgagggatggaaactcttaaagaaagtcttcaagtcctggcttaaagttgtgtggtatacatatctagtccgaggaccaatactgattcaaaatctgcttggtcactttgatcatatggagcaaatttttgcataccttatagtcgaaaacacattaatctgttgaaagccggttcaccacgaccggagaagagtgcgacggtccataattcaatgatatagtgggtgggggtaaaacatttttgttgaattgtggatgctataatcttttaacattattagagtgtatatatataattttagttatggtttagtttggttagtatctttggttaagttttctttgtatttaagcttaatcatgtatcacatttcactttaatgaagatttcacgattattgaaaattgaaatggtattagagccaattgaagatttcacgattattgaaaaacatgtttttccatgaacaaatatcgttaaagaaaggagtctagatttgaaacttttgttgtccctttgttaagtacaaaaattcaaatgtttgattgtttaactaacgcaagagcaaaacaaacaacttgtcctaataaccatgcacataaatgcttccaaccacgcaaatgcgtttaacgttataatccgaccacataaaccagccaaacttggaacaacggtcactttgaccctcataaatcaagcaatttcgacaccaaaatctatcattcctcttcacaagtaacaatgtgtgtactcatatatacatactagaaaacatgatcatctctgtgattaacatggtgacgtcaacactagaaattagattgtgactgacttttagaggatgaactaacatgacagtttaccaattgaaaaaaatggtagaaagtacaacacaatgtttatttagtgtaattaatggagtgagttaatttcgagaaagccataattttttgaaaacataagtgaaaaaaacaagtggaatattattagaccaaagctgtctactcttggccccgatttcaaattatttatcgtaagaaacactttacccccgtccctctctgctcctttctctccaaacactcccaaatggccctcttacaaaaatatattaatgttttcaaaaattttaaaaactcttagaattgtagaccactgattcattaaattgtttgagagacaagtccgctccttgaatttagacgtttctagacaaattagagacaatgtctcttatattaacatcaaccactataccaatgaaagataatttccatcttataaaaaacgttcagtttcgtctaaccaaaagatgtaatttgtcatttacaagtagttttattcaaggcacagtgtttaagcggaatacttgagtcccccctcttctttcaattggatcttatatatttagccgtaggcatgattccaaaatatatatcttgcattttgtgaaaatgctttactcttattgataaaatagtattccattgtgattcctctacaaatttcattgtgattcctgtcccactatgtcagttttattgataaaatttattgtgctctctcactcatgtgacggttgatttatgttaacaacgtcgtccttgtataacaccaaaacgtagtgtgtgcatataatatatgcgattacgggttacccacgtcttacggtctatactgaattatcttgaaacatatgtaatcgaatcaaatataaaatttcatagtaatatatggtaaagaaatattcatacaactcaatggactgaaatacaagaaaataattgagaaggaaattaaccttcgaagtttgttgaaaactgcttaaccatgattataacataaaatttaagactaaaactcaaattaattaatgtagtaaaaaataatgaattatatacactgatcatttttcatatcttttttgtacatgatatatgtagattctttctttatctcttaaaactactaggggacaaaaacaattatagaatgttttcaagaaaacatgaaatatttagcttttctgtcatgaaaacaactttattttatacagctaacttcatttgattttttttttaactcaggtgtatagaattttttttcctagtactaaagtaattttctaatcattagtactatttttgaaaaaagtataataaggtgtaaaactttgagcaggagttccaataattaatcctaattacataatagttgcacattacgcaaagccgggctagctaagagtacaatttaaacttaaactatttcattcccttgccttcaccatttccacttagtagttattttggaagcattcactatatagtagacataagcagagagacactatccctctctttgcttccctttctctctctctctccatctctctagatcactatctctccttctggctcaatcaccacaaactcacaatcaaactaaaagtaaaataaaaccagaaaccctccatctgagtcagaagctctcattctctccctctctcttctgcaacacaaagatggacgagaagtggaggctgtcgaaaaaggatgcattagctgcgtcgtgttcatcttcttcaacttcatctaaatccaagttctctagaagcttctccacaagcgcttcctcctcaaaagctcctgcattcgtacggagctcatccaccaaatgctcagtgccttcatcttcgtcgtcttcaatctcaagaagttcatcgaaaaaagagaaagggtcaataacacaaaagtacagtagcttggccaaagaacagaagggaaggttttacatcatgagaaggtgtgtggctatgcttgtatgttggcataaacatgattcctaggtagatatagatctcatgcatttttattctctttttttgaatgattagatcagtttgattctctactctaagttgccacaagtttccatactagtacattgtaagaagagattcttttttgataatatattactattaattttgataagacagagtcatgtatacagaggtataaataatttaaagtgtgtcgtctgatgaagaaaaaaattgaaaacatcgaacgttttttaaaaaagtgaaattatatgccacaatctggagggtcgatgtgtcgagacgtacaattattttgttaggattaaatcgaatagtcactttcattgtctggcaaaaataatgaaaacaaattcaataataactaccaatgataaatttattttggtcaaagatctgaggtttcttttgtttccggtcaacagatctgagtgtttttcacatacttatttactaatttatttgtcgtcatatggcttttgcaatgtttatgctgtttttatagccgtgattagacttggaaacaatatcttaatggggtctagttaatgtcatggatttacaattatgatgatgatgatgatgataataatctggtcaataaagttgcatcatgctagtagattagaaaattcgcctacaccacaaatattggaatcgtaacttctttttccatttcttattatatatggctaactgaatcagtacaacaaaacccatttagaatagaaaaatccaacgaaaacagaataaattctttaaagggttacataaatcttttcattttgagagatatgagttacataaatcatataacttattttttttcactctttgcatctcgtgacagtattagttttcttactttatttatttattttgtctctttgatagaaggaagattccctattgcctaacctaaatatttccatctatgaatccaaaagaaatttatagtaatatactatatgttaaagagagaatttctatatagtgtataagaatgtacgtacttggacactgttccgtgttactgacatgaatgaaattaatcttctatctttatagccgggggaaaaagaattcgagatattgaagaatccaatggaaagttatgaaccactcgatctttgtctctttttgactctgacgataatgtcatgatcataagaattttggattgtaatcagaaaataagtgatcacgttacaaaattattcaaaagcccttttcaattattgcaagaaaataacaatttatcgtacggagaaactcttaataggaaaaaatatacacaaaaaggcgaaaaaaaatgaaagaaagaaactcagacttctcaggtgagaaaccaaacacaaaagtacaagagagaaaaagtgaacagtgtcagaaacattacacagatttgtattacgagcgaaaaaaaaactgagttcgaaaaaaaagaatgtgtggcgttaatagagacgttggattttgttagagtgaatattttgggaaatctaacggtggagactgcggaaccaagtggctaagtatgaaccagcatttttgtggcgactgttcgttttgatcgaggcaaaaactagccttgcggcaagatctttttagacgttaaaacaaggagataaatcacttgagtataaactagtcttttagcgaatggaataacacaaggttaaaggctttagagcccatacgggcccaaaacattatacgactttgtgtaatagatcatataggtaaaacagaaatttgctttgaaccatacataaaatgcaacaaacctgcgaaactgatactatgaaatctgttaaatttcgtaaatcctatagttgtaatttataaataaaaaaacgcatgtgtatgtcaatgaaaaaaatcccggaagaaatcttaaattaaaaaagaaaattaataaagagtttaaaaagcaataataataaataaacaaaatgtgggaaaataaaatcgctatcgcggagatgatggcacgtgtccattttacgatgtgatctgatccaaacctatttatattcttcgctgctgttctgtcttgaccgctcctctcgatctctgatctccctgtcttctgtctacgcttcgtcgccggccgatttctcccagactcgtcttaccgcctccggtcgaaaccctaggtgagggtaacgagcttggattggtttattgtttttgttctgggggaaatttatttggcaaattcacctaaaatgttgtttctgatgaaatcagattcccggaggacgaaattcgttttttcgccggaactaaattaaggagatttgagaggctatgggtacaacaacgacaacaagcgctgtgtatatccatgttatcgaggatgtcgtcaacaaagttcgtgaggagttcattaacaacggaggtcctggcgagagtgttctcagcgagcttcaaggagtgagttttcaattagagctgaataaagattgaatttttatatctttagtggattcgatgttgtgtgtggctttggatttgttccttagtaactagggtttttgggaattcgtcatttcatctgcttaaatccattattttgggagcttaattggatcgagtgtttttgtccgagtagatttgggagacgaagatgatgcaagccggagtcttgaatggaccaatagagaggtcatcggctcagaagccaacacctggtggtccactgactcatgatttgaatgttccttatgaaggtacagaggagtacgagactcccactgctgaaatgctcttccctcctgtaagtgaactcacataagtctcttgaatctttgatttgagcattaggtgtatcaattggcttcttttcctcttgagatgtttttcctctaaatccttattgtttttgagcagacaccattgcagactccccttccaacgccgcttcccggtactgctgataactcatccatgtataacatccctaccggctcaagtgattatcccactcctggaactgagaatggagtcaacattgatgttaaagcaagacctagtccttatatggtgagctatgcttatcaaactttgaaactgtgtaacgcaactgcttatttcggtgtttcataaaatttacagaggctgaaataattgactttttactttctggttcttctgatttacataaactgagattttttttttctttttctttattgcagccaccgccttctccgtggacaaatcctagacttgatgtcaatgttggtaagtactagttttaccagtactttatgtctccgtgaaaagaaaaatgtctcagtttcttgtttggggtataaatgtctggcctgctgctagcttatgtggatggccgtgatgagcctgagagaggaaactctaaccagcagtttacgcaggtatttcttcttaacacctaatcaagaatcgtgagtttggctttttggtttgggtttcatatgttctttgcaacccttacgtcattgattttgattagtgctcttctcaagtacttcttcattgtacataacttttaagtcgactatacctgaattaagaaacttatcatctttaatcaacatttatccaggatttatttgtgccatcctctgggaaacgaaaacgtgatgattcttctggacattatcaaaatggtggatctatacctcaacaggatggtgcaggcgatgctatccctgaggtgtgtgtgtagaactccacatttgcatttgcatttggaatagctcacatcagaaaaacaaaatcatgaaagtatttgtaacacctatattctttcaacaatgatgtatttagtatctcgttgatacacctgattggagcacaattttgcaggcaaactttgagtgtgatgcattccgcataacctctattggcgatagaaaggtaccacgagacttcttcagctcatcatcgaagattcctcaggttgatgggccaatgcctgacccttatgatgaaatgctctctacaccaaatgtaagaatgctgcttttcatttagtcaaaagtttcagtagatatatacttcttcgacatgctcacaaatcagtagctagaaacttttctgccttagtacaactggatccctccgcactacccatcaaagatattgcatttggatttgccatcatacatgtaacttttgtctagagatactatctattaccctttcacccaagtacgtttgctagattcaatgaatttcatttactgcgttttagatatatagttatcaaggacccagtgaagagtttaacgaggccagaactcctgctccaaacggtaaggaaagccaaacaaaaatgttggatattgttttagagtaagtgaatgattattatctgctaaattccctcttttttttgttagagatccaaacgagcactcctgttgctgtacaaaacgatatcattgaagatgatgaagagctgttgaacgaagatgatgatgatgacgagttggacgacctagaaagtggcgaggatatgaacacacaacacctggttttagctcaatttgacaaggtaatgactctcctctattcacaggttctggatgtgtttttctgcacgtgactctaatcatagtaagacatgtttggtgttgtaatcaggtgacgcgcacaaagagcaggtggaagtgcagtctgaaagacgggatcatgcatataaacgataaggacattctcttcaacaaagtaatctgtgcctcccaaataaggttggagctattctggtaactataaaatactaacacaggccatgtatactttttcaggcagcaggcgagtttgacttctgatcttaacactagcaatgatgcttctaggaaagtccttcaaatgtccagtgtctttctttttaccttatgatttaagaccgaccgagagagacatgagtattcatgggaaagtgtactctggttggcttgttgtacaaaaagaaaagttttttctgtcgaagaaggcgtatcaactttcaccttgtttcatgaactcttattgtctttcacgcaatggaaaattaacttcccaaaaactggatcttgcttacagttgtatctagctaatatcttataacagcatcttgagaaaatgggttaacaagaaaactattgaaaaacatcaagagaccatgggttaatgctaaaaccctcactgtggatgatctacaagcaggaacttggtctgaaacatatttaagagactcatctggtcactgtggtcgcccttagccgaatgttgccactctattttgtggtccatcgaaggctgagatcctttcttttcagtaagactcaccggaaacgtaaaatcgtgcccttctctagtgggagaagcttgcgagtttggatttacttgcccttctctaggaagagaagagtgcgaatttggagacacaaagagaggtgaaagcagaggaataggtgcacctgcaacctcatcaccagactgctgcagaaagggattctcgggaacacgaccaagattcagagccgcgggagcttgcctctgcagcctagtcggtaatctcggggactcgcttttcccaaacatgatgacactcttctccatcacgagattcagactcaaaattgagccaatgcgtataaaaatcaagaaaagagtgttgtgaagaggagaaaaaaagggagagaggtttgtgtgtgttgtcgtcaatgaggacgcaaaagaaacggtcattaatttttttagttatgatgcaacatgtgaaggaaaatagaaaatggcagttactttgaaacggtcattacctaaactaaaaaagttgcctcctctgttttctttcttcttgtggttctactctctccactctgttggtttcggttacttgtgccctttggccatcatacagttttggtcaaaggtcaacgtattattgttgcttacttgctttgggcgtttttgtgcacattacaaccacttcgcctcttcattgttgaatgtaatatttttttttatttttatgaatgttaatgttggaggatttaaacgctctcaacaaacgaaaactatcttaaaagacgttgaccttaattttggccttttatccaaaggatcctaagcgcaagtaaccgaagccaacaacataatgtatagagtagagaaagtagaagaaccaaaagaagaaagcaacaagccaacaacaaaggaggcaacttttttttagtttagttaatgaccgtttcaaagtaacagctctttcctatgtcttccacatgttccaccataaccgaacgctacttttgcgccctcattgacaacacaccaaaacctctctcccttttaatctcctctttacatcactctttccatcttcctctttccttctctcgtttttgcttttatgctcattcccttaatcgttgagtctgaatcgtgatggagaacagtgtgaacatgtttgggaaaagtgagtccccgagatcacccactagactgcagaagcaagcacccacggctctgcatctaggccttgttcccgagaaccccttcttacagcagtcttctgatgtggttggaacgacagctattcctctgctttcacctctttttgtgtctccaagtccgcactcttctctctctaaagaaggggacgattccatgttaccggtgggattaactgaaaagaacggatctcagccgtcaatggaccagaaggaagggccgcaatattcagccaaggccgaccatagcaaccagatggctctcatgaatatgtttcagaccaagttcgtgcttgtagaccattcacagtaagggttttaggcttttagcatttaggatggtcttactgtcttagtgcttttcaatagtcttgtacaaacccatttcttaagatgctgtaagcctgtaataagagagggctacatataattgtaagtaagatccagcttttgaaaagtcaatttccattgtgtgaacgagaatataaaactcatgaaacaagtcaaagttgataagccttcttcggccggaaaaatctgttctttttgtacaacaagccaaccagagtacatattcccataaataatcatgtctctcactcggaggtcggtctaaatcataaggtacaaagaaagacatccgacatttgaaggactctgactttcctagaagcattactagtgtcaagatcagaagtcgaactcgcctgttgcctgaaaaggtagagagtgttagtattatcgttaccagaatagctccaacgttatttgggaggcacaaattactttgttgaagagaatgtccttatcgtttatatgcatgatcccgtctttcagactgcacttccacctgctctttgtgcgcgtcacctaattacaacaccaaacatgtcttactgtgattagagtcacgtgcagaaaaacacaatccagaacctgtatatagaggagagtcattaccttgtcaaattgagctaaaaccaggtgttgtgtgttcatatcctcgccactttctaggtcgtccaactcgtcatcatcatcatcttcgttcaacagctcttcatcatcttcaatgatatcgtttggtacagcaacaggagtgctcgtttggatttctaacaaaaaaaaagagggaatttagcagatggcatgcatttacttgctctataacactgtcagacatttttgtttggcttctcttaccgtttggagcaggagttctggcctcattaaactcttcattgggtccttgataactgtatatctgcaacccagtaaatgaaattcatggaattactagcaaaagtaattgttgcatgtttgagggcaaattcaattatccaaatggagcatgaagtttaaaacgagaggattatcattcctttcatcactcatgtaatctaagaagtcaaacgtgtttatatatagttcaatatctatgagaggtggtgagaagggatttagttagtaagagtttctagttactgatttctaaactcgtcgaagaagtatataaccacagaaattctgactactcaatgaaaagctgaagcattcttacattgggtgtggacaacatttcatcatacgggtcaggcattggcccatcaacttggggaatcttcgatgatgagccaatcaaatctcgtgggatctttctatcgccaacataggttatacggagtgcagcacattcaaagtttgcctgaaaaatgtactcccaccagatgaatcatgagatttcaataatacatcatttttgaaagaagaaagatcttattacactgagaacagtagtccacatcatactctaaagacttatatatgcgtttttgtttttatacaacataaccaattttgtaatcatgcatctacttttggatggaactcacaaacttatgaagtaaaaaccaaagagaagtcttctcccatatttactcgatgcgaaatgaagggagctacgtacaatttgttttactcatgcgagctattccaatttaatgcaaatgcaaatgtgtagttttacacacacacctcagggatagcatcgcttgcaccatcttgttgaggtatagatccaccattttgatagtgtgcagatgaatcatcacgttttcgtttcccagaagatggcacaaataaatcctggacgtattccatttaaagatatttcaggtatagtcgacttaaaatatctgcttaatggggcaagtatttaagatgagcactaatcaaaccaatcacgtaactgttgcaaagaagatttgaacccaaaccaaaaagccaaactcacgattcttggttagatgttaaatagaagtacctgcgtaaactgctgattagagtttcctctctcaggctcatcacggccatccacataagctagcagcaggtcagacatttattatccaaacaacaaactgagacatagtgtactgataaaactagtacttaccaacattgacatcaagtctaggattagtccacggagaaggcggtggctgcaataaagtagataatctcagtttctgtaaaccaccgagataagcagtttcactacacagctgaataagcatagctcaccatataaggactaggtcttgctttaacatcaatgttgactccattctcagttccaggagtgggataatcacttgagccggtagggatgttatacatggatgagttatcagcagtaccgggaagcggcgttggaaggggagtctgcaatggtgtctgctcaaaaacaataaggatttagaggaaaaacatctcaagaggaaaagaagccaattgatacacctaatgctcaaatcaaagattcaagagacttatgtgagttcacttacaggagggaagagcatttcagcagtgggagtctcgtactcctctgtaccttcataaggaacattcaaatcatgagtcagtggaccaccaggtgttggcttctgagccgatgacctctctattggtccattcaagactccggcttgcatcatcttcgtctcccaaatctactcggacaaaaacactcgatccaattaagctcccaaaataatggatttaagcagatgaaatgacgaattcccaaaaaccctagttactaaggaacaaatccaaagccacacacaacatcgaatccactaaagatataaaaattcaatctttattcagctctaattgaaaactcactccttgaagctcgctgagaacactctcgccaggacctccgttgttaatgaactcctcacgaactttgttgacgacatcctcgataacatggatatacacagcgcttgttgtcgttgttgtacccatagcctctcaaatctccttaatttagttccggcgaaaaaacgaatttcgtcctccgggaatctgatttcatcagaaacaacattttaggtgaatttgccaaataaatttcccccagaacaaaaacaataaaccaatccaaactcttgaggctcacctagggtttgtgccggtaagacggagtctggccgggatcggcgacgaagcgtagacagaactcagaagacagagagaagaggagatcagagatcgatagaagaagagcggtcaagacagaaaaagcagcgaagaatataaataggtttggatcagatcgtgtcgcaacattgacacgtgctatcatctccacgattgagattttatttcctttctctctttttcagacaaaaaagatgcaaaaaatacaaaaggaaaatagattttaaaaaatttaatgaatacaaaaaatttgttatttacgtttttatatgacacctcgttgacttcacctgatccattctgttaaaaactaaatcatctaaaaacttatgacaagcaaagagtttgagaatgaaattacaactttttctttggcaatcaaaaattaattaacttgtgtaacaacaacaaaccaatttacgcgtggttggaaaaaaaagcagaccaaacaatgtaattgccaaaggtttagaggcgatatatgtaactacataaatagagtactcatccaactttatcataagaccaatgtgtttgcctcttccttcaatcatatcataaagatcattattgcaagtgtgcagattatgatcatcgtcttggtgtgattaggctttacggttgctgaatctgaaggaggatctggaatgggatcaaggtcatcaaagtcagatggcgacggggttgaaagcgaaggaagtagtttaagatcaaagtcttgtggttttccttctctgctaaagctccatccaagaacatcatgattactcgtaatgtttcctgtggatgccgagaatcctacatacattttctccatgaaaatctcagaaagattcatctgtcttgacaaaagaggaaagttaggcttagaagtgtcaagggtagccaatgtgacattgagaagcctttctactccattgtattcgatccaagcccgaattgggtctttgctcgataacttcaagcttatattcttgctttgcttgttggaaaaaaatgcagctggtgcagattcaacggagaccaaaccgttcacatcgatgcctacatggttatcgtcgatgtcaagaaactcgttggactttactgtgtcaaattctaccgcgagaattcggttagtggagtttccattgtttgtagtgttgaagagaccgagatactggctcggcatggcttgcgtgaaatccatggacggcgagatgaggaaggttaggccatgacctggtgcgtcgattgagaaaacgaaacttgtggagaaagaaaacgagtttgatgagttagtactgtttttgaaggctatggggaagccatagaaggcttgacccatttgtcttcgtgagctgtttgttagctccaagatgccactagggaggatcttggaggatccatacttgagtagattggcttcgaaaaatccgtggtagagaaatttggtttcgttttgttgacttagcacgcaagaaacgaagcataattgggtgactatgaatagagctattgatatgaaagtaattgccattgatgagcaactaaaaagaagaaataaaagtctgttttgttgatctgtgtgaagttgcttgtctgaattgttctctcatatataggcttcatgaaaagaaagaaaaaatctcgaccatttgttaaacttctttaagacagtcaattccaaagaaattataatgttgaacagttcaagtattagtttagctgatcgtgataataagtcgtagagctaacttgtggagatggatttaaacttcctaaactagcatacaataaaatagaaccagacaaggtttttgggaaatatacgtgcaagtaagaatctatacctatttggttacataaaaaaatcattgatctgagacatgtcatcacttaaagtaattaacaacaaatgtgtataatcaacaaccggctaaatgtgggtattattgagatctttaaactcattataatgcaaatgactaggatcacaggcttagtacgtgcacccaacaatcgaatccaacatcacactagctgactgaaatactatcattggctaagaaaaaaataatatctcacctaacttatttttaaaaagaaattaaaaagacctactgattcgtattatccacgagtttcaagccagtgtcaaaacgagaggtccatgtttgttcaactatctgtttcgtacgtcggattcattgccaaccattaagcttatcattctaactgattatacttgtggctatagtgactaagtgtcgtcacacacacaacacaacaatggatattaacaggtggagtcttcaaggtatgactgctcttgtaaccggtggatcaaagggaattgggttcgttttcttcctcccaaatgctctgtttcctagtttctactctgttttttatatatccactctttggtgagaatataatattcaagcaaagtttgaaacaaagagatttgaggttgagcttgactttaggtatgcaatagtggaggaacttgtaggctttggtgcaagagttcacatctgtgacatagacgaaactctgctaaacgaatgcttaagtggatggcatgcaaaagggtttgaagtgagtggttcaatctgtgatgtttcctctcgacctcagagagtgcaattgatgcagactgtttcttctctatttggtgccaaactcaacatccttgtaaggtcttcttcaagctttcctaggttcttatggtctcatttgggtcttgattggtttttgtaaagcaaaaaaaaaaaggataaatgggcgtttgggataccttaataacgtcattggtttgccattatgcagataaacaatgttggcaagtacatattaaagccaactttagaaagtacagctgaagatttctcaagtttaatggctaccaatttggaatctgcttactacatctcccaattggcacatcctttacttaaagcctcgggaaatgggaatatcgtgtttatttcctcggtaacgggggttgtctctggcacatctaccatatatggtgtaacaaaaggttcatagatcacaattttgatgactagtgataattgtatgtgtaactatgtaatatacacatctaagctttatttatatgtaggagccttgaatcaactggcaagagatttggcgtgtgaatgggccagtgacaacataagggctaactctgtagctccttgggtcactgcaacttctcttgtccaaaaagtaaactaaaaatctttttttctgttcataatttttttttttttcgtttttaacctaaatcttggtttgaatgtggacttaccagtatcttgaagacgagatatttgcggaagctatgttctcaagaaccccattaggacgtgcatgtgagccacgtgaggttgcgtcgctggtgacatttctctgtctccctgcagcttcttatataacaggacaaaccatttgtattgatggtggtttcactgttaatggattctcctataagccatagggtcaaaccctagaaaacacttctacaattaacaatttctatgatgtatgaacatttggtcaagttttactacattatgtcaaaaataaatgaggtcaagcttatatatgaagcagagatgttagaatggtagtacttagtagtgaatgtgtgattaaaatttgaattccatgatcacctctatgtcgtaaagatacgacaagcctaaaagattcgttgatatgaagatttggatcctctgagtctgagatattcctgatggacccggcccatcatcttcatcttttatctccaatgattgattaatgatcaatcaactttgtgtttgctccacttatctcttcacatcgtacacttcaagataagagagaaatggctggagcagagcaaagccagagatggagccttaaggccaagaccgtacttgtaaccggtggaacaaaaggcatcgggtaagctccaaatctttccatatttcctgaaagagttaaactttattgtgatctctagttcttaaatcaaatatataggcatgctatagtagaggaatttgcaggatttggagcagtaatacatacttgtgctagaaacgaatatgagcttaacgagtgtttaagcaaatggcaaaagaagggttttcaagtcactggttcggtctgtgacgcatctttgagaccagagagagaaaagctaatgcagactgtgtcttcaatgtttggtggaaagctcgatatcctcgtaagttaatcttttttaatactctttatcatttagcctaaatcttgattcatgtaatcttttgattattagataaacaatttgggagcgattcggtcaaaaccaacgctggattacacagcagaagatttctcgtttcatatttcgacaaacttagaatctgcttatcatctgagccagcttgcgcatcctctgcttaaggcttcaggatgtgggaacataattttcatgtcctctattgctggagttgtatctgctagtgtcggctccatctactctgcaacgaaaggtttatatactaattattagatactgtcactgaccaagaaaacaaaaacacatctctgtttgagactttcaatagaagtttttgtttttacttacaatagttttcacatgtaaatgcaaagtcataaactggtttttgaaacaatgaatcataggccatgtgtgtgtgtgtgtgtgtgtgtgtgtgtcataggggcattgaatcagctagcaaggaacttggcatgtgagtgggctagtgatggcattagggctaatgctgtggctcctgcagtcatcgcaactcctttggctgaagctgtgagatactaataagctaaattttctccaagatacatctctctttctagcttttgctgacctcttgaccttgacgataatctttaggtgtatgatgatgagttcaagaaagtggtgatatcaagaaagccgttggggcgtttcggggagcctgaagaagtgtcctcgcttgtggcttttctatgtatgcctgcagcttcttatataactggtcaaaccatttgtgtcgatggaggtctcactgtcaatggcttctcctatcagccacaaggttaaaatccaatatccaaaaacaaacacattttcaacttcattactttgaacattgtcatcttgggctaagcccggtttggaagtatggattctggccgtaacactttagaaaataaaaggaaacttcaaatattctgatttaaattttgcttggatttttcagttccgttgctctcaaacttcaaagtatgtgtgtcatcctaattataataatagtgattaaataagtgtaaaataaaaagtagtattttgtcctcccatccaaaataattagggctttatcctgatccagaacatcgtctgtccgtttccataaaatacatgcatattgctcatattcaatctctgtagtcaattttgacatgcacctcatgtttatttttttggacgcaagttgaacctattacaaaattgatgatttcatctcatgagtaatttacattaatttgaggccgatataatgaaattacaattttatttgcaaaatatatattcttaagaaaataaatcccaaaaatcaaaatcttataactatgtgactttcattaatagcctgtgttttcaagtaaagaaactaaattaacaaagcaaaaaataaaataaaataaaaactgtttttcataaatcgtacgtactatcaaagtattaatcttgtacgttgtaagttgtaacataaacgatgatatatagaatccgcacttgaaatactaattccaacattaaacactccatattatattcaaaatatgtaatatattgtccaaaagcaaaaacaacttcttgaccttccaccattacgactagttgtcacgatgcaatgaatgtaagtaaattggttatttgtttttttcttaactttttaactttatttcaaattccaatttaagttcaaaagttcaaagaacctaaaattaaacgagaagtgttgcagcaaaaaaaaaaaacagaaagtaaatgaccacgtaagtacacatggatgtatcgtaggcctaggtcgaggtgcatgccaattgccaccatgcacactaaactttggatatttctactaaaataataccaactttatcaaatccatatattaattgtaaggtcatgataactcatacgctatattccaaaaacagaaactgaatgattttgtcacctaccaaatgcatgattctagcaccttcagtattggactattgggagtcaattcaattacagtgattttggttggatcggtgggtacacgaacgagagggcccatttaatcctctccatttccattttaatgagatttgatcagtaacactcatcacaaatatcttattttagtttctgatgagcgatgatggtcttattcacacaatgctatttactttttcccaaactcatttttttccttattgctagatcatgagcaaaactattgattcatgattgtagtagcacttaagtgttgcgaaaccaaattaaagatgaaaaaaaaattgtaggtggtacatcaattaatgtttgcttttaatagggtggatgtaattaatgaagtactgattttccatgaagaagacaagccaaatgagagcttgagatcttgaaaacaaccaatagaagagtactgcctatacatgacatgagcatgataaaatgtttttgtttaaagtacggaatttgatgatcaaattttttgttgttgatcaaaacgtagaaacacaaactatatatcgatcgcccccgtgagtagtacgtattattatttcaaaagtaaatgattttgcagacttgcagttattcatttataagcgaaacgttatcttatgcaatgtttacatttgcaacaccaattagcttcttttttttacagttgagacttgagagacacattaaagcttgtcatcgttcactggagagagtagagtgtgtgagagacaaagtgacctaacttcactgcaacagtagtcggtaaatatccaaacataagagctacgatggtaacacgtgtacggtggaggaaaagagagccctcagattccgttataaaggaggtgagacccactcgccggaatggaaacaaaggagaaacgtagaggtaaatggttgggccactgcttcaccaaaaagccttttctatcttctttttatttttgttttgtggcttttaacggttaacaatataactcctcattccaagacaattacgtgtcctctgtacggctttttcatttttcactttctacttcatagtgactttagggaggcctcaatttttaattactcgaggattatttaggtaatcatgaatgtaactacagctttacaggtaattaaacagatgagatttagttgcgtgaaatctagctgatctggtgcttatatcaaatccaattgatggagacagatttggacttaaattcatgattgtatttgtaatcttatatacgttatagttaaatttctttctctccgtacgtactctaactataattattattaaatgctgaacgcaatgcttttgagtgctgagaatctttttggtctgattcaaaaatgatgtattagtactctgaattcaatcttaacttctgcaacgaatcaatgtattaatttataggagatccggataaaattatggatatatgcacgctacttctttcatttttaattaggtaaatggttataactttattttatatatcaattaaatgattttggtatgagattactagtacactttctttgcaaatgttttaaacacgacaagacaaaaatattacaagcatattttggtaaaaaatatcataagctttcatatcaaaatcattagttatgatgttagattttttttttttttttttaacactacaaaaagctctggtcttaatatgttagaaattttagtccaaaccagcctacagaggatttagctaaacaattcccaagcaccttttaagtgttaaccgaaataacgtaatatgatgttaaaggttacataaaaacaaaactaaagaattttcatatgaaaagttaacgtacgtgtcttagtgtaacctaattttagttcacagtatataaattctttaatgagatgatcgcaaaatcgctgtatacaatttcgtacttaattcgttagtcttgaaaagttgacctaatttagatcaaattaaggttaactacaataaaaatttaactaacgtaatgggattctttaaaattaaaaaatcgttgattagatagatattttatctttaagggagacacagagacaatttggacaaaaaaggtcttcctgagaaagaagtggaccacaatcgtggcgcgaaaggaacttcctcctcccctctgttgccttgtcattgggccacgtatatctccacctgatcgtgatgcttacgtggtccatttctagatactatagtgaccagatcaacggtcaagattgattctaatttagacgaaagaccaacacgtcacgtcgctagagtaaaagattttttgaaggcggagggagaaaaatcaaaagttaaaagtaatttgaaaacgaggaagagaaaaaggaattttaaaatgtttaatgaagcggtaggccgcatgggtatataaatgggcacgctttgtaacgtgtaacgatgatatttattcaactgcgtggtataaccaaaaaaaaaagaaacactattcgactctttttttgtttttgtaataaacataaaataaattttggagagagatatttcgtcggaaattaattgacgttcaaaagattcgttaccggaatatttagtagaggcggcgatcgagttatggcggatatttgttatgaagacgagacgtcggcttgtgaatcaagaccgttgtggtctagccggaagtggaggatcggtgtccagcgattcaggatgtctccgtcggagatgaatcccacggcgtcgacgacggaggaggaggataaatctgaagggatttataataagcgaaataaacaagaagagtacgattttatgaactgtgcatcgtcgtcaccttctcaaagctctcctgaagaagagagtgtatcacttgaagacagtgacgtctctatctccgatggaaattcatcggttaatgatgttgcagttattccgtcgaagaagacggttaaagagacggatctgaggccgagatacggcgtcgcatcggtgtgcgggagaagaagagatatggaagatgcggttgcgttacatccgtcttttgtacggaaacaaacggagttttctcgaacaagatggcactattttggtgtttacgacggccatggctgttctcacgtacgacgccgttttaccctaatttgaaaatttcaaaattattgatatatttacggttttgcctgattgaaatatacgatgtcgtttttgtaggttgcggctaggtgtaaagagagacttcacgagttagtgcaagaagaagcgttgtcggataagaaagaagaatggaagaagatgatggagcgtagcttcacacgtatggacaaagaggttgttcgttggggtgaaactgtgatgagtgctaattgtaggtgtgagcttcaaacgccggactgtgacgctgttggatccaccgccgttgtctccgtcattacgccggagaagatcattgttgcgaattgcggtgactcaagagcagttctttgtaggaatggtaaagcagtacctctttctacagatcataaggtcagtctttatctctttctaactctttcttgatttgtttgatttagtggattttaactcttgtttacgtttgaaaatgaacagcctgatcgtccggatgagctggatcgaatccaagaagcaggaggacgagtgatatactgggacggtgcaagagtcttaggcgttttagccatgtcacgagccataggagacaattatttaaaaccgtacgtcacttcggagccggaagtgacggttacggatcggactgaggaagatgagtttctgattctagcgacggacgggctatgggacgtagtgacgaacgaggcagcgtgtacgatggtgcgcatgtgtctcaacagaaaaagtggtcgtggaagacggcgaggagaaacacagactccggggaggaggagtgaagaagaagggaaagaagaagaggagaaggtggtggggtcaagaaagaacgggaagagaggagagatcacggacaaagcatgtacggaggcgtcagtattgctgacgaagctggcgttggcaaaacacagtagtgacaacgtaagcgtcgtcgttattgatctcagaagaagaagaaagagacacgttgcttgacactaatctcctcatcactcttactccaccgttttttgtgttgtttaaaatgattcttttaccttgggacgaaggtagctcaaatctttgaacccaaaagagagaaaaaaaaagcattaggtctaaaaaaaaaaccccggtttactgaaagcggttaaaccgggtatggttgggtcttttttgttctgaacctttttttcttgccttttttcggtgtgtaatgaacaaacagaaaaggaagccggaatgtgtcactgtctaggtggaatcagttcagaattcaattaataaaaaagtatgtatatgttttcttggcttttaaagcaaaccaattaactcggatacgcgtggtgatctttgagaacatcaccgggaattttcagtttgttgataaagattttaaaatctctataaacgagtgggcctttttggtgttggaagaaattcaaaatctcacggaaacgaaaagagagagaagataattgggaagaggacggagtacgtgtcgaagaggtaaaagtagaaaccctacaccacgtaaagaggatgtgacacaccggaacgatgcatatgttaatatgcgcattcgtacgtgtcggtgtcggtgtcgggtaattgattgagatctgaatatgaacctaatcagactgttttatctaaacatgatcactggtctgatggaaaatcaaaattaacttacctgtcatgtaatgtaagaattttattaagaaggaaaatcgaaccaacactcccaaagcatttgggccgagaattttggggtattatattttcatctgaatcctataaggctataacctacccaaaaatttggtagcgcaacatctaaacttgatacagaaaaatgagacaaggatatattaagcttcaaatagatgacccatacaaaatgttttaattgcccaacctaaacacatactgagttgaagtaccatatgttttttcaaataggccacacgagcagcaattctagtcagacataataaactaagacacatgagcgttgcagcaacctgaaagcaaaatgttaaagaaaaggagaggttgcagaataagacctctctaagacaaatgtactctgcaatccaaagtggcaatttcacgtttgtttcatgtcaccgttttctttaagggtcttcagtcttctgtaccccttgtcagtaccaaagatcctgaagaacaccagagacgaattatacactggatattaatatcaggacaactaaagatctgttctggaaagcgaagagatattaaacaagttcagaggttcaccagtccatatacacaaaagttgaagagtagtttccggactttgtgtatagcagtcggtgatggtagtcatggaagtcagcactgtaaccaaatcacaaaaataataatagtaaaatctattaatacaaatgtcttatggttttaagtttcaaaagagctggctagatgtgtgatcttaccctccatacagaggaagaaaatttgagaggctccatgggaaatgataaccacaatgtgcctcaactgtctccagcactctcaacaccatccataaccagagagtaattaggtgagggccagtaagagctggaccgactatggtagcaaaacccagaaatagaatctcagcggggtgagcatattctgatgtcaaaccaaatggtgtggcatatctgtgatatcatgaaatggttgcttttcagaaactcacagtttcaagtatcaagactgaaaaaaaaaatggtgaacattgaaacttactcatgatgcacactatgcacgttcttgtacagccattttgaatgcaagatccgatgaccccaatagaagacaaaatcctcaatgataaagtagaataatatctgggcagacacttctttcctgcaggaccatcaccaaagagggtcttatatacctgatcaaacatgagctcaggttctttcatgatgctcaacactgacatcttttgattatgtttttctttctttttattgccaaatggacgagtttaagatcaataccaggacggcagaggaaaactgcttcgcattcccatggctcggaagacagggtaggaggccaacatcaggggcaagtttacggagaaatgataaagcaacaggcgagtaatacattttccttgggctgcaggtgtgttattttttgtctgcatagggacaaaagaaaagtatgtgttgaccataaagggtaagagaagcatagaaaagggtcatattcacaattattagtaatcgctgaaatggacatcagcctgtcataagaaaacacttttcacgtgagactgaattcttggggatcaacctctagactatcatattcaaaccatcacacaaagctatgattgcatacatagaagacacttgtaaaagataaataataagaagagaataaacctgaattttgtacttgctgagaaagccttgcctttcaagaaaaatgaaagggagtccagataagaaaaacacgctttcatggaggagaaaactcccaatacatgccagttgaaagtcgctaaaatgtgtcacaaggtactgcatcaaccacataaaatgatcagctccagatacaaaatttccgtgctgaatgagaactcatgatagacaatacgcacaaaacaccaaggaaaggaaacaaatactatcattaagtaaaaactagtttcagtgatccaagttaaggacacaagacacccaaaatgcacactaagtataagaaacagactcgaaaacaatacataacagtaatcagaacggcgttttatcgattttggtaaccgatcattggaaagtccgtaagctaaaccgattgaacagagagcacaaaaaaggggctcgattatatgattcatgcgtgtctaggccccgtatcaatatctacacccatttaagctccagcaaacagacggaaactggaaatacggtcaaaattccaacgtaactagtagcatagtcaaattcagatctaaaacagtactgcaatgacacgaaaccaaattgaatccgatggatccagaccggtggattactaaaaaaaaaaaaaacgcatgtatcacaatacagtgaacttaagtcatcgagacggaggaaatcgccggaaaacgagggaatcggaagcaggattagatagatgagattatgatgaagaaagagagagagagagagagagagagagagagtacctgccaaccagattccacgaaggaagccatggatggatctatgagagacagatgggaagagatgtagaagaagaagaagaaagaggtgggagaggagccacgagtgaaacaaacaacagactgtcaccaaaatgaaaatagatatctggcaactgagatatttttttatttttctcaccaactctttttatttttatttttttaagaccactctctctatcagagtcagggccttttcggtggagtaaatgaatgctattgctaacacatccccacgtgcacatcaccctcttccacctccctagtgaccctattttagtatatttcgctttgatttttgaaaccagaaacaagatttgaaattatgaaaaaagttaaaaggattacaacccattaaagccaagaagaggttgaccaacaatttatagaccactttggctgctactattacaatgatcaaagagcatataaactggccaaaccaaaaactaatcctaaggaaatcattcacacttatgtcttcaagagattttaaatcaagatactaaaaaaatctttcttttttcagaaaatggtgtgaatgatcacagttcaatacaactaagcaaaatcttgtaacataaatccaatacgatatggaaaaacaaagacccggaaagaaaaaggtatactatacttgctgaaattaaaccaaaaaagaagaaacgaactggtaagagatcagaagagaaaactcaaaacgtgtgattgattgattagtaatcactatagttggattgttgtaattaggtagaacagcatccttttctgttagttgcagatgaatctgatatattgatcgctgttccttggcccggaagattacctgcagcttcttgtgccgctaaagctttcttgcttatgatatgataaatctcagacaaaatggtctgaaacgctttctcgatgttagtcgcttctaaagcagatgtctcgagaaacgacaaaccttccttctcggcgagagagcgaccatcttcatcagcaacagatctcaagtgattcaggtctgatttgtttccagccatcatgataacaatgttggaatcagcatgatcccttagctcacgtaaccatctcaagacattctcaaaagtttgtctcttggttatgtcgtagacaagaagagctccaacagctcctctgtagtaagcacttgtgattgctcgataacgctcttgacctgcagtgtcccaaatctgagccttcactgttttgccttcaacctagtcaagattacacatacaagcatgaacaaagacgagccatttcatttgctacaattacattaaaataaacccctaacgagaattcattttcataacataagatcttcagatctaacaatcacatgcctgttcaaatatcagaggatgcaaatgcgacgacacaatctaagattaaacaccaaattgatctggagggaaattgtctagatttagagaaagcgagagaagagagatgacctgtaaagtccgggtggcgaattcgacgccaatggtggatttggattcgagacagaactcgtttctggtgaatcgagagagaatgttggatttaccaacaccggaatcgccgatcaggacgatcttgaacaagtaatcgtactcatgatctattctattcgccattgcttctcaaatcctagcgtctgatcaacctacgcatatacacattcacgtcaacatcgatcgaagaaactacaactaatcatcgtcaatgagatcaaaaagcagcaaatcgaaaccctagaaaatcgaattttaccttttgagcaagccggaaggatcgagaatggaacaaatgttttttttatatattttgtttctgtatttctctgtttcctttccttatacgttgcgggttttgtgcccaagaggtgaaaacggaaactcccttttatttagtttcgaattttgagattcttttttttttgtttaccacggaagaaataatttcattaaatttcaactttttgttataagactttgttacaaatcagtcataccaaaactaagatcagattatgcaaattgcatatctaaattaaaaattcaacctttaaacttaagtttagttggtcccatccgagttaaaatcgaatttacggctaaaatcttcagaaaaagcaattgaaacgagaatataaaggccttgcttaattattaggattaacagttataatacatcattaccaaaacacagagccatattcaaatcaagagccataatcagaagagtctttacgcataaacatgaaacccataagctaattggctttagccagagatatcaatagacttaacttgagccttcttcttagcctcttccactttaggcaccgtcacagtcagaactccgttctccatggaagccttgacttgatccatcttcacattctccggcagcttaaacttcctcgagaattgcccgctcgacctctccacacgatgccacgtgtcctgcttctcctctttctccacgtgtctctctccactgatcttgagcacactgtcgtcctctatctccactttaacctcctctttcttcatccccggcagatcggccttgaacacgtgcgcctccgccgtctctttccagtccacacgtgcgttcgttatcgccgatgtttctccggagagcgacgacgggaattgcagttccttgaatggatcccaaacgtcgagtgagaacgggtcgaagatgctgttgcttcgcctgttgttgccgaagaagcttggaataagcgacattctcgatttgatttcgaaagcgaaagagatgtttggaatgctgagatagctaattacgattttccggcgagttcgatttctacttctgagcaaagctggtgactcggatgatgtatttatagtggtgaacaagaaatctccagagcttctagaatttacgggtcccaaacttctttaaacttcacacgaaaacgatgaaaagattggaaaacagaatccagaaaactctagagtctactagtagatgcctttcaatttcaagtacagtacgactctattcagccgttatgcgttttatgggctataatgggctcctgaggcccaaatattatgagataatgtttagaaattgaaactggtatcatgtatatatttgacatcgaagacatatattttgtatacaaaagctttttctcatctaacttggatcaactaagaaagcattttaagactgtgttattccagtggtgtataccttggctaatccacagaatcagttgcagactgaggaacgcttgaactgtagaatatgatgaacgcatagatctacacgataaaaccattctcgggaccatcgtgagtctatgtagaggaaagcaaacaatgccaaggatgtagatatgtagactgcagcacaagtccagtaaaaccacaccatgtctatcacattaccttcttcttcattttcttcctctttggcatgcgttgacacacttggtggctcagggactctctgggagatgcaatttttatttgtaggaagtccacagagatgagcgttgcctatgtaactcctctcgtcaaaggtaacaagatggcctttgaaagggatttcacctgataaattgttatatgagatattcaagtatcctaaactgttgagatcggctagcgcaggagggatacttccatctagcttattgttggatagatcaagactctctaagcccttcagctttgaaatgctatctggtatggagcctgtgaggcggttacttgacaaattcagggacctgatattctgaagatctccaatctcgattggaatttcacccgatagttcgttgctcgacaaatccagaccatgcatatagcggagaatatcaccttgatacgcctcatatctgcttttcgttaaaaaatccactacggttgctggttttggttgataaccattcctgacaccatcatccaagttaagatgtgatccatattgacaatgtggcaagaatgtaatgtatgagaagtcaaaatctgcaacaagtgacatggtacggtcattctgctctgcaccaaaagacattttactgaaacatgatggtatggggcctctgaattgattgtgagacaagtctaacagaccaacttcacttagctgacatattttcccagggatataagtttgaaagctgttattccgtagaagaagaatacgtaacttagatgtctggtcaatagtgttcagtatctttccagaaaaattgttgttccgcaaatcaagcacttctaatcccgcagccttgaataaatttcccggaactaaacccgtaaactcattgttttgtagtcttagttctctgagagatggaaaattcacattccttggtatcgaaccagagaagctattgtgtgagatgtccataacctcaacccaaggactctgtcgtagaaaagggaaaggaccttttagctgattaccactcatgtataggtaggaaagccttgatatcctaccaatccaaagtggaagcatgcccgaaaacctattatctgatatgtctaaaagagtaagattctttgacttcaataaaccctcttcaagactcccagtaaaattgttgccatcaagaaaaagcccaactaaaccagtaagatttgcatgcttcgaaaatattttcccctgtaattgattgttggagagcttcagaacccttagcgagtagcaaccacttaaaaacataataggtagctgcccatatgaccattagaagacatgtccaagacttgtaggcttttcatctccccaatcgaagatggtatagttccttgaaaatgatttgaagaaaagttcataaacctcaggtttggaaacaccatccctatgtcctcttgaatcgaatcatatatcatattactcgagatatcgagaacttgcaagccatgaacaagaataggtagttgaagctttgtcaatgagttcccacttagtaaaatagtctgcagccttgtgttattcttcacaagccaagtcgggaatgttcctgtcaacttgttatgagagagatcaacgaagcacaagtcacgctgatgcacgagaaagccgagcattgtgctgccaagactgcaattcgataaatataacatcttcaattgaaacaatggagcccatgaactctcagtctgaacttggatcacaccaacttttgatgacaatttgaatactgtgagtcttgtttgattgaccagtgagttgaacaagaacgaaccgtcgaagttattatcaagcagcgacaagtactcaagcactgatggtagaccagacacaaaggaagacaggtttccattcaattggttgttcgatagatcaagagttcgaagatgcgttaagttacccaaacaataaggtagacttgttaaagcattgctgctcaaatccagctccctgagtttcattagtctgcaaatccctaaatagcctgaaattaatcaaataagagtgtaagaaatcagaataatcatcaacttcatctttaaaagagagtaataacaagatattcaccaactccatcatcatatgaactaattagacttcatagccatgtaactcattaagttcttctgttctcacaatctatctatgtataaattcagttaggagggtgaccaaagtgtgactcttctgtttagaccaaaaaatgcataagataagaaagataaaattattgtaatattcaccttcgtgggtcaaagacaattgatttcttttgaaatccaatacttgtaaagatgtaggaatctctaaacctgcagttgaaagaacataaggatacataaatagataaagatttgcatgctccacttctaataagcatgtaagtgactgttaagcaacccaggaaaccgttctatattcaccaacccaaatgtaacacaccaatgagacattgattcaacgaaattattctcaattattgaccacaaaaacctacaccaaaccaaacaatatccagaattattttatcataatctgattctagtctctttaacccctcccacagtaactgacttgtggtgtgttatgctcatctggaaacttagacgcaatcctatccagagggtctacaatagctatagaagatacccaggaaaactaggcttcatagttgcttgctgaacttttaatttctgacctcgactttctgaacaacttctctaaaatcaaatctcttctcacttctactctcatcaacgtctatgaaaaaaagttaaagtagatagattaaaccagttaggatagagcaagcaagttttactttctatatatgtcttacctcggccatgatctaaatttgtgaacccattgtcactgagatccagttcttgcaacattttaagatctttcagtactgccaggcaaaataaacattcttaggagaaaaacccagaatacatttgattgccttctttaagccataagtcacttctgcaagaacagttttataacacttaccatgagtagatagcgtgtggttgaatttatttcctcgtaatttcaagacttgtaactcttggaggctttctaaacctgaagatccgggaaaacacaagttataattggaaagttgacagaaatggataaagatcatgtatgtaaatcccctggtactctctgtctacctttaagttgagaaaaatctgacaacggattgaaattaagatctagtgttttcagtttcgccgtacttaaacctgcaccaccaagaaacacattcataagtgatgttataagtcagcagaggtaagcacttccataaaacaaagcaaaaaaaggcagccactcactatgactagcctcagagtcattgacaccattgaaactgagatccagtacttccaaatctctgaaatctgttaaacctgcatctcaatgtcacacttagtcagtcatctgacatcaattctttagttctctcttttcttttggaacaacaaaactatataaaggtttgttgacatattttaccttgagaagataagaagctgaaactgttgtccttcaagtttaacactctcaagtttgtcatgtttgaaagttctgccacaccagaacaagaagccgtcaaaatccatctccaattgaattatatacaaaaatgtcaaaaagagaaccaaacatatagaagaaatacataaccttgaggaggaaagacaccttccatgtaattagactcaagatgtagactcctaatcgatgtcgcagcatttaaaaacgggacgatactgttgtcgaacatattatgggagaaatctaaggtagtgagcttatctagtgtcccaaagctcttaaaacctgaaaacaaaaatgcaagggaaaaaaaaaaactaaaattctctttcaaacaaactgtcgaacactttatgtgcactatgtaatataccaaattacagaatcaaactcacgcgccctacccttatttcacacaatcatcaagatcttatattgaactttatacacattcttattcgataaatcagctatggctgatcttagagacaaaaccatacggtaaaaggactctgtttctattgttgccgttggaagagattttcgtgaggttgtttgtatttggttaaaaccggtttaaacctgaaccgctatttcttgttgttggtatccagacattaattagtgggaaaattgagaaatgttcggttagagagacgtaccaaggaagtgatcagacaaattagtgaaccaattccacgaaagattaaggctttggagttgaggaaaactatgaagcaaagacagatttaaagaccgagtttgcgactcaaatgcgaccggtacgagtctatccagtgagagaccgatgacgtggccattaatagcatcactacactttactctctcccaacggcaacaatcaccttcatgatgagtccatgacttgagaatactaagtccttcttcttcttcttcttcggcatcaacgagattcttgagatacgacttgagctgcaacaaacccatccgttcagtttccacacagcttacacatcctttcatttggaattgaattatcattgttattgttatgaacaccaaagttatatgcttcttcggtttaacccaccaccttcttctctcgtctgttctcattttttttttctctgttttttttttgctagaaaaactgataatttgatttgatgcccaaagtttaaagagattgcatagtttgccaagaatagaattgtaagatgtgaatataaactgtacgagtccacgaaatactcaacccatattggacttttgtgttcaactccaaaatgagaattgaccgatgagtccatatccatcgaacgtatgcatgcctaattaccatccaccagtagctatcaacatctctaagggacctttgtgttttgttgcgtaaattaagtaggagagtcaaagctatcctattgatatcttttacgttttttttcttctctattttgcatttatgtttacgtgtaattttaaagatttaaatttatactttacactatttttttagtttataaaagtttaaaatgataatacaataaaaaaaatttaaaataaaaaattatatattttcgtcaactatttagtatttactcatataaagtttattaaaagtattactattttatatatgtaggttttgcatttggggacaaatattcaatttcaggtaaggttaaagctcaaaagcctgatccaactataagttttgggccaagacctgatatgggtttggcacctttaataaagtcaaatgagtcgtcatcattcttgggggacgatcaaaataatgaaatgcatcatctctcccaccaatttcattactttgcttcgactctcagactctttctctcattcgcctcactcatcatctctcactttctcgcatcatattcctttcttcttccacctgactcatatctcctgtttctcttagaagaatcccgtactgagatcaggttagattttagtttctcttctgttgttttgttcttgcccgattgcatgtactcagcatcttgctgattcaccatggctatcttcaaatttctgttttattttgcttgtaacatatatgggggaaaagtgatcttttgtggctttttaggtgtttttagtatataagtatatagttactaaactttattcagtttcctaatgaagaagaatcacatgtattagctgaactgaatttccggatttcatttttttttttttatggatctcttttggcctgtgattagtcttctcagttcggtgtgctcagggaattttttggtgaacttctgattgagaatcgggaatgtcaaactgatcttgtcacaaagattattcatttccataaaaatattaatttgttggaccctatagttatatttatttacacttgctttgtcatgtctttggacggagaatctattaggagattagatacaatctattgatagtaactagtaatttacataattttcagttttactttcccaaagattcagtgttgtgtatgtcagtaacagtgtttttatggcatagaaggtaatgcgaagtggttgagagatttcactatgatggagctatctctagtcagattatggaacacttgttttcctagtttcttctacatttcgactgtgctttttctgctcaccggtggaggagtttactctcactctgaatatttgattggattgggaagctatgacattactggcccggctgctgatgttaatatgatgggttatgctaacatggagcaagtagcatctggtattcacttcaggctccgtgctaggactttcattgtctctgagccccaagggaagcgggttgtgtttgttaacctcgatgcttgcatggcttcacaaattgtaaaactaaaagtgatcgagagactcaaggcacggtacgcacctaatcttttcctcggttgactagccttagtttttaatgagattgtagtagctaagtctgtatgatgatcgagatggaataattaagctgttgtttgcagatatggggacttatatactgaacagaatgttggcatcagtggtattcatacccatgctggtccaggggggtatcttcagtatgtggtgtatatcgtaacatcacttggatttgttcgtcagtcgtttgatgcccttgtcgatggaattgagaacagtatcatacaagctcacgaaaatcttcgtcctggatcaatttttctcaataatggtaaggaccatatcctcttctctctggatctgtacgtatatgttgcaggaatgatctttggaactgctattctcatgaggctacttaaacttatcttacaggggaactcttggatgctggtgtaaaccgcagtccaagtgcatatcttaataatccttcaaaagaaaggagtaaacacaagtacaacgttgataaggaaatgactctcttaaagtttgtggatgatcaatggggtccagtaggtagtttcaattggtttgctacccatggaacttccatgagtcgtacaaactctttgatcagtggggacaacaagggcgctgcatcacgatttatggaggattggtatgaacagaatactgctgaaagatcttactctgaagagtttatttcagatgagatacctagaagagtttcaagcctaatcgagaatcatcaggacagtcgtaagtttaccacgcctttataactgctgtacattgtgtctataaagatggaacacgatcaaatattcagtgtgtttggtccgatgcagatcacgagttgctagagcttgcatcttactttgagtcacaacctggtaagcctgtaactagaatttcaagttctgcaaggcgggtgaggagtgctctgaggaaggcggataagcctggcttcgtttctgctttctgtcaaacgaactgtggagatgttagcccaaatgtgcttggagccttttgcctggacactggtcttccttgtgatttcaatcacagtacatgtggtgggaaaaatgagatgtgctatgggcgtggaccagggtattcacctgtcttttttttttttttttttttttttttggtcgtcttacaagtttggatagcacaaacttatggtaaactctcatgacctatttttctttatcatttcagctatcctgatgaatttgaaagtacacgtataattggtgagagacaattcaagatggctttggaacttttcaacaaagcatctgaacagctacaagggaaggttgattaccgccatgtttatgttgacttttcacagctcaatgtgacacttcctaaaaaagatgggaaatcagaagttgtaaaaacatgtcctgcggcaatgggctttgctttcgctgctgggaccacagatggaccaggagcatttgattttacacaaggagatgataaggttttcagtaaaattcataatgcattatccaataagtagatattgcctttatgctttccaattcttaagtctacgtttggttaaatcaggggaaccctttctggagattggtgagaaatgttcttaaaacaccggacaagaaacaaatcgattgtcactatccaaaacctatcttgcttgacactggagaaatgacaaagccatatgactgggctgtaagtagttaaaaatgtaaacttccatgagtcttgtatacagtattaagactctactctaacttgtcgttttgaatccagccgtcaattctttcattgcaagttctacgtattggacaacttttcattctcagcgttcctggaggtagtggagaatctgcagattgtcacaattaataattttgactagtgatgcgatgtttaataatcctgtctatctttcttgtcagaatttacaactatggctggaaggcgtctccgctatgcagtgaaaacacaacttaaaaacagtggtaataaagatttgagcggtgagattcacgttgtgatagctggattggctaatggttactcacagtatgtgactacttttgaggagtatcaagtgcagagatacgaggtaaaagcttatctactggcccttttaaacaaacaagagttcgtattcttacattaatatgcatgtgttacaatggttgcatctgttagggtgcatctacgttatatgggccacacaccctcagtggctacattcaagagttcaagaaactctccaaatctctcgtccttgatatgcctgttcaaccggggcctcaaccgccggatctccttgacaagcaactaagcttcctcacaccagtcatgatggacacaactcctagcggagacagtttcggggatgttatttcggatgttcctaaaaacttgtctttgaagagaggaaacggccaggtgaccgttgtattccggtcagcctgccctagaaacgatctactgacagaaggtatcatcacccaaacccaatagaaaaaataatatttgagttttttttttaatttctcgagtaatatttctttgaaacaagttactatagagactatacttgtgcttgcctgtaagcttttctgtccctttttctctaattctgtgatgaaggataataaccttaaccatggagcatagtcgcgttgatgcaaaactgtgagcttttaaaagtgaaaatattgaaatactaactattcttgctgacgtgaatttctcatgggttattattgctcataaatttctaaaattgcatatgcttatgtctacttcttagtgatggatcctttcaaaataagtgacttgtcatactttgatgctaagaagagatactatgttcatgacagggacgtttacactggtggagagactagagcagaaggacaagacttggaccccggtttatgacgacgatgatctatgtctgaggttcaagtggtcgaggcataaaaagctgagctcccggagtcaggccactgtggaatggagaattcccgagtctgcatcaccaggggtttataggatcacccattttggtgctgcaaagaagctttttgggtcagtccatcatttcacaggctcttctagtgctttcgttgtaacataaacaagtagaaaccaaagtagatacatagtaaacttgtattatactaggtttacctgatgcactgtcttgtgcacttgcatgtactacacaaatgtagccagagagtacagaatggtgtcaaagaactgatgttgagaagtctaatggaatccaatataccttttcatgtcaatgttcacatacagtttaagtatccaggtataggcaactacggttgtgttagtgtataaattatcttgcaaagtggagttagtttgttgatgaatggtcatagtttcaagacaactaattttgctgaactttgttatcataaaacataataagtcaagaaaacaactgattctagaggggggatacaaaggaatctcaccaaaaaaaaacaccaacattgtcaataaatcttcaacattttagaatgaagagaaattgtggatataaaaggggtcttagggattagtgtcttcttcttcttcaatcttaggagccaagtagtaacgaatgtaacccatctcagcaaccttatactccacaaccactggcaactccgacgataagctgattgtcactgtgtctgacaatggagttgcctttgtgaaggaattcatgtacctcagggcaaatgagagagacactggctccttcatctctatcacaattgcatcttccggctgcaatacacaaaacaaaagcctcaatttaacatgttactccaatgaaacagccgtagaggatttgtcaacagtatcataggtttatgcaaagagttagacatgttaataccttgtctacagttgtgttctgcctgagcacaatgttagcggttccaatgtcaccggcagtagaaaacttcacgccttctttagtcacagagatcacaactgcaacaataacatcaggtcaatctctatttagactaaaaaaaacaacccagattgagaatagaaacaatgcagcaatgtacctgtgtcaccaatgctactgagatctttgcaaatcctggaaaactcattggaaggcatcctcacgattgagtggtactcagcatcaggtattcccagatgttcactgtctatatccatcaacttcatctcaaaatcagcaatcttgtcttgcgctgtaaatcatccaacacaaaaccaagttaaaagcagctaggtctaaaccaagtttttgaaacttgaaactatatacaacccctaagagaactaaatcattctattccatcaatcattccaccatttcgtacaagcttaacccatagaaaccagaaattagagtaagtcagtcaattagcaaataaacttactggggctctcaaacatgaaggtaacggtgtcgccgccgtcatcagccttgatggtgatgatgtcatcatttccggcgcatttgagcatcttcgacatgttgccgagattcatccccatggagagattcctgtcgcatctgtagtgttcgaagccttcggatcttagcaagagagacaccagagcaacgtgactcgaatccatagcttggagtgagaacccagtgctggagcagtcgaaattcgcatcgttcaccagatctttgattgattctagaaccttcttcaacaacgagccctgaacaagacgtagctccaacatttcgtcgtcttagatattatcagagttcacaatgagaatcgtttgcggctattttggaaagtggattgacactataaggtcaaggagtccgatttataagctttttcttttctggcgggatttcgccattctaagctatttggttcccgccaatgcgctagtgccggcctcaatcgttttaagaattggatggatatttttggtcattataaaagttagagggttaatttgtattaataaaaagaagaaaagttcatttcgaattgtagtgaaagtttagggttttatttgtaatatttaaaagacaaaaacacgcgaatccaaaaccgactttgccctagttaaaatctcgtcgtctccttcgtgttcgagatttgatatcgactaatcgaatcagaggataagagaatggctcacagaatactgagagatcatgaagccgatggatgggaacgctccgatttcccaatcatctgcgaatcttgtctcggtgacaacccctacgtgcgaatggtgatttctcgattccttctctcaaacattcttggattttgctattgcttgttttgtttcaatggctcctgaatcttatttccggatctcatctcttaaccagtctcttgctcgttgatgttttctgtatattggagtggttaacttagtaaatatggttttagggtttagcttgttatcaaattcatcgaaaaattgggttttacatccaaattcgtttagttatagttggatttgattacagctgcggattctcttagctttcagctgcaattttgttttctgaaaatctcgatgttttgatttctgattgacgttttatctgttgatatgtagaccaaagcgaattatgataaggaatgcaagatatgtacacgacctttcacggtgtttaggtggcgacctggccgggatgctagatacaagaaaaccgaaatttgtcagacttgctgcaagttgaaaaatgtttgtcaagtctgtcttctggatcttgagtatggtcttccagttcaagtaagagacacagcactcaacattagtactcatgactctatccctaaaagtgatgtcaacagagagtattttgctgaagagcatgacaggaaggtatgatcatgttcacactcacgattttatttcagcatttgttggtttgagaattttgaagacttactctagctttctcatggtggcttatctaagtgattttgctttttctgttatgtaggctagagctggactggattatgaatcttcattcgggaagatgcgacccaatgatactattttaaagcttcaaagaacaacaccgtactataagaggaaccgagcacatgtttgtagtttcttcatcaggggtgagtgtacaagaggtgctgaatgtccataccggcatgagatgcccgaaacaggagagctatcccagcaaaacataaaagaccgttattatgggtaagcttttttcttctgtatgtttgactttgttgacgtttagttccgttctttattggttgtttcgatacctcccctaaggagtgtaaaatttcatatgtttctgccatagtactattttctccttgatcattcataatatactcgatatttgaaagcttctgatatgtgaattcttggactgaactatgctatgttggctctcatgtagtcttgttacatagtgtcgtttccagttttagttctctttgtaatgtattagtacttttgcatttattcttgttgaagagtttgttttaactgtttctcattttcttttacacgttttcagtgttaatgatccagttgctatgaagttgcttggcaaagctggtgagatgggcactttggaatcgccagacgatgaaagcatcaaaaccctttacgtcggtggacttaactcgagaattctcgagcaggacatacgagaccaattctacgctcatggagaaattgaatctatcagaatcttggccgataaagcctgtgcatttgtcacatacacaagccgtgaaggtgcagagaaggctgcgcaagagctctccaacaggctagtcatcaacggtcagaggctaaaactcacatggggaagacccaaacctgatcaagatggtgcaaaccaacagggcggtgtggctcatagtgggttactacctcgagccgttatatctcagcagcacaatcaacccccaccaatgcagcagtactatatgcacccaccaccagctaaccaagacaaaccttattacccatcaatggacccacagagaatgggtgcagtcatttcaacccaagaggctggtggttcaagcactgagaacaacggagcttcatcttcttcttacatgatgcctccacaccagtcatacccaccaccaccatatggatatatgccatcgccttaccagcagcagtatcctcctaaccatcatcatcaacctagtcctatgcagcactatgccccgcctccagcagcttacccgtacccacagcaacctggtcctggatcaagacctgcaccgtctccaaccgcggtctctgctatatcacccgactctgcacctgctgggtctggagcaccttcgggatcctctcaacaagctcctgatgtttctacagctactggttcgtctcagtagagaagaaatatcgcttaaaaaatgtactgcaagtttcccgctattcaggacgaaggttttttgtattctgaatgaatcattttcttctgctttttaaagtacttcggaatgtattgtttcttcaaaacggttgttaacgaaatctatcagttatagaggcaattggttccatgaagagtctgcagttattggccaatttcataaagaactttgagaatattattatcacaaatttcacatttgctcgaatcgtttatttttttttgagaattctactagtaatttggataaatgcaaataatctgggaaatacaattgggccttttgtgagaagaaaaatcgtataaagctgggccggacgccaaactgaaaaatgtgatggaatttttaaaattcaatcgcgtccgactttcccgaagcttctttctaaatcctctctacatatattccccactcatatatggggaaacgtgaaattcattttactccggtgggtcgtcaggtgcagagagttctggaatatccattgcgcttggagaatcgttcgccggtaatttgcttcatcgattgtattatccttcgttttttagtttccgatttagagccgttttacagagttgttttcgaaattctgtggaactatcgtcttttaggtgttgttagatctgaatcgttgctgtaaatttcgatgtgcttaagcttgattctagacttgtaaggaaaataactagatagatgtcagcatttatatcatgtgatcgagtatgatgaagttcttaaatcttgttttatgtggaagttgattattaagaataagataattatgtcgtcttcatattacaatagcttaaaatttgaattgttcttgtagattttgtgattttgtggttcgatttagcatgttcatataagtttagacaatacacttgaagctaataagagtcttaattctttaattgttctattttcttgtagatgtcttactcaagaaggtcaagatactctccttcactatctccttatgacaagcgtcgtggaaggtctgtgtcaaggtcattgtctagaagcccgacgaggtatttgtcttattcttaggtttgagttgtcgtgacttgatgtttgctgcttttgaatgcgctaatgtctgattgttttaaatcgcttttgttacattaggagtgtctcaagcgatgctgagaatcctggtaacagtttatatgtaactggattgtctcaccgggttactgaaagagatctggaggatcatttcgctaaagaaggaaaggttgtggatgttatctttaattttgaacacaattcagtttcgagtagctcactagtgtataatgtttaaagagaaatttgtttgttcatgagttttaacatttgtgagcttttgatatttctaggtaactgatgttcaccttgtcctggacccatggactagagaatctcgcggatttggttttatctctatgaaaagtgttggtgatgctaaccgttgcatcagatctctagatcactctgttctgcagggccgcgtcatcactgttgagaaggtaaaaagactaatcactagtgattccttctatagaaccataaagaatatgatctggccgaagctgatattgatatatgcaattactaggcactttgatattgattttttcttctcttttaaaatatttaagttgtttgcttgtttccactttcaagtttctgtggcagcaggtctgctgtttgtagcagcagtgcttcaccaaatagcaaacgttgcaacagttcaaacacatcaagtttcagacatttagggttgtatgccctgcatttctctctttcttgaacaatttaatattccgtcctttagtagcttcaatataggaatgttgtttttgtcgtgtttcctgtttcattgatgaatgtctgacagatctgtgatatctctggttttctgttcaggcaagacgtcgtagaggacgtactccaactccaggaaagtacttggggctgagaactgctcgaggtatgacatcaattgtattggttttgtcacaattccgtagtcggtgtttcctgattttaccttaacatggttttgtttcttccctttgcaggacgacataagtctcctagctactctccccgcaggtctgttagctgctctcgtagtcgtagtcgaagctactcatctgatcggggcagatcttattctccaagctatgggagaagaggaaggtcatcctcgtactcacccttctatcgacgacgcagattctactctccttcgagatctccttcacctgatgatcgttacaacaggagacgcgacagatcatactcaccttactacaggcggagggaccggtccagatcctactcacgtaactgtagagcacgggacagatcaccttactacatgcggaggtacaggtccagatccaggtcatactcgcctcgctacagagcacgtgaccgatcatgctcaccctactacaggggaagagaccggtcttattcaccccactaccaagggagagacagatcctactcacctgaaagtcgttactacagaaggtatggtggcggtcaacataaataaacagatcagctgaaactgcttagtattgttgtttctgaaaatacgtatgaaatcaggcacaggtcggtatcgggaagcgtaagccctggagggagaagcatgtcacgtagcatatccccaaggaagggaaggaaagagagcagaagcaagtctcggaggcacgacaggcaatcttcaatgtgtcattcgaggagcgcaagatcaagcacctccagatccgtcagcccataacagtctctacttacttgaagttgacatcaatcactcacgtctgttgttgtattaagcattttgggacttgtctattccttgtatttggaattgatgacagtacgtatgttatgttggtttggtgttaggatactttattacttctgtggaaatgttgctttggcgacgagtcgtgagagaaatggaatctcttctttgttacaaaaaatctattttcatgtctttctactccaacaaatttctgttgttgtataattgttccacttacttttccaactttttttcataatcaatagacgattttcagaaatatcaacttttagggatggactcattactcactttgtggcattcttctttcaatgttgttgtatttttaaaacaaaattttgttttaatttttttttttactttgtcttagctcaaattatcaaaacaataaaaaattgtcttaacctttttctgtttttcaacattttacttaattatatgtaaaacaaatttacgtttctttccctctgaattattttctagttatattttgtatttcatacacctatgtgtaagtggtataaagagtaaatttaacttcttcttcttttcaacaagagtaaatttaactttaaaactaaaaattacatgattttattagtgatatatatagttgtttttgaatagttaatatagattatattgatatgcacaaatctcttagtgatttgtcccactttattaggaatcttaaaaactgaagttcgagaatattgtcgtttgcttagacaattcaatccccaaactataattgtgcctgattatttgaataccagaactgaaaatattaaacttctccaactgattgataaacatatccaactgaatctttaacaattcgaactacaaacttaaaaaaatagcagaaaataaaaatcaaaccctagctagaaaaattagaaaaggttcaaattactagttattaactagggaccttggggaacaaaaagaaagaaagaaaatgaaatctagtctttgaaatatttcttccaacgcgggtgcgttttccaacgcttctcggccatttcctcaataggaacacctttggtttcgggaagaaaaaacacgacaaatagtcccatgataatgttcattattccgaagaagaagaacaataatgatctgaatctgcagagagcagacaagaagaactgtccaatgatgaaagtgcagaccatgttcatcgccaccgcacagaagtaaccagcatttctcacttcaagagggtagatctcagacggaacaagccatcccaatggaccccaagaccatgcaaatccagacacgtatacgcagatgaggatcaatacaatcagcgcacggcatggccagtaataggaccaactagcttcaagtgagctaagagaatgcctccaattgtcatctgcgtaagatgatcaaaaaaaatacaagttagcttgttatccaagtaagaatatgtgtaccatgtgacacaagcaaaaaaaaaaaaaaaaaaactaacctgtgtagcggtcatctggagagctccttccatcagaagacaccttctaccggcgaaatcaaccactaaaagagagataactgtagcgattgcgttcacaccattggtgacaacagtagagatcagagaagcgttgtcaccactacccatcgtctggaacaaaactggagcgtagaacataaccacgttgataccggtgaactgttgaaagaactgaagtaacgttccacacaccaatggtggtctgttctcactcttggtgaagagttctttgaatgggcttttcacctttgtcgctacctctgttgcgtatttgatctcattgaactcgagctcaatatcttcaatgcctctgatcttcctcaggacttgcttccccttttcgtctttaccgcgctcgatgagactagccggagtctcgtggataaagaaggatcctatcaagaggattaaagcggggacagcagcaccaccgagagaatatctccagccgtttttcaacgtggaagttaagtagttcacataacttgctgctaagattccaatggtgatgagaaactggaacatgacgtttagtcctcctctgtatctcgccggagcaatctctgagatgaacaatggaacggtctgcaaaagtattgctttcaatgttaataaacaaaacaaaacaaaacacgatgagttaaggcataaaaacagaggaaaccctaggtgaaaacagaggaaccctagatgaaaacagaggaatccactgagatagaaaaacgttttgagggtttgacatgatacctggttaccgaaaccgataccaaagccgagaagaatacgaccaccgatcaacatgccgagttcttgggcagataagttgaggatagcaccgacgaggaagaagatggaggcgagcatgattgtgggttttcttccaaaagccctagaaacataggaagaaataaagctagcgaagattccagccaagtagagtgaggaagtgaacaactgcaagagctggtcatcgaatttgcagtagttgttttcgtgtactctgtgtttcttctcgtacacgtgtgggaaaaaatctaacaagaaagtgtccatactcgttacacctcctgcaaattttgatcaccattaattgatatcactgaaaaaacagtcaaaccctaacaaacaaaaaccaatagaagaacaaacctgagattccgatgtcgtaaccaaacatgagaccaccaacagcagcaatgacacagcaaagaaagacttgacctgtcagcttcgcaggaaaagctttagtgccttcttcgacattcatcgaaccaacagccattgttgttgatctcttagcttcttttaatatttctgactatgtggtattgaggatcgtaaataaaactcaaatgcctaagagaggagatggggtttcttttatagatgagtgtgagggttttggataaactaagatttaacaactgaatctttttgaacgaatttttcttctgactcgatcctgttttatctgagaataaatgtggataattactgataagatatatgtgttttgatattaagatattatcatttaaataaataaacaattaaatcgtttagatcaatatcgagattaagaaataaaaactcttttttttttaagtaaaagataatgacgtttgatcgacacaataataattttttatacgacatatatgatctcagagcttggcttttgattatgtaatatttttaacattcatataattacacaagcaagtctgggtagaatatttttcctataagaaatgagtgtgaaaaaagttttggataaaatttagacaaaattatccgcatggtcattgcatgaaaaagaataataatctacacctatataatcgtaagaattataagtatttgttattaaaaaaaaaaaaaaaattcttgttatacatttttcagcatggataaaattttatccaaatgtttttttggacatcatttatccacatttaaaagcaaatattaatcccatgagagaatacgagaaaaacgcagataagttgatatacggttttaaaaaaaaaaggtgaccacttatattaaaaggtaaaattaattggtcattaatattaaaaaatatttagagcttcataatcaggagaagagttgttgttgttgtaaaaaattttatcttgttgataatcaacgatcctttatttattttaaactaaaagagaaagtaatttactaaaatttagaaataaccaatcattatcagatttcccatactataatacattaaactttttaaaagacaacataaattatatctcagttatcatcaaacaaaatgatgatcacttcactaaatcaaattccacacattaatgttcaactttagcatatacataaaatttagctagggaacctaaatcctctacactgcataagcctgaatttgttgagtgttcaacaaaaggacaatggcatctaaagaagaaacttcttctctagcttctcacttgcctcagactatccttgttttagaaaacacacgtcatcattttgttaaaggtacatttcagttcaagtactgtcattgaaactgatctctgagcacacttcatctactgttcccatcaacacctgattgattctgtggagattccggatatggaatcactggcggaggttgactatctaatgtatgttccaaactctcagaagtcagagtataagtctggtctaaagataacaacatgtctggtaacactgatcttggggaagtagcagactcgtctgatgtgacattgttcacatttgaaacttcaggttccacaagttcttgcaactcttgagttgattggtctccatcatttcccccaaaatgttcttggggttcttgatttgttcttctttcaaaggcttcaggttcatcagagtcatcatttatcttcatctcatcagtcaagttttggacacgttcctgtcataacggtacaaggaatatattcaaattcaacattttgagaaacacattgcaagtagcaatcatatttccataaaacctgacaagaacaagaactatataacctcttctcttctcgaaataacttcattgatgtgaggaactgttgactcttcatgtatatagaatcctttgtctgaattttccagtggaaagcgtccggattttgagctctcttcttcctcagatcttccgttgatatcagtaccatcagacagaccctcaacttgtttggctacataagtttctggagagaccttagaaatcgtttcatttaaatctttatcaactttctccactggtaacatttgagtttcttcagttctatccacaatgctctcctcaccactaaatcccgtctccttcccaatgtctgattcgttgacaatacgtgatttttcttcatcagaagaattattcccatcaactgtagtgggaggtgatccaatttcagaaacctcaacttgaagatcagattctacagataacttatgacctttttttgagctataaccaaaatgctccacgtatctttgcctttccgctgctaaagaactcgaaagcgaaccagtgtttctaggaactaaaccaactaaagggttttcaacacgaagatcaccatttcctttcccagaagttccagaaaaatatgcttgatttgagacatcagaattcatttccctgtcttcaggagaaagcaatgagtttgaatcactaacaacaatctctgtcatgtgttctgactccatatcatttacttctcctcttgttagatcttttcctttcattacaggatgtttctccccaaccaatccatcattgctacctacatgagcaaggatcagaattgtagaacttagaatcatttactttgtaagctacaacatttttcagaatgacaagaggatgtaccttgttgtggtattgacttctttttccacggttcccatttcgtgtcaagctgattgtccaatggaaagactctgcgacaaaagctttcatggcggcagaagaagatatcattagggttggctgcaaactcttgctgaaaactatctcctgagaggttaggcttctcttcttgtggatcataaggaatatcaaaagggtttttagttggtaataacacagaaggtgcagattcaggcatttgaagaccatcaactatatagttttcttgatccaaaccgaaatagttccgtccaacacagactggaggaacttccatatccattaagctactctcagcggcaagtcggactaatctcctcattcttcttctagtaatcaaatgctctaacctcttgttacgttccatctcagagtttcctaaatccatcaaattcttttgatcatcctctgtccaagctacaatctttttgtcttcacgtgtagtttcttcttcttcttcgccttctgatgacgatgaacactcgatctcggtttcgccaccaccactagtcaacctctccgatggatccacaacggaaacattcccggtggttgaaagagtttcttcatctaagctaggctcaaaggagaaaccttcagacacaagaaaggctccatctttcttgaatttctgaagtttgggagattttgcagtattgggaatttcaccatagagagttgttaaaatgactctgtctctctcatcttcactagcctgagaagagtcccaatctttcccaacctcttcaactttccttctagcgtttcgtcgaacacttcgttggtgctttaagtcagccttccttgtttcttcctcctcagatctcttttgggaaaatggtgaaaaccaattatccgttttgatatgcaaaagcttaaaacttggatgattccgaagataaaacacagagcatgcgattaacggagaagagtaaaggacgaaataaaaaaggcgtggaagaaaaatgtataggaggaagataattgcagaaacaccagaaacaactgggtgattccttacgtttctataaacgatgttcgtggaaaatctgagaattttccagaacagagttccgacatctttggcatcgattcccatgttttaaacagttcaaattctcagaacactttgagagataataacccaaagcattctgtctatggcggtttgtgttttgtcctagagaatcaaaatgcttgaaagggaaaaacaaatatggtttaattgaagaagcgaaaattgatcaataagagagaggtcaagctttcatttgaaacaataaccagtcaataaaaaatagatttttcaagggtttttttagattttcgttttggttctttttcagttttcagaacacacggtaaggacggagaagacaaaatagaaaactggtaagagagggcgggagttaaattagttgctttcttacacatgtttccaaagattcttgttttcttacacttttaaccacattttttactggttcagaaattgacccttaaagttcatggattttgcatctcatatctctttcttcaaaagattgggctatcttcttaagcccaccaagacccatcaaatgtctgtaaataacatacactattgacacttcctaagttttctagctaatccttttttttagcaagttgttaacagatttgtgtgagactattcatgattttcaaaaccaagatgaacatcaacgcttaaagcttataatagccactctttcttgttaacttgatgactaaagtcaatctttgttgctcaatcttaactgatacacacacaatcaacgttactcatgatatctaatttcactccttactccttcattgagagttggacacaaaatcagtatgacaagaaattgaggatgatctcttaagaaaaactctaaaagtaaatacacatttctcttgttgtgacacaaaaaggaaagagaagacctcatcaaggagagtgagaagatgtactcaagattaaactcataattaagccacacttgaagcaattggaactacgggtgctactcattcttaagcttcctctgacccttcataacacaaacaaataattacttttccatattaacacatcatatttctacctcttcaagaaattaaaaccagacaaaaacgatcaaacacaacattcaaaacatcaaatttcgacaacaagccagttcctttcaagaaaacactaaccttccgtctcatcttcatcgtcatcttcttcctccaccgcatcaacaccgtacctcgcattcaagaactccacagccgcaggagtcagaacaagcttatcagcgttcaaaatatcaaacagattcagtgtcctaggcgtcaacatcctcaaggttccaatgttcctactcgatttcgccacattctcatccacatcaatcatcaagaacatagctttctccttgggatccaatccccacctttgcatcgcagctaagaaatctttagtcttgggcttctcaaacttctccccaaattcctccaccactatcgcaccaccttccgcagatgccgcactcgataacgccgtagatatcgctagcttcttctccttcctattgattttaattgaccaatccttaggtcttggcccaaacaccacacctccaccgggacgtaacggtgttctctgagatccacgcctcgcgtggccagttttcttctgtgagtaaggtttaattccaccaccacgaacttcaccgcgagtcagtgtggaagcagtacctcgccgcttgttattcaggtccgtcacgatggctcggtgcacaacggcacgcgcggtatcctccggcgccgctttgaggtctagatacgtctctccgaccttctctccttcgaatgatagaatcggtagagtcgctagctgggaagagacagaaagcggcttcgagactctgccggagccgagttttgaaacggaaatgtaggttttagggatttggtgagaggaggataaaaagagagaagatgagaagaaagatagcgaatttggtgctgttgcagaagaagccattgttgttccctgacctgacctatcacaacgaagaagaagaagaaagactgagaaagtgttatccactcttcaaatgcctatcttgtgcttggtgagaatttatgcatctgtttggacataaggatataactatcctgttcatgaataactccagctgtcgctagtaagaaagagtcaaactccaaaagtcaaaagcctcttatatagccagcaggttttttgagacataaaactctgtgataaaacgatgatagttgatgatagctgagactttgatacagatatttgagatacgagcgcacgttagctaagaccaccgcgtaagccaccgtctcgtcttgaaacgcaccgtattcatgacttcgtcggagccactcgacctggttgtcaccgtcgtctctgccaagcacctgaagaatgtcaactggcgtaacggtgacctgaaaccctacgttgttctgtatcttgaccaagaccaccctctctccacccgctccgatgattcctcctccatcaaaccggtgtggaacgagcggattactcttcctctcacccgatctgtccacgaatcggtcctcaacatcgaggtttttcattccaattcttcggatctggcgaaaaccctcgtcggatcggttaggtttcctctagctcgtttgattgactcggacgggtcaatgattccggaattgatcaactcgctcgagctggttcgtccatcgggtcgaccacaggggaagattcgtttgaagctcgcgatcaaagacagaccaatccctccaccgcagcatcctccgccacgtcctcaatctcaaccactagattactattctgcccctcaaggaaaccattattactcccctagccctcctcctcctcctcctcctcaagcaccgatcaccgctccatctcctcagcgtgactacagagaattctcacagtcaccgtctccgtctccttacgcattcactgatcactactattccgggtattattatccgcctcctccaccacgttcaatgtacgatcgtgcctccaattacggcctcccaagtggcccatctgctcccgttgatgccttctcatcgattgatcacaagcagcctcctttagctcctcctcggttttctaactacggtccaccgcctagtgggccctcagcacccgttgatgcctttctggttaccgagtacaagccacaagctccacctatgggctcgcgattgtctagctacggagtgcctaatggtccatcggcaccagtcgattactctccttatgatcacaggcagttgcagaagacgatgggtggattgagcttagaggaagagagagctgctgcagagaggtctgagagtgatttcggagctaggccaaactacagctatggccgtgattatcgccgtgaatgttgaggatggcaaaaagttgttgaatttcacaagtgtgcggcgtttctaaggctttacttatcatcagatttgttggtgttagaacaccaggaaatggctgatgacaaaatatgaatttggtgaagtatatgttatgtctatatgtatgtctcgtttgtgaattgatttgttgcttctttctagctgatattcggtgttaccccttctgtacctttgtacatgtttctaaaacatctctcatttctttccttcattcagtttcttgaatcaagctattgggttcttagggttaatgttctaatgtgaatcactttactgttgatttattgtttgaaccatgctctgattaggtatggtagtatgctctgtctcagacatgaacagtcctatatcctgcgattctgccgaatatttttgcaggctggttaaagactttggttcttatttcatgtttgatgataccaatgtgtgattttcgtttggaaccagtgatctccatattcattgagcgtttggattaatgtgtcttgaatcatgctcatcacagtgcagaaaagatgttctctctgatcgttttgggtaaaatggtatgtacacggttggtgctaagtctattgtgctcttgttataacgatgagacagagcagttttgctattgcattcttttcccttttggcattttggtaacctgctatacatatcagtcaatctcatgctatttgcatctaatcactgacaatcatgcaggtattattgttctgttctcaatggaatgttttcacatgtaaaatcactctattctccagattgtgtgatcttctatttatgtcctgacactccctggtttattatatgctttctcatattcttgtacccaccattaacttgtttttttgttctttccttgatccctcctttttattgtagccgcagactcatgaaaggaatctgcatccataaaggtaagattatattggcctctcctggagtcaaaaagaaacttttttagattgttatgtaacttatgtgcacacatgagtgatcatcaaagaagaatgataccaaatggttgcttaacctttttcttcacttaaacaaagggtttattccctctgtggaccgtaaagaaaaatagaaaaaactaaacctagtcttctctttttgctcttgggcatagttctctttataaatttgtagatccactttaactacaagtctttttatatatagggtctaaaataagattgaagttacacttttttgttagttgtttatttgtttatgtcttgagtgcttaatcatggcctaagcgtaatgatgttatagataatatacatcattaatcatttcatgtcttttcccgtatttgcctgaactatcagcacaactgttctcagcaccagtccgttaaatatctctcattatcctcatattgtttcccataaacttctctcactctctctatctttctcttgatatgtcagctactggtataaaacggtccaacctcaacactagaccggttcagagagatgcttcggctaagcaaacagctatcaagggaccttatggtaagagtccgggatgcacaacaagctgcggattaaggttaccgaggaaaacagaagtgacagcagcaaaattgatcaagcatcttggatgcaaatttgcaaaaggtttgcgtctggtggtgatgaggaagaagaaaagatctccaccgtcgaaggtttcttctttttctgggaggtctcagccaccaatcatcccaataaacaatgacagtcatcgatcagaggccatagaagactgcatacagttcatcaactcatcatcctccttcaccagatcaaactctacttcttaagtgttatcattcccaaaccttttgtctcggtcgctcgctcgctcgcgtattgtctattttacttattcgtgagagttgcatgtaaataatgtctacataaatctattatgtgacttctgttgttgtagtacgagtaactgtcttccatctttctcaatttctgtctataaatattagattttgatattcgtatttgttcatgattagttacaaggataagccacttctgttttatcaataaacgaatttcctctttctataatacatatttttctgagatgttcctataattaaaatgttcgtgtgtgacttattttatcattttattaattatgtagtaaaaatgctttagtttaaaaagtaaatttaaaatagtttatccaagaaagttcataaataaagcatggccactgatttgtttaccctaacagttagtagcaccttcagtgaacgggagaccacctaaatcaatctatgtgtgagcgtgtgtgatttgtttagctttaacgtttgatagcctaaaacaacttcttccttttgtgtagtctttttacccaattctatcatatcttttaaaatagaaaattatagcaaatttttggtcgtgttcacaatttgtttgagtgggctactaaaagttgaaatctccactaatcgtttagataatactaaatccatttgttaatgttgatccactgaaatctatatatgtaaatgaaaatcaaactgatttttagcctgagacgaaaatttgtcggcaagtgtgcgatcaaatgatcagtaagtattaagtgtgatcagtcgtttagaccaaaagacaaatttgcaagaattaaaaacatcagtacgcctaaaaagcccgtaatgtcttaacaacgtatgggcttaattctaatgtctaaagcccgtaatatcaaagcccaagcccaggtttataatacatccgacacagccaccggcaatcttcccgccagtataatcgccatggattccggcagtctcaagcctaaaaggctaaaaatattttcgtcgcatacatcattccgttctcagctgatttaaaatacaattaatctgctcccagatttgaagaaccctaaaataaaaaagagtaaaattgaaggctggagattgtgaacatggacggttactctctctctcctacctcggtaatctcgctcagatcctcccacgttcttcctcgcctcttacgcctttgcgtgttacctaaaaaggtcatcaccttcatcgtcgccggttttcctcttctcaaattcggtggatctcatttcccactgacgatcgtactctctcgattcgtatttacgcgccgtgtttcaagctatttcgagctcataagtgttaaagtctcttccttactcttcaatcaatcattcgtatcttcgattccgtgaattgaagagggaacttttctgcgattctgcgaattgaggagggaactttgttgccattctggaacaagaaatgtctgccgtgaaactggaagcaattgtttgccacgagcctgatgaatcagagctgagtcacttgagtgataatggtagtaaaactaaaaacggagttgtctttcaacttctcgatcagaagagttccgaacatagatggtttagtgaaaggtaatgtaagatgcttagactttgttttcttgagcggattcagtgttatgagctctaaagatttgttgtggttatagagggaataatgcatttgaatttcttgattcttcctcaaggtttcttagatggagacggagatatcttccggttgatggagataacaggcgtgaccacgggtctgtgaaacagtcaggacctcttgtgtctggtgcagcttactgtatctcttcctgcagcatgattatattgaacaaaattgttctctccagctacaatttcaacgcaggggtctctttgatgctttatcaagtaagacattttaaccccattagctggtttccttgatttgacaaagtatatagtttggtgatttccttatacgtttatttcagaacttaatcagctgtttggtggtagctgtactagatatctctggagtggtttcagtggaaaaatttaactggaagttgattagagtatggatgcctgtcaatgttatctttgtgggcatgctggtctcgggaatgtacaggtaaggtttcgaacatcaggcgagagagtaattggttaaatttcatttaagactaatgcaacattacatttctattccagtttgaaatacataaacgtcgctatggtaactattctgaagaatgcgacgaatattctcacaggaataggggaggtatacatgttccgcaaaaggcagaacaacaaggtttgggctgcaatgttcatgatggtaagttaaattgcacatcttgcctccagttagtttctgcaggcaattctctctgatatcaaagtgacaccaactaagagtttgcaatacagatcatttctgcaatcagcggaggtatcacggatctcacattcgatgcagtagggtaacttggcagcttgctaactgctttctgaccgcaagttattcagtgagtttacgcttatgaaaccagtaactggatcttgatgcatctctttcttactctccataatgatctcatctttgtgacagcttactcttcgtcgagttatggacaaagcaaagcagtctacaaagtctggctctcttaatgaagtgtcaatggtgctgctgaataatctattgtcaataccctttggcatcatcttgattatcttactaggcgaatggagatacgtaataagcacgtaagaactagtaaacagagtgacacttgtccagcgttttgttattctgactatttagtgatatggctgattctttagctcacttaaaatatatctggatcacattgataatgactgaaactagtccttctatatagctatacgtttccagcttctactgtgtttttcttaaaaatagtagaatttctagaaactagtttgtgtttataacaagacttgagactgcaaatggaaaatacatgagtagacgatatcacgggaactaaacaggtgcatatgaaaaaggtgatatcatttgaaggtaaagttttcatggtgttttactctctctggcagggatgtgacaaaagattcaatgttttgggtagtggcaacagcaagcggtttccttggtttagccatcagcttcacttcgatgtggttcctgcatcaaaccggacccacaacatacaggtaactctctctttctctctggacaaaaacaacatttttgattggattttatgtttggtgtcaaatgttatgacattctttctattgtgtggcagtttggtgggttcattaaacaaggttccgatatcactagctggtcttgtactcttcaacgtccctctcagtctcccaaatctgttcagcatactgtttggtaagtaacacacttacagagctgcatcatctaccactcaagcaaagatcatcgattctgttatttcttgtctttttggttacttagaggtgaatgaaatttgtgtatgtaactatgtattttggttttgcaggtttatttgctggagtggtctttgccagagctaaaatgtcataaaaagcgtattttccaagccggattgtgattgaggctaaagacaaataaaggcaaacaacaaacttgagagggttcttcatctgcagctaatagtttcaacttggaatacattttttactatacaatgtagaatgttgtaatatagatatgcagtcaaaagttgagttttggaaatttcaatatgcctaggcaaaaatacgctatcaaaaaggctggagaggattaatcgattttcatccgattgatttagaagtttatgctttggattatttcgtaaaaaatatcaaaacttgaatgattgatattatttttgttgacatcacttgaacgcaagtgtacctattgatgtccgtaaaaagctatcgttgatcgtactctctctgcatagaaacgtccaaaagtgtaaaaataataaaatactattgaagcattattttcacatctttccacatcatctagcagaagaaaaaaaaagtgacaatgagagtattatggtgagttcacgtgagaatatacagagatctgcgtgaatcccaaaagcttatcatggagacggtagatacacaagtccacttgacaatgagtgagcaaacaaaggaaagagatacgtgtccctctttcgggggttcacattaatgtttttggggttttttcctcacgatccgatgttttgaagtctacagatctaaagaaacgtatggaaattatgaatcgagaagggtttttggtttcttataaaataatctacacatacttctttaactcccacctcttttgttgcttttaatgcattttaatattaaatcaaaggggtaacaattatttattactacgcaatttatgcaactgccctgatatagtaatgtaattttgtgagacattgttgtgtaaaattctgatttcacactctgcatgtcgacaatcatgtacaggggacaaatgacacgcacaataaaaagatggttcaaacttgtatatagacaaaagtggacaatatcatttataaaccatccaccaaaatgctatgcacaaaccattgccaaatcctctctggctctctctctataaagataaggtttagttcttttaaaaaaactaattgacaaatggttttgttcacgaaagaacaagtccgagtatgttaaaaaaaaaaattaatcaaaactcgaaatatgtgcatatataaactaaagtctttggttcacaaaaacaaaaaaaagtttgccacatgacatgagttttgtataggcaaaaaacacactgtacatacacaaattgttgtgactctttattcatgtggtgttgttctgttgcgatggagcgtcgagaggaaaacacgtttcatcaccaccggtgttccagaggaaatgtgcgtagtttgcggagtagactgagtttgttggatcagcggagatcgcttctaagtaggtttcctccgctctccaaatatcgtttctcgctctccacagaaacgtcgcatatttgttcaatgcctctgcgtccgctggctctgcttttgctgctctcttgaaatacttttccgctctgttttcaccaaacaaaccaaaagaagccacgttagatatagacatagagtagagataagatatggattgaataaggccaaaagggtaagtgagaaaacgtaagtgaattgggttttggtttatagaatgtgacagatgtatcaaatgaggaactgtctaaaatggaaccgcttagctaaaatgtcaaaatattatcaagagactgatcaccaaaatatctaaaacactgttttacccattttagagaattgttacctaacaacactattggtggatgaagaaataatgtaacattggtctaaagactcaagcttcaaaattacaccacatactccactgtcaagtatcatcaaccaagcttatttttttctttgttgggaacccacccccaaaaaagactctggctaaaagacaaactctttgggaaagagaactatcaatccctatagtgagtgacaacatttttaaattattccctattttattctgaaaatggaagatgtagatattcacttactagttggcttctttctcttaaggggtaaagagaactggttcactcaatttaaagcctatccgattggttcttatggtgatttgattatgacaatttctagcttaaaatatctctatggctccctaatttgcaataaaatatctaccattccacggctacttctgacagttagtatcaacttgcaagactccaacctaaacaccaaaccgaatctaaaactccataatctaacttagtataataaaagaacaaaatcaaagataacatgattagtagtaaattataatataatggtcagatgttaattacctgtcgtagtcatgaatgataaggtagagaaactgtgcgtaattagcaagaaggagaacgtttccaggctcctgagacaatcccgtttggtaaagaagctctgtcttgaagtaatccatggattcttctgcttctaatcgagcttccaccggagaaaccatccccttcatcgtctcgtgatccaacgtttccattttcgcagtttcctccaatatcgaattccacagtctgatctcttcttgccctgacacagatacatctgaatccgcacttgttgcacccagagacgatgatgagaattgagattttctaaactgatcagatccatcaccatctgttccgctttgtaccggcggtggtatattgttcccgccgccaccaccgacaaaagatgttttcccgtaaggagaagaaacagagaacgtcttaaccattgaagaatcgaatttctgattcgtttcttgagtttcacttatctccgccgtcgtttcgaagctgaaagagagggttgtcgggggacttacggcggcggctaaagcagagttgctctcaatagagtaaaccgtgaaattagcgagaaggatcataacagagaccatcaaagtaggagtagcagagaaaacttgttgaaacaaccaaacgaacgacgcttgcatttcttttctcacacgatgaagaattc

SEQ ID NO: 1114 - DNA, 120965 bp, Arabidopsis thaliana
aagctttttcatcaccatctacgatctgcctctttctcttctgctgatctgtgttgaatctgtttcgatacttctcgtttgttgttgttatttcttggattcgattctctttgtttatagatcgtttggaatttctgatcggtggtgtaaagttttatcgatttaggagaacaaagttttacagtgcaatcgtattgttttttttcttcatgccagctgatgataaactataggatcgatctggttctgagatttttgtactgttcagtggattgttgattatatcttttgatgtatgtgatattaattatcgatttgattgggtaatccaagttgtggaaactctaggattgtttgctgtatatctcctcaattgctgatttgtttgaatttagctcgcttagctcagatgatagggcaccacaatttttgtggtagaaatcggcttgactctctttttctgccaacaaaaacaaaaaatagtctgagtcaaaccattgtagcagtacctaaaatctcgtttgtgaaccgttgtagcactacccaagtcaccggaaaggtaaaacaatgaagccgtgggattaaaccttcacagatctgtgttaccaaaccctcctcttcgtcgttcagtccgccaaaccaagccgacgagaaaggttgcgggaaaaggtacgtcgcagcttctcgtgtttgtggtggtgtgttgctaagaatattgaaccagaaattaaaccaatttaaaccaagagaccttacgtgtatttcagtattgaattgataaaacccaaacttaataatcgaagatgggattgcgttatacatttcagacaacaaagtgattttaactcaaggcattgatggtggagtgaatgtcgattacttccagaagatcgagtcttggcctttctgattcacagtattcaacattaacgtgtgaatgtattcacagggttctatgataatgattgtgaagattcttgtgaaccttgattatgtagtgtcctagtgtcttctattccatcagttgcacatgagagtttaccaaaactttgaagattatgttgtgggcagaaaataaaccaactgataaaaagccttttgtggtactttaacattaagagaattcaaagcctagttataggaaataaattataaaagcatgaaagatattgttttctttgcaagtttggtctgaaagagtgtattttaaatgggcttactgtgggtagttattgcagaaacgctgaatttaaatgggcttactgtggcccaatagatagatactgtgagtctgtgatgagcgggttatttgtgggtgggcattggtttatagaaacgacgttgtgttcaagttactaaatcgcgtgtgttttttacttttctgcaactaaatcgtgtttcttcctaagaaccctaaatctgaactgtctcatcttctccgatatcagtgagatcaataaatcatcttctcaccctagacgacagggaaactcggggattgattcggaaaaacgagttcgtttttctgcaaggtacttttcttacgaaacaaatcgtaattgattcacaggttctgaatcttctagttaagagtaatgttgtctacactcactgattgcagcaactgattcaagtttttcaaagtagtagatgatctcaatctaaatcggtttttgatagtttatgcttgtggaatttgatggttttgaatcttttgatcttgcatctaaagtagtttttcaaactttacttatttatgccaatgggtttctattttgatttcggatttttttgtgggctgggtttttggtggacaagtttatgattatctggaattgggctagttaaaatagcccagattaacagccctagatataccgtagggtattttcgtaaatttagtttatagatttttgtttgttacggtggtctttcccgcaccataacacttccactaactccgtcgtcgtcccgccggtttcacagcttgttagtgactcagcaagacgtcgaccgaacttggtcgccgccatctctctttatttttacgtggttcgcacaaaattaagccacgtgttgatgtcgttaattcctcacacaactcacttcgctttctctatcaacattcatctttctgctacttctcgaacctcctctcttctccgatcatcttctccttactttaccttagctcgctctctctgttttaactcctctatcagatttttatcctcagatatgccaaagaagcaggtttggaactttcatcgagttttccttaatctgggttaatatagcgattgccaaatttatcgaattttaaatcctctgttatatgactctctcgaagatctgcactttctgggttttgattgctttgttcacaatgtgttagtttgtggtgcagtgttatgactttggacttttgattatctggaaacgaatttgaattttgcatcttaaaaaattgaaactttatatcttgaagtcttggtttgtgagagtttcttgttgcttttgggtgtatacaggacttgactattttttgtttttgttggcagaaaaagagagatcacgctgagcagaagtggcaagtaaaaccgaagatggatgctccatttgaatccggtgatagttcggcaacagttgttgcagaagcagtaaacaaccaatttggcgggttaagtcttaaggaaagcaacactaatgcgccagtcttaccgagtcaaactacaagtaaccaccgtgttcaaaatctagtatggaaacctaagtcatatggaacagttagtggatcatcttcggcaacagaagttggtaaaacatcggctgtctcacagataggttcttctggagatacaaaagttggtctcaatctgagcaaaattttcggaggtaatttgttggaaaaattttcggtggacaaatcgacttattgtcatgctcagatcagagccactttctatccaaaatttgagaacgaaaagactgaccaagaggtatactctatggtgctctttctgtgattacttgtcatttgtagcccttattgctagtttgccttatttcatgttgcactatcttgattttggcagataagaacaagaatgattgagatggtatctaaaggattggcaacactggaggtatcactaacaaatatacactctatatgtgtatcctttttattgacactagttttaatcgtctactgacctgttctaatgcaccttttacaggtatctcttaagcattcaggctctctctttatgtacgccggtcacaaggggggagcatatgcaaagaacagttttggtaatatgtaagctcatttattcttagcttcagttacaatttcctttattattgatgagctcttcacaaagaatctttagccaaaaccccaatgaataaacccaaactcgagctttagatttggtttacccttttcattcattttaacttagaacatagattatttctacattttagtttcatagttagttatgcccaaggagttttgttgcttgctgatgatcttgatgttacgtttatggataagattccacaccatataacagttgtacgacagatatatttcaaaaaacattttgatgaagcaaatgcattttactattctttttcatttctgatgttatgtaaatctttctggtgattgcaaactgagctgccgaccaatcggttttctcgtatgctaacccaatatttcatttacagttatactgcggttggtgtttttgttctttcacggatgttcagggaggcttggggaactaaggctccaaagaaagaagcagagttcaatgattttcttgaggtatttccatggacagaactttaagcaacccaaaatctcagttgctcgaggcgtaatcaattgacagaaaaagctagctcataatataagtcattttctctcagaaaaatcgcatgtgcatatctatggaactggtaaccgctgttcttggagatcatggtcaacgcccactggatgattatggtgagtctttttttgtttttaggatgttccttaattgtgaaagtcagataactctgttaaagctgttcagctaaaaggaaatgttgatttgcatcttgcagtggtagtgactgctgttaccgagttaggtaatgggaagccccagttctattcaacttccgaaataatttcattttgccggaaatggcgtctacccacaaatcatgtttggctgttttccacaaggtaacttaaccgctttctattcattgcttctatcatctttggtgttcttttgcttctatcatttttggtgttcttgcccatacttctctagctgaggttttgatatctttggacacattatcttaactatagtaagaatgtgctgatagaacctggttgatgcatttactggtccaaatccatagagtctcaacctttagaggtttttggtcctactaggaggaaatacatgcttatatgtttggatgcacacattgtccatagaagtttttattagacagcttgtcgtgaggaaaatgaaagttttaacaaaggtggttgcgtgtattttgttaaaaacaattatgaaggaaatcagtgacctcttttttcgcggcgtttgatgcactgtgtgaagaagggatagcaacctcggtctgtagagctcttgatgaagtagctgatatatcagtcccaggtaaagtctttcttatttttgtattcacttttgctttttggaggattcatattagttattcatagaactgaacttgattaaattcattcgacgaattatttcttggacgaaaataagcagcctcaaaggaccatgttaaggtgcagggtgagatattagagggtcttgttgctcgtatcgtgagcagtcagagctcaagagatatggaaaatgtcttgagagatcatcctccaccaccctgtgatggaggtgcactatttatcatattttaattttacttaagttttcatgataatccactctatcaagtccgtgtagaataaaaaatgttttccctggattttaaaatttcagctaatcttgatctgggactcagtctaagagagatatgtgctgcccatagatctaacgagaaacaggttctaaaagaaatttaaatatgacaagctttataaagtggaatttttatgctgccatctcttgataaagatttctcattctagagggtccttttcccttgtttgtggtgctatagcaaatgagagcacttttaaggagtgttgggccaagcttttgccccagtgacgtggaatggttcggagatgaatctcatccgaaaagtgctgacaaatctgttataacaaaattcctgcaatctcagcctgcagattattcaactagtaaattacaggtaaattgagatctgtgtcttcgttgatttcgaatcgctgaagttatttgttatgtatatatctttcacttgcagtgttctctcatgtggtaatatttaccagtttctattatttatgtgtttttgacgagcaactgattttcttttttaataggaaatggtacgcttgatgaaggaaaaacgtcttccagccgcattcaagtgttaccataattttcatagagctgaggacatatcacctgataaccttttttataaattggttgtccatgtgcacagcgattcaggatttaggcgttaccacaaagagatgaggttatctttaaacacgtcttagttacttatgtctttcagtttgaccaaactacgaaagtattgatttctgtttactgaaccatattaattaccgtgtttcaggcacatgcctagtttgtggcctttatatcgaggtaaatgcttttacttgtttcttattctataactttgctttcaaattccatgttaatgcaccatttctgattcatttgttagagttcaataattttgtctctactttgcacagttcctagtctttgtgaaataactttgttaggaaatcaaattttcttggatgtttcagatttggttgttgtggtagcatgctatggaccattgccatctgtttttcgtctaactatattagttagtgatcttcttttttcttttcaggtttctttgttgatattaatttgttcaagtcaaacaaagggagggatctgatggctctgaaaagcattgataatgccagtgaaaatgatggtcgaggagaaaaggatggtttggctgatgatgatgctaacttaatgattaaaatgaagtttctcacatacaaggtaattttaggatggaaggtcttctggctagagggatttgtaatttgttgcaatttcctggctctttcgttgcattatcatcctgatgttggacatgtcttcattttttttacagttgagaacctttttgatccgtaatggcctatcaattctatttaaagacggggcagcagcttacaaaacttactaccttaggtgagctgctttctccctatgaatatatacatatagagtgatgtgtcaaatgttatagtgatgttttgcattgcattgtaaaacaaaacgtggagactagttgttgcatactcattatgttttgattatgtaggagctgacgtggtcaagctttaatttgatttttttctaatatcattgttgtttctgcatccaggcaaatgaaaatctggggtacgtcagatggaaagcagaaagaactttgcaagatgcttgatgaatggtaccaaaatcacactactctacacatgtagactaagcttatacaattttgtggaaacttatttcctgagcaaatgtgtaacctactgcctagataatttttcatctttttgaatctggattagcatctcatcttctcttctcttcactacgtgcagggctgcttacataagaagaaagtgtgggaatgatcagctatcttcatcaacatacttaagtgaagctgagccattcctggagcagtacgcgaaacggagcccaaagaaccatattttgatagggtctgctgggaacctagttagaactgaggacttcttggccattgttgacggtgatctagatgaagaaggcgatcttgtgaagaaacaaggagtgacaccagctactcctgagccagctgtgaaggaagctgtccaaaaggatgaggggttaattgtattctttccaggtattcattgttatatattatttcatgtattctggttgttggttttagttcatttttgtggcagtgtcttatattgaacttatggatggtagtggttatcagcttgtaattgttttagtcattcagataataaaacattagtaaaaaatcaagttttttacttctgaccagaagtgagagcaacacattgttttagagtgactggtggtatatttttctgtatatgtcgtttgctttgacatctcctttaatctcttttcttctgatttctacaatattaatgttttctcaggaattcctggatctgctaaatctgcactttgcaaggagttattgaacgccccaggaggctttggagatgataggccagtgcatactctgatgggtgatcttgtcaaaggtattttagaatgtaggttttttttgggtcaaaactgctctggtctctcaatttgctatgccatctcatgcaatattctacatacgggacaggaaaatattggccaaaggttgctgatgaacgtcgtaaaaaaccacaatcgattatgttggctgacaaaaatgccccaaatgaagatgtctggagacaggtaattaatcctacgttgagaatctgttacaaccttacattaagtagaaatgagtattaggcttataagattctctgcctctcctcgtgcatttagaatagctctacgcatgggtcctttaagagtggctttggcttacaagtctcatttcaatcttattctcgtatttccctattagattgaagatatgtgtcggagaactagggcttctgcagttccaatcgttgctgattctgaaggtatgtaactatgcatccattctttgatgtatttcagttaacaatcttcttttctgctgtttatacggtcatcttcaattgattccatactatttgaccttcaattgatatgatgaccctgtgaacgttatgattatgaaaggttgaaggatgaattatcttttactgaatttgctcccgttttattcatgtataaatataaggttgatactcgattttctgcatatagtcggaagtttatacttcgcttaaaaacacaaagagttgttctgctttattttctcaattactgccttgcgtcatcctctgtattctttgtgatcttttgcattatatttacttttgcccctctatgaatgcacaggaaccgatacaaatccatattcacttgatgccttggctgtattcatgttccgtgtacttcaacgagttaaccatccggtatacagttgcctcttatacacagttcaacttcaactgcatcatccaactttcatcacaaccctacatctttaacaaactatcttttcttcatgtgcaataaatatttagggaaagctcgacaaggaatcttcaaatgcaggttatgtgctattgatgttttatcacctttatgagggaaaggtattatcacatactccacaacttattcttttaagtaaatctatgatttgatctaactgaactttctttaaattttagaaccgtaatgaatttgagagtgaattgattgagcgctttggctccctcatcaagatgccactattgaaatcagacaggtatacagttgacatcacatgcgagctaacaaactcgaacttagcacagctacaaattgcaacttcatatttaattggttcataagcaatttaattgtcttctctttgtgcatatacaggactcctttacctgatcctgttaaatcagttcttgaggagggcattgatttgttcaatctccatagtagaagacatgggaggtgggtaccaacactaccattttaaatgacttgaaaagttgaatttatgtcaaaccgaagtattttgagcatcgtatgccaaaacttgttcatcgtgttatatattaaacaacaccttctgttctgacgataaaaaatgaaaggcaatagtaataatttagcaaaaactaacaagacatcggatttatttatcctgtgactagatgtacttggatcatgtaactggagaaatcctacacatgagtgtgctcacaggcgtttttatttcttgttctggctgttctctacttcattcttttagctctagctcctgttggttgcttctgacctgttttccttctgatttttcttgttgtagactcgagtcaacaaaaggaacatatgcagcggaatggaccaaatgggagaaacaactacgagatactctagttgcaaattctgagtatctcagttctattcaggtaaaaaattcctttgtcattgatggctcatgaaaagcaagaaatctgcgattgaattttaaactgcttcaatgttccttcagtacatggtaaaagagtataagaagaaggatgtacatatgatgtctttgttttctggtttgcaactttcaggttccatttgagtctatggttcatcaagtgcgagaagagctaaaaacaatagcgaagggtgattacaagccaccaagttcggagaaaagaaaacacgggtctattgttttcgctgccatcaacttgcctgctactcaagttcacagtcttcttgaaaaggtaaccaaccaatttcttatactatcatataaaaaaacaaaaggaatattgagacaagaactcttcaactgccgaaaactaaaggttaagtatgggctttgttattaattaatagatgttattcttatcagttggctgcagcaaacccaacaatgagatcttttctagagggaaagaaaaagagcatacaggaaaaacttgaacggtctcacgtgacgctcgcccacaagagaagccatggcgtagcaactgtagccagctatagtcagcacttgaacagagaggtacccgtagagctcaccgagctcatctacaacgacaagatggctgctctaacagcccatgttggatctgtggacggagagaccgtagtctccaagaacgaatggccacatgttacattgtggacagcggaaggcgttactgcgaaagaggccaacacgttacctcagctttacttagaaggaaaggcgagccgcttggtgatagatcctccggtgtcaatctcaggtcctctggagtttttctgaatacttgattaaacatggaagtttctctcttgagggaggttgctcgtggaatgggacacatatggttgttataataaaccatttccattgtcatgagattttgaggttaatatatactttacttgttcattattttatttggtgtttgaataaatgatataaatggctcttgataatctgcattcattgagatatcaaatatttactctagagaagagtgtcatatagattgatggtccacaatcaatgaaatttttgggagacgaacatgtataaccatttgcttgaataaccttaattaaaaggtgtgattaaatgatgtttgtaacatgtagtactaaacattcataaaacacaaccaacccaagaggtattgagtattcacggctaaacaggggcataatggtaatttaaagaatgatattattttatgttaaaccctaacattggtttcggattcaacgctataaataaaaccactctcgttgctgattccatttatcgttcttattgaccctagccgctacacacttttctgcgatatctctgaggtaagcgttaacgtacccttagatcgttctttttctttttcgtctgctgatcgttgctcatattatttcgatgattgttggattcgatgctctttgttgattgatcgttctgaaaattctgatctgttgtttagattttatcgattgttaatatcaacgtttcactgcttctaaacgataatttattcatgaaactattttcccattctgatcgatcttgttttgagattttaatttgttcgattgattgttggttggtggatctatatacgagtgaacttgttgatttgcgtatttaagatgtatgtcgatttgaattgtgattgggtaattctggagtagcataacaaatccagtgttccctttttctaagggtaattctcggattgtttgctttatatctcttgaaattgccgatttgattgaatttagctcgcttagctcagatgatagagcaccacaatttttgtggtagaaatcggtttgactccgatagcggctttttactatgattgttttgtgttaaagatgattttcataatggttatatatgtctactgtttttattgattcaatatttgattgttcttttttttgcagatttgttgacagtctctaaccatgggtaaagagaagtttcacatcaacattgtggtcattggccacgtcgattctggaaagtcgaccaccactgggcacttgatctacaagttgggtggtattgacaagcgtgtcattgagaggttcgagaaggaggctgctgagatgaacaagaggtccttcaagtacgcatgggttttggacaaacttaaggctgagcgtgagcgtggtatcaccattgacattgctctctggaagttcgagaccaccaagtactactgcactgtcattgatgctcctggccatcgtgatttcatcaagaacatgatcactggtacctcccaggctgattgtgctgtccttatcattgactccaccactggtggttttgaggctggtatctccaaggatggtcagacccgtgagcacgctctacttgctttcacccttggtgtcaagcagatgatctgctgttgtaacaaggtaaccatatctttcatctgttatgtgactacacattgcttctctttttgtgttctgtctcattaattgcggtttgttacatgttgtttgtagatggatgccactacccccaagtactccaaggccaggtacgatgaaatcatcaaggaggtgtcttcctacttgaagaaggttggttacaaccccgacaaaatcccatttgtgcccatctctggatttgagggtgacaacatgattgagaggtccaccaaccttgactggtacaagggaccaactctccttgaggctcttgaccagatcaacgagcccaagaggccgtcagacaagccccttcgtctcccacttcaggatgtctacaagattggtggtattggaacggtgccagtgggacgtgttgagactggtatgatcaagcctggtatggttgtgacctttgctcccacaggattgaccactgaggtcaagtctgttgagatgcaccacgagtctcttcttgaggcacttccaggtgacaacgttgggttcaatgttaagaatgttgctgtcaaggatcttaagagagggtacgtcgcatccaactccaaggatgaccctgccaagggtgctgctaacttcacctcccaggtcatcatcatgaaccaccctggtcagattggtaacggttacgccccagtcctggattgccacacctctcacattgcagtcaagttctctgagatcttgaccaagattgacaggcgttctggtaaggagattgagaaggagcccaagttcttgaagaatggtgatgctggtatggtgaagatgactccaaccaagcccatggttgtggagaccttctctgagtacccaccacttggacgtttcgctgtgagggacatgaggcagactgttgcagtcggtgttatcaagagtgttgacaagaaggacccaaccggagccaaggttaccaaggctgccgtcaagaagggtgcgaagtgaaccatcctcaaaactctatctgccgcaggtgaatcaaaggacagtgttagttttattacaatagtttggtatttggtcgcgtgtctgtgttcttgtttcgttttctccccgtcagagcgttgttctcgtaattgggttcttgatcggaggtggcggatctacacacacattcttcctgttttttgctttttatttgttttctcattttgaactgttttaaaatttctgttatatgaatgaatgttttccctgcggttattatcttctttactctaattttctcttgttgcgtaaatcgtttccgaaatctttttacctctcttctctattgtcataattaatcgctgctttcaatttaaactttttgaaagctaaaataaaagttttatggtttcaaatactcaccgttaccgttctgtccgcaacacgtgtattcaatttgttgctgggctgtaatgatcggcccaaatcaatctaattttttatttatttttacatgtccaatataaggcttaatagataaattggacttggttaaggtccattatagatgccactgtggtaccattagccttgcattgttttttttgtttttacatgcccaatataaggcttaatagataaattgaacttggtttaaggtccattatagtccaatataaggcttaatagataaactggaattacatgagagtagtggtatcataccaaaattcatgattttgcatcattattttctggcattggatgatgatgaatatataaatatttcgcttatgaaatagaaagccttgctcaaataatgaagcacatgagttggacttaaagccaaaaataaggcgagatgtttttttttttgttaaagggtttaataaggcgagatgttaccagtgtatttgaagcaaatcaatgtaatcagttgtacacaggcaggagatatatagcgatcagatacataaaatatatgtataaatacgtactttttgctagtgctctctaccagcgttttcattatgaagtctaattttttttttttttttttttttaactgatttgttctgatttataaatcttcgtatgatcgtatctaaagagaacatgctcccgtgagtcgttgacgttaagtatggggggagacattaccggaacgaaaattagtaaaacaggcggccagacataagggtaaaattgtcattacgctaaggagattatcttaaaccctaacttttttccgcttcaccactataaatacaaacttgtttacccttccaatttatttctctacttgtccacttttctacagccgcatcatccttctcccttgtgcgatatcgtttgcgtgaggttagcttttcatacgattcttcgatttgaattcttattcttccgatcgatttggtagattcaatttcgtcccgttgtcgtttgcttcttcttaatcacttctatgcttctttacatgtaactctctgatttgttgataggatcgtttagattctttgattccatggctttgaacttatcgattgaggaaattaacgttctgtagtgcaatcgaactggctttccttttattatttcaaattcagatcatgtaatctgtcgatctagttctttgaattttctgttgtgcgattgattgtttgttagatccatatgtgtaaggttaaattgatctattggtataatacatacgtttctagttatcaaattgatttgtgattgggtaattctggagcagcataaaaaatccattgtttctttccttcttgaatctaagtcgtggaaactctaggattgtttgctgtatatctcttgaaattgcttgtttgattgaatttagctcgcttagctcagatgatagagcaccacaattttgtggtagaaatcggtttgaatccgatagcggcttttaacaatgattgttttttgtgttcatatgtctactgtttttattgattcaatatttgattgttcttttttttgcagatttgtctgaaaagtagctaaccatgggtaaagagaagtttcacatcaacattgtggtcattggccacgtcgattctggaaagtcgacaaccactggacacttgatctacaagttgggtggtattgacaagcgtgtgatcgagaggttcgagaaggaggctgctgagatgaacaagaggtccttcaagtacgcatgggtgttggacaaacttaaggctgagcgtgagcgtggtatcaccattgacattgctctctggaagttcgagaccaccaagtactactgcactgtcattgatgctcctggtcatcgtgatttcatcaagaacatgatcactggtacctcccaggctgattgtgctgtccttatcattgactccaccactggtggttttgaggctggtatctccaaggatggtcagacccgtgagcacgctctccttgctttcacccttggtgtcaagcagatgatctgctgttgtaacaaggtaacaaaagcttcttttatctcttatgtgattattgcttcaaattgtttgtgttcagtctcattaattggatttttctttcatgttgtttgtagatggatgccactacccccaagtactccaaggccaggtacgatgaaatcatcaaggaggtgtcttcctacttgaagaaggttggttacaaccccgacaaaatcccatttgtgcccatctctggatttgagggtgacaacatgattgagaggtccaccaaccttgactggtacaagggaccaactctccttgaggctcttgaccagatcaacgagcccaagaggccgtcagacaagccccttcgtctcccacttcaggatgtctacaagattggtggtattggaacggtgccagtgggacgtgttgagactggtatgatcaagcctggtatggttgtgacctttgctcccacaggattgaccactgaggtcaagtctgttgagatgcaccacgagtctcttcttgaggcacttccaggtgacaacgttgggttcaatgttaagaatgttgccgtgaaggatcttaagagagggtacgtcgcctccaactccaaggatgaccctgccaagggtgctgctaacttcacctcccaggtcatcatcatgaaccaccctggtcagattggtaacggttacgccccagtcttggattgccacacctctcacattgcagtcaagttctctgagatcttgaccaagattgacaggcgttctggtaaggagattgagaaggagcccaaattcttgaagaatggtgatgctggtatggtgaagatgactccaaccaagcccatggttgtggagaccttctctgagtacccaccacttggacgtttcgctgttagggacatgaggcagactgttgcagtcggtgttatcaagagtgttgacaagaaggacccaaccggagccaaggttaccaaggctgcagttaagaagggtgcaaagtgaactcgaatcctcaaaactctatccgcagatgaatcaaaaaacaatattagtttctttactttagtttggtatttggtcgcgtgttatagcttcgtttcttctccatcggaactctgttcccggaactgggttcttgatcggaggtggcggagctactttgcacctattttgcttttgaattgttatcaattttgaacctatttggagattcggttatatgatgtgattttccgaggatattctctctttttttgttgcgtgtatcacattcgaattcagtctcttggataacttgtggaaaaacttataacttcaagaaaaaccttataaacacttacaacttcaacaaaatatcgtaactgccattgtagattgtttttactccgattcgcttgagcagcttgaaaacaaaagcaacgcataccactttgaagaaaaacgtagctagtacatacatatattttacaatgtaaaaagtaaacaacacatttatagatcttttgtttatcaaacgtcaagtcaaacaaattcgatcttattgatccagctatagtcataaattcattatgatccgccccgtgagttaagttatgcaaaacactgaatccgacccacacaaatcatcatgaaaccaaggagttgtcttatattaaccgaaccaacaagctttaaaacttttcttgcacacgaccaatggccaatttccatctataaatcatccgatcaaccatattacgattatgtcaaagatcaagtgtcttcctcttcaccgagggattcaagtttaaccattattgacatatagagttcagtactgtaaatatagactatactatctcggtttaacaaaaaatgtcattatatcttaatctttggttttacaaagagtatcgttttgtatttcccatgatgcatatcattaaactaaaacattttcttttattccaattatttcagtttattaataaaagaagaaaagaatatttttagtgtatttgtagaggataagagaaatttaaacagtttacttaatttgtgtaacatatgttgtagagaatatgttaattttgaatatacgaatcattgagttagtaaagcatcatgaattgtaaatataaatgtattcaactctctatctacactgagttacattaaattttacaattttcccatgtatgtaaatatttatgatatacctaactatgtattagtgcatttgttttattttaaatgatatttaaggtttttacacatagatttagtaattattattactatttaattttttgtgcacatgatttcgaaatgatttattgttatgttcttatattaaaatatttttgtctacttataaataattcaatcaataaaaacatacaagagtatttaaaacattactcacgataaacagagaaaaggtatatataagatactattttaaatagtgagttaatagataactaatataatcagccaattacaagtgaaagaagaattttgtataaacctcgaaattgataggtaatgaatcaaaatatgacgccaaaaaaatttataaatgaaaatgtaatagttttgggcctttggtttaaaatgaataaatatcaccaaattatgggctatagtattgggctctatcaaagtacaattaatatttttggtctaaatttaaaatatcgagcccaaggttttcaacaaagtgcgttattatcaggacactatagtgaaacaaaatccactcgcatcaatcgcgcgtagagcgcgttcagcgaaaatgcgtggtctaataacccaccaaaaccgctgtttttaattaaaatccctttcctcgaaaaatcccgcgcgtgaccatattgctttggttctcttgtccccatatttatcgcattattaaaattttaaaaatggattacttaccagctgacaaaaaaatgatttacgcgttgctctaagttattgaaactagcgtatagccgtatactatataattaaaaaaaaaatagaggatttaacattaaaacgtatgcaaatcttttcaatgtaaacctttaatgagtcacttatgtctttctttttttaacattttctttatgatttatgaatcaggttgaaacaatattgttagggtgtaaagcttcagttattaaaatggttcacggtaattgaaaaaaaaagaaagaaaagccatcatcttgtcctctccatagccaggtatagagacccgagttgagtaccttcatatcgacaagattactcaagcttctgcaatctacttcaaatttgatgtttgcatatatatcttcttccccaacagcttcgcattgccgttatttaaacttgaaatttgctttgttccttacatctatttcaaagaatcaacgaataaaatcatctcaaaagccttctctttgactgcatttttttgctaaatctcttcgactgtattaactttaaatattacagccaaaatcaaagaaataacattagcctttataaactgatatagacttgtttctccaatgttgtttaaagttctagattacaattttaccatgtaagaaacttcagaggctgatcgttgaattttagagaagaaaaacagacttaagttgataagataagataatatccgcaggaatgacacaaatatcatataaccgaatatccaaaaaggttcaaaatcataacacaaaacaaaagaaataaacaggaagctcgagtgccaagtacctccgccacctccgatcaagaacccaattccgagaattgagctccgacggagaataaacgaagcggtaacacaaacaaccaaccaaataccaaactactaaagtaaagaaactaaaatagtccttcatttcatcagcggaaagagttttgatgttcagagttcacttggcacccttcttgactgcagccttggtaaccttggctccagttgggtccttcttgtcaacactcttgataacaccgactgcaacagtctgcctcatgtccctcacagcgaaacgtccaagtggtgggtactcagagaaggtctccacaaccatgggcttggttggagtcatcttcaccataccagcatcaccattcttcaagaatttaggctccttctcaatctccttaccagaacgcctgtcaatcttggtcaagatctcagagaacttgactgcaatgtgagaggtgtggcaatccaggactggggcgtaaccgttaccaatctgaccagggtggttcatgatgatgacctgggaggtgaagttagcagcacccttggcagggtcatccttggagttggatgcgacgtaccctctcttaagatccttgacagcaacattcttaacattgaacccaacgttgtcacctggaagtgcctcaagaagagactcgtggtgcatctcaacagacttgacctcagtggtcaatcctgtgggagcaaaggtcacaaccataccaggcttgatcataccagtctcaacacgtcccactggcaccgttccaataccaccaatcttgtagacatcctgaagtgggagacgaaggggcttgtctgacggcctcttgggctcgttgatctggtcaagagcctcaaggagagttggtcccttgtaccagtcaaggttggtggacctctcaatcatgttgtcaccctcaaatccagagatgggcacaaatgggattttgtcggggttgtaaccaaccttcttcaagtaggaagacacctccttgatgatttcatcgtacctggccttggagtacttgggggtagtggcatccatctacaaacaacatgtaacaaaccgcaattaatgagacagaacacaaaaagagaagcaatgtgtagtcacataacagatgaaagatatggttaccttgttacaacagcagatcatctgcttgacaccaagggtgaaagcaagtagagcgtgctcacgggtctgaccatccttggagataccagcctcaaaaccaccagtggtggagtcaatgataaggacagcacaatcagcctgggaggtaccagtgatcatgttcttgatgaaatcacgatggccaggagcatcaatgacagtgcagtagtacttggtggtctcgaacttccagagagcaatgtcaatggtgataccacgctcacgctcagccttaagtttgtccaaaacccatgcgtacttgaaggacctcttgttcatctcagcagcctccttctcgaacctctcaatgacacgcttgtcaataccacccaacttgtagatcaagtgtccagtggtggtcgactttccagaatcgacgtggccaatgaccacaatgttgatgtgaaacttctctttacccatggttagagactgtcaaacaaatctgcaataaaaagaacaatcaaatattgaatcaagaaaaacagtagacttatgaacacaaaaaacaatcattgttaaaagccgctatcggattcaaaccgatttctaccacaaaaaatgtggtgctctatcaactgagctaagcgacctaaattcaatcaaaacagcaattctggagatatacagcaaacaatcctagagtttccacaacttggtatcaagaagaatgaatcaattgattgtttatgctgctccagaattacctaatcacaattcaaatcgacaattaatatcacatacatcaaaagatccaatcaacaatccattgaacaatacaaaaatttcagaaccagatcgatcatatagtttatcatcagctggcatgaagaaaaaaaacaatacgatggcactgtaaaactttgttctcctaaatcgataaaactttacaccacagatcagaaattccaaacgatctataaacaaagagaatcgaatccaagagattacaacaaacaaacgagaaggatcgaaacagattcaacacagatcaacagaagagaaagaagcagatcgaagatggtgacgaaaaagcttacctcagagatatcgcaagagagtaaagcggctagggtgacgaaaaatgaagcaaggaataaagctatgtttgggattcgagtttatttatagtggtgaatcgaaagaaataataagttagggtttaacataacatcgtttgccaaattacaaacgtacccctatcccgccgaatattctctttttctttgggccttgaagagtcggtcgcgtttcataaaagtccactaacctcgaggggtcgctcttgtttcataagtcaagctaatttgaatttgatagtttcaatccaaaagtggaatataattaaatttggttcaacgcgaattaaatcaagaaggttttacttggacgatatacactttgcaggttaagagaatgtaatttcacgtaattatcaaaacatacaagaggataacagcaaaaaaatcactaatgattgatgaaaacatcaaacgcttgttcatcagactggaacatttaagattgctaagtaatatgcgaattgagagaggaaatatgatcaatgtgggaaaggatagtccaaaacgttgtccatgacttcaaactgcatatccttcgatggccgtttcctctggtttatgaaccaattgttttatctgtttcctctggtgtctccaggcattctaatatcagatgtctagagtcaatctctgagcagaagagtaatagtgagactcgagctctttaagattggcagatgcatcatcagcaattctagccaacaatcgatttgtcttctcggcctcttgatcaaactcttctattctttgttctacatgatcgtttagtgatgcaaatcctgaaaatatcgctgtttgcttaagttctgatacgagtttcaaaagagaatcagctgcttgaacctgccaccattggtgaggaagtaagttaacaacactccagagactcataagaaaatctttcaacaacacttgagtggcctatgtaacttccctaatccatatgcctaaaagaaatcattcaacaaacacaatgaggacataagctaacaaaacaacccagttttgaaacaacagtaaaaattagattttggagaatcatgagtgaatgtttggtagactcaaaaacattccaaatatgtgtactttggcagagattcaaaacgtttcacatctgatttaaaccctgatttgcatgaacctattaaagaaatcattcgaattcaatggagtgaagtaattatttaccattctagaagctcgcatctccatcatgtatgtctcctgcgagttcttcaccggcggatcactcacctaccgaaaccaaacatgtttcgcctcaataaacactaatcttaaagccaatctaagagattgaaatttctgataaatcctaactttaaaaccggaaagaaaccacacttacccttgaaacattgacgatctgcgtgaagttatcgacgacagatgtgatgtcagtctccactctctgtaacaacgccttttgcttctgtaaagccgcggcggcggcggcggccgttggaccgcttcctccaccggatccgccaccggatccaccgcctttgttcataattatcgctggtcttttgcaaagaaacgaagaaagtaaaagaagctgatggctatgggaagaagatccacccaacaaaaaaaggagcatgatgttagtattgggcctaaagtaatgggcttacgtatttgtgttttaagttattattattaggggacttaactttctaaaaccaaacatgctttgacattcctctctttcttctgctctcggaattggtgttgcagaaggtaagcgattcagacacatctaagatttgatatccctactcttctatctgatccctccaatgaatcttgcttcaattctttcgtattagtttcagatcagatgaatagatcgtttctcttttgaaatgttttctcaaccaaatcctaatttcgtcccttgtaatcggtttggagttttgcctttgctagcaattgattagtaaaaccttgaaaggttttgaaagtttcattcttttaatgttattagttaaactcgggtttgcaacttcaatctatttaatcgtgtgttgtttcataatctttttgtcttagattttggtgtttcttatgctccctttcagtgcactgtgcattgatcctttgtagtttattattttggaaatagtgtggttaaatgcaattattttgcaaatttggaagaaaagttaacaggactggtgaagtatcaaaatttggggttttgctacgatgacgctaggtgctcggcttgttgctcccatgattatacttctcctttttataccgattgaattagttaaagcggaagtcattacactgacaccagaaaccttttctgacaaggtaatgatctgaagccctttttctctatatcccaagagtactttcatttgtgtgaactcaagtgttttactggaatcaggtagatttatatatgtgttctgtgctcctttgacgatgcgatattgaaaacggcttagctcgtttcaaagattgtttgcattgctcgtaagtgtaatttctgatctatttgagtagagagactcatatctcagcttagtttagttgtttgatgtccagctaacttagactatatctaccagaaatttaaatgtgttaggcgatctttcagattttacatactctatattggagcattttcaggatattatgtagttctcatagatactttggtcttgttttggagtttgataattagatcaatttgtaaagctagccctgtcgaataacaaagctcaacttcagaatggttgcatttcttggtgtagcttctacagtcttagttcagacacaacaagatgtttactctctccatgtttattgttggttcagataaaggagaaggatactgcgtggttcgtaaagttttgtgttccttggtgtaaacactggttagtatccttgtttcataaaattacctaacaacttagcagtttggcttgtttatcccttgttgataaactggatctgagtgtccagcaagaaactggggaatttgtgggaagacttgggaaaagcaatggagggagacgatgaaattgaggttggtgaagtagactgtggtactagcagagctgtttgcaccaaagttgaaattcactcgtatccaacatttatgctattttacaatggagaagaagtttcgaaatataaaggtaaacttgcttaggcacacacgaccaccacatgcatatttggactttttcaatcctttagtttagtaatgctataagtgatattttttcatacttgcatttgtgatttcaggaaaaagagacgttgaatcgctcaaggcttttgttgtagaggaaactgaaaaggcagcagaaaaagcacagcttgaagacaaggaactgtgatacaactagtcggtgattattagaacctgatacattgttccctttggttttcattttgcctatgcagttgtgtgactcttaccgttagttagataggcatggttttcagcacgatggaggagcatctttgggtttaaaggtttttcacaccactgttttgctaaaatattcagtttccattttattcagagtcagataagcaaagacgtaagtgtagttagtcgagatttcttacaagtttgtgttgtatgttcgttttaagagcagctgcagaccaaagttcttgctttaaaatttcatattcagtgaattgtcagaactaatacgcatgagtaaccttgagaaagagacagagtaatgcgaactttagcagtcttttgagaagtgaaaaaaaaaacatgattctactgttgcttctgttcccattattaatgtagatagagactcattaaacttcatgatcggcaaacaaaaatatcaatttcgaatgttttctgatgaatccatcttcagtgttgtactgtccatcaactgattcttaagtggttacaaaaaagcatccttaatatgtacttatcacaagaataagttgctatccaaagagaactaatttcactacttccttctaacaatggcaaaatgaagatggcatttcctaacaatgcacctccactatctcaagcaaatccagctttcttaatcgtcagtgtcggaatcaacaacttggaggatgttaagggctgaagaacccagattcatcccacgaacaacacctccgtatcccaccttgattctgtggcatatcaacaacatagagtcccatagcgctgttcttccctgttccatttccagtacacaagttcatcactaaccacaatcccttttcacatcctctgtatatgtaagctgttccatgcatattaaaaatgaacttaaatttgtcattacctgaagagtaaactgcactttcttatcccagtacaaggcaaatgtgggtgggctttgcttgtctactgcaagcacacatgcaccaggatgaagtgtcgaaggtacacccgataccacagcaatgtacttctctgggaatctctcttttggaggcagaacccctaagaataaagggttcttgctcgcctgagtccctgtataagagctagggtccaaatgtaacatccactttgggtgttccaagaaggcacaaaacaagtacagaagcagatgagaatcggttggaggctccaggctccatttcttgtttttctcacgagtatctgcccctccattgtactcatagttcttcacacaagttccttccgcgagtgctgccaaaagccaagagttataagagtcatgactaatcgactaaaattggaattggaattttttaaaatgtttgatacctcggattctttgcactgtgtaatctgctggaatactgctgcgcggaagtaggcccttaacccactctcctttcattaagccctgaagcctccgatgttcacttatagcatcaacacattcctgcatgacagggattagtgccgcttgctgttgctgttgttgttgctgttgctgaaactgctggttctctgtacgcagcttttctgcagatgccagaagaaagaattagcaactatatgaagacccaaacatttagcaacaacacataaatgacatgatatcattatttctctcagatatccaatcaattacaacattcttaaattcagtaatttattgagaaacatgaagtcttaagttgataacaatattttcaaaacaacagaacagcacttcaacttaacaatgacaaccattcggaccacatcacagtagaagctgtaggaatgttacttacgcatggaagcatcaatagcctgtacaagattagcgcgtaattggtgaagaagagcatcttcatcgagagagtaagatggctgccaccccttcgttcgatcaaccggtaaggcagttgtagcggttccatttgttggcaaatcacttccaacttgactaactgtgacattaacaccaagctttgatgctgtttgcattacctacacaaatgacaaagtttaaaatctctttcacagcaacatagggaaacaagaaattcttcttgtgcctctgattcggatgtggttatcaactcattcatcagcagacaagtataggaaggccagtgtttattttaaaaggactccagaaacaaacctgaatatgactggtttcaaccttgttaagcagaggtttgagcaacactgaggaacaccattgccttagtcggtcacgccagtcttctatctgaggatagacacctagatgaataaaaccttcgatagccctttctaaggacattgggttggggaaatcaccctctcctttctttgggggagtcgtaaatttctgagcgccaggagacatcctgacaggtcttagtggtgtactcctagtagccccagatgcaccagttgaaccaccaactgtactcgggctagccatggcaaaactcccaactgttggtggaggcgtacgcatcttcccagccgactcagtgattttctcatctatttctgccaaaagctgctcaagctgctcctcggtagttatgtcttttgcagaacttcgtctaccagaccaaggactagagacagccttatcctgacccgacgaaagacggttagaagaaactggtgagctagaagggacaagatacatagacggtgaacccatttgttttgagggagtgctaaatgaactaatctggcttccattacgggaattcagcttatcaccaccaccagaagacttatgagctgaaccagtaagagtttgatggtgtattgggacaagcggctccaatgactgtgcaggtttcaatgcaggacgactctttggaaattctgatacactctggtcagcttttttctttatcccaagaagttcaagctgacgatttgataaagaaaactgatctttggtttctttagagaaagatttagtttctcctcgagcagcaaactttgctctgtgcaaagatatgcctttggacaaagccatcattgctccaatacaaaacaaagtcaccagcccctgccacgcttttacagtgacatctgaaccacaaggtaagattttagatatattacgaaactaataaaacacaaaaggttaaaaaggaaatctctcaagaaaaaaatgcaactcacaagctgcctcttgggatattttcccgaatgttaaagcattggtcaaccatttctccctgtaacataagataaacaagcaaatgattatcatggtagatctttcccagattgagcaatcctaactcacagagaaagcaaatgataaagaataagaactaaggactcaagtcgagattttctagctaaccagaaatattccaaaacctagacaaatactccaacaatgcaactaagagggaatgtacgaagctcaagctaatgctggcaagtacccggccatgaaggagatgagagagaaagcggaagcgatagagagcaagaatatgaatagaagaacggatttcgaaggacggatgctgttggcggtggaagcggcggcgagagcagggttccggtacacagagaacttggagggcttcggagaaggggacgaaccctgagtagtgttgttaatcttcctcctcacatcagaatccatggcaggaaacgatttctcgagcaaaccaaagagaaggaaaagggttttagggatcgtcggattttcccggctgagagctgctctcagtcgctgcttctggtggacccaccctaatttttattcatacccatcatattatttgaatttttagttttacccccaaactcttattttggattatttattttataacagaattataaaatgtgtaaaaagaaaagaaaatgtggaaagttttttcaaattggtctagaagaatgattttaaaaacctttttttgataattggcttgttttactaatattataatttgattagtaagaataattatggtaaaaatattttctaaatattttctgaccaattgtcctataattataactagattttaactcagcggtacaccgcggaaacaatttattttttaatgttagtatatataaaagtttacaaattgtatctaactataaaatatttttattttatagtttacaattattattaagtaacgtcctgtcaaacccgtccagtaaaaaaaaccatttattttattaatgttgatcttatttatgatatgtttatgaatcattgtctaaatattttgtaattttgtctctgtttagttaatgtggagagattttggaaagattgttaaatgtcaaatatttaattcgaagattttctttctaattatcaaatacaaacatcaaaatccagtggcagccattgtaaataagtccaactacaaaatttatttcacaaaatggctgcaaaaatgtatatatagatactaaagaaagatattagaattccgacaactcttacaaattttaacttgaaacaagaaaaaaaatgtatacattctagaaatcaaatatgtgcaatctcagtagtggttaataagaaaggtgaagatcgggcggatggaacctatgaagtataaaccaggacagggacacaaatttgaatccaaatggttcagttcgattccaaccggatttatttcagcctgcatctgtcatgcctctttcccattcctccaacgcggcctctgctttaagtttctcgggaacactatctgcattcaagatattacaggtattaaaatgctgttcgtaaaccacatggaactcataaaacgaatacttcagaggttattaagtacctgcaaggaactcgtatctctggtcgttactcactacggatgctgccaacgagtagaaatgacagtgtcatcaattatgttaggagtgcaacaaatcttgcaagtgatacgaacggattaactcattatctaaactcttcctaagactaactactggcccttgtgcagaagccagaaatcctaagttcagcaattggtgcagcagcatgagattttcgacatgggattcagtattgaggtaaccagatattggcaaatagggacgagattagagcttacagaggtgtttgtagtggatgaatttctttttgtccttgacggaactatcataagcttcttcagaaaaccgctcaatgaacatctccttcaatcacaaaaaccagttaatgtactgtaaacgcaatgaacatcaatttcgatgaacacaagatgaaatcaaaagaaagaaaaaacaatgccaagttccaatacaggaaaattaaacactcatcacttaagctttgaaaatatgaacctaaatcatatataaggactttctcatgtgttaggtgtctacaagttctggatgtaaaagctaaacctatgacaatcaagcacagtaactacggtttcatcaaacacacatggagatgaagcaataacgttaattcccggcttaattaacagaaacaatctcattactgtagcaatttgcgagattataacgcccaattaacactgactagcaattgatactcccaaattcatcaaaaaccatgtgaaattaagttcctcaagctaaatttatatgtctaattagtactataccgtggctttgttgacaagaaatacagcatcctgcataatctgaggagcagaattatcgcttctcatgatccgccgaatccgattcatcggaaacttgatcttagcatcttccgcgcctccatcgtcctcttctcgatttttactcgtcttcgtcggaattcctacactctttccgttacccctcttgctcacgacgccgttacttttcttcgcctcatcgcctcttattgcttcttccacagagtcactgctcgatgattctgagatctcgtaaatctccggcttcttcttcacaatgttaaccttgttcgacgtcttcttcgttctggaaccggagctgcgtttactccgaccactcgctttattgacgacgacatcgctcctcgccttcttctccttgggtttctttgacgacaccattaattttttagaactacagtatgtttcaccctttcgcctgaataaatcgatggatatttacatgggcttatttgtttgagccttttaggcccatttatcatatgatcaatttaaggaatggacatggtgatgttgaggaatgaagatgcatgacgactacttcaaaataaattattggacatgctttcactgtttcgcatacacctcgtaaaacattgtatagtttatggagaaataaataaattagggtaaatgtacttgggataagataatgtttttatacaagcatccaaaatacattatcttgttcccgacataatgtaaagaaattttagggattagataaggaagaatgggtaatgttggagtatgagacagaagaggtgtccgcaagctggaaccaccacgtgttatcaacaacacgtgtgagtctccatgaactctctctgcaatatttaaacgtggcctagctcgtgttctttcaatctccaattattactctattaataagagaagacgagttttgctttcgatactgtctttcaactattccgacacaaccaaagcttctggaaacgttgtcgtttgttatcaataatggctgttgtagaagaaccgatactttcaagattggatcgtattgatttcatggtgaggaagttagaggagatgaaaggaagctcgcctagaagctcgagcccatcgactccatctagtgggactcagccatcgtcaatggatctgtcgtcaccgaggagcatagggaaggtacactgccgttcgatggaacaagtcagggaggagactgagcggaaaggaactttgctagagagacttaataatgtagaggagcaagtgcttaagctgtgttcacagtttgaggaagaagttgaagaagagaggaagagagaagataagacggataaggaaaagaagaccccgaagaagaagaagggattgaggaagctggttgataaagttgttggatcttcttctcccactaatatccattccaagagctggcgttgttgagtcattgtagtactttattacatcatcatgtatacttcaacgtaccacgtttaaatgaaagcttctcttcttttttctttgttgaagcgctagtggaaaaaaatatctttaggtctctcactctcttgtttgatcgtttgtttgttgaggttttttgttgtccagtatgcactttttaagtgaaaacaacaatgaattttcagtgtactttctatttttcagagtgcacttttcaagtgaaacaatgaaaatttgaaggaaaaacaagtacacacctataaatgattagaaaaacgaagatgtgtgtagtcatttccataaacgtaacgataaattctcagtggagatggttaaaataaaccgtaaatagttaaaatttaacaaatgcccaaggttttgtgtagaatagaacaatttaattttatatctgttctccgggttttcttgcttcccgatcaaattggggtgtcaacattttgatctaaaaatcagtgacatcatatatgagacttttcaacgtgtttttttttgtctaaaaaaatttcatcattctcttgtcaagtattatgtaaggttaacaaatctcctcataaattttttaaagatcgaaaattttctaaaaatatgtaaactttttttcgtctatggtttcttaaggtgtgaagaaaaagaggctgtttacggagttcactctgtttgacacttcaaccaacttttgtctttatatgtttttattctacaccattaaatcaaacttaagacaatcatatgcatttctttatccacaaaattgatttgcttattgtacttcatcatcccgttgtaaaatttataagcacaattttcgccaactatttattccgcaaattgaacagctgattttatttaaattaatgtgatctttatcacaacaaattcacaagtcacctgctgctggtgacgcaagtatccccctctctgttacaatatctcacgatcattcaattgtatccataaagatgatgtatgttactatcaccaccaccaccaccatcgtcatgaatcatgatcatcagacaacgactacgaaaaaatcataagtctacttttattagacacacaaatctgtgaaaatggcgatttagttaataataattcgctcaactttttcttaatcaatcaaaggaataaaataacaaataataataagaccattttttacttttccccttctttatgcaaaattcggcctcttaattttcaaaattttcgacctccgatctcccatctccgcttccatcatctttaggatctctcaatctctttcttcactgatcgattagggttttcgagctgaaatcgatactcctccaccgcgaagaagcgattacctagatttttcttctaggtttctggcggatctcgccaagttctccttattctcttcagctacggcgaaactttctctagctccactcctccctcgccaccatgttttggaagctcacatctctctctgcatcatctcctgtgagttgaatttttagatgtcgtgttgtatgttagcgttcatcttgtctacagatactgatatgctttagaattagattattggagtttctatccgttgctttgctttttcatataatttatgtcgaatttttggatttgctagatttcaattttttgaattattgtctctgagtcgtgaattgttcatgtattgatgttctttccttttgttatgagcgcaggtggagataatattagacaaagaaaatttcacgttggaagagcttcttgatgaggaagagattattcaagaatgcaaggctttgaatagcaggctcattaacttgtaagctttttttaatcatttataattggcttatattcctcattatctgtttcatagaaccagataaaccctatggtgtatgttgaatcctatgtctcctctatctgcggagttttagttaaggagtcccatatttccttcgtattttcttggatgactttattgattgggtattaatgtctgcagtctaagggataaagctcaagtggagcaattattgcggtacattgttgaagaacctccacaggatgctgatagtaaacgtgctttcaagtaatatgcttccttgattctaactggaattaccttgtcttaccatcctctccttttgccttttatccacttttcttttgaatggttctggatttcttttctctctaactaataatagtttcttctcttttaggtttccattcatctcttgtgaaatatttacatgtgaaattgatgttattctaaaaactttggtcgaggatgaagaggtatttttcattcatcctactaccttttcctcaaatagcagttcatacttttcacttttctgtgcatctggattatgtttattgttatcctagattctcatttgttcgaataattttatcttgcagctgatgaacttgcttttttcctttctggaaccaaatcgtcctcatagtgcattgctggcaggctatttcagcaaggtattctctcttacgatacataagtttacgtattagccaagttcctgtaattttcttttgttttgtttgtaccgatacatatgacttcatttcaaggctccgagaagtgattcttacttctctctgtttggtgtaggttgtcatttgccttatgatcagaaaaactgcagcgcttatgaattatgtaaaagtaagtaataacacatagttaaacggatggtaaactatatgagaaatatattatggaaactatttgaactgatttctaggattatccaggagtactgtagaatacgtcttattttctgttaactcttctattcagaattgatattaccttccattgtaatctcgcaagccagatgtccgtctatttagtaaattgttagtagatgagattgacatgactctattcttcaattgctggcaattatattgatgtgacagacaatttagttgaatttttttgttatttgttttgtattcagttctcaaagtaacttttgatgatcacaggggcatcaaaatgttttctgccagttagttgatttgattgggataacatccatcatggaggtaattggtttgacttagactcagtgcaacttggtgtggtttcagaggtcttttttgctatgatatttacgcgactttttctaggttttggttcgcttggttggggctgatgaccaagtctatcccaactttctggatgtgatgcaatggttggctgatagcaatttacttgaaatgatcgtggacaaacttaaaccatctgtaagtggttaagcttttctataatcatcccagagacaagaggctcttggttttctctttgatacttgtaggtggtgtaaatctaggatatctgatgatattactaatttcttctatcatcttcattctgatatgtttcttgcattacaacttgaatcagagtcctccggaggttcaggcaaatgcagcagaaacattatgtgcaatttctcggaatgcaccgtcagctttagctacgcagctctctagccctgggtttgtaatctttcttccatgatgattcctaatgctttgatagatgatacaaaagtgtttcacatggcagcacaactttttccctgtttttgcagctacgttgcaaagatatttggtcatgctcttgaagactcgcattcaaaatccggtctagttcattcactttcagtatgcacctctcttctggatccgaggagatctgctgtttcatcttctatgttcaattcttacagaggtcaacatatgttcgagtctcctgtcccagtttccccagaaactattggtgccatgctgcccaaactcagtaagttggatcctatgatgcaccatcgtcacatgaccatcaagattattaattttctggcttttttatttgttgcatgcacataatcttattgtgcacttggacaatagtcaatccttttcttatgtgatattactttccatttgcgaggatacctagagtatttagcatctatctggacgttctgtttgatcttccctgctctctatttggtctcttctattttggtttatattgataaatggaaactggttttacataattctggaatgcttacgtagcacatcttggatatgtatgatactgtctcatacaagtttttcaaatcaggttttatgcattcaatgaccttaagtaatatttttttttttttctgcagatgacttgcttatgcttctcactgtagcatctgatagcacagtattgcctacaacatatggtgaactgaggcctcctctcggaaagcatcgtctaaaggtcaggtccaaacatggagcattttatggaagacattgtcgtttttaggacaccaacagtgctcttaatatattgtatgtaaagtctctatacttaattagactcacttatcttattttctttgtttcagattgtggagttcattgcagttttgttgaaaactagaagtgaagctgcacaaaaggaattagtcagttcaggaacaatcaaaaggacccttgatctgtttttcgagtaggttttgctaaacttaaaattttgtgattaccgtgtgctatttctacgagatcttaaaaaatcaaatactctcgacatatgaaggtacccgtacaataatgctctgcatcatcaagtggagagtataatactttcttgtttggaaaacaagagcgatttgatggttaaccatattcttcgagactgcgatctgattggcaaattcctcttgtcggacagggactcaaacctcttaggtgatagccaggtattaccatttgctatgttcacaaaggtttaactgatcatcagcatatgaaagagtcatcttaatacagctccaagttagctccattgactcattgctccagcgttcattagctaaacaaatattctctggcattttctttttcttttgtgcgaggtagcccactgtagctgcctccgggaaaaaaaaacctcgtgtcgggtatgtcgggcatatcacaagaatatcaaataaaattggtcagttgagtaacagcaatggccagataaaggcataccttcaggttggtataaaaattatacgtgtcgtgttgtttttcttctgccgcttttttgtcacttcacacgcataaagaatgtaaaaccattagttgagtcttgtgatgaatggtcctagcactctgttggaatctaccatgtttgctgattgtgctttgttcattcccaaatctttaggaaaacagcgaatggaatgagtggcaaggtagtgttctgcaggaccgcaacacggttgaaaatgtcaacagatggggatgtgggtatgttaacctctactcacaaatcatctagtaaccatttaattggtcagtctgctacataatgctgattatggatgtaaaaattcatgtgtgatccttgttcctcttggacaaaaccctcaaagataattctgcattgatgactgatggtatcatagtcaaataatatttcttctcatgacgagaccactcagtaaatgcaccatgatctggtcccgggttttggattttatcttcactctttttggttataaaaattcctaaactaattgttacgtgtaggcgcccaactaccctacaagataggacaagagatagcgatgaggaagacagggattacgatgttgcagctctggccaataacttaagccaagcatttagatacaaaatatatggaaacgatgacaatgaagaggtatcttctcacactagtgctttttcttcaatttatgaatgatttcctgggtactgaatttatcgtctttgtatttctctcaggaccacaatgcccttgatagagacgatgatgtaagtcttgcaaaaattcttctctccgcttttttgaaaaatcaaggaaactatcaacatcttttatcacactatgatacgtatgggggatgtacgctaataagagtttgctattgaaaattggaatgtgtttatatactatacaggatgtttacttcgacgatgaatctgctgaagtagtaatttcatccttaagacttggggatgaccaaggaaggtgagtttatctttttattatctgttaatactggtgtcctcatgtccttgctttaaactacagttactgtatcttggtgattgaattatgtcatctctcttgaccaaaaaacgaatgatgacgtctctcaaaataatgacttgaatcttttttggtattttgccgcagcttgtttacaaattcgaattggttcacattccaagacgatagattcggcagcacaccctctgacacagcgggttcgaacacgatagacgtggaattgaataaaacctataatgccaacactagcagtagtgacgatgatgaagttgtggttggagaagaagacgatgatctaactggaaacccaaaagacaacgcgttgaacacaactgaaaccaactttcaaatggagagtccactggatttcttcgacttcaacacctcacagaaagctgaagaagcttttgctgaacagccacccgaatgggtcgggtggggagaaccatctgatatgcaagcgagtggcaccggtctgaacccatttatcgatgatgatgatgatgatgacagcaagcacataatgaacctcgacataccaatggctgaggtcaaatctgaatccatgattccaaacgggtcagaaagatcgttatttgagaaggacgtggaatttgtgggagtggaaccagaaggggcagagaaagcgatggagcaagcgatgaaagaagggatagtaggagaagctggagtgatgaagaagaacaaggagatggctgaggactcaaagccggaggaaagttcaggaggagtgaaagagttcaacgataacaactactggaaagtggatcaagaagttggagtgttggaatgaaaaagtcgttaccttgtacagtgtcattttgtgtgagagtatgatacaaaacttgttattagttaaaatttggtgcaagggtctctctctctttggcatgtatctttttctcttttatcattaggcttctgttgttgtcagctagaggaagttgtctgtgcttatttactttgcctaccacgaagttgtccgttttaaagtatatttggactcttttgagtttagtttcgcttgacaaacatcaaatcatatagtaaacctaaagggtgacaaagtcaataaatgaatttgaagctattcacttcttttgaactaatataaaatattaagacagacgaaaaatagaagattatgggattgaagcaaagaagcaaaaaagcaaacattggctttcacctctcttcctctgatacacaaacgtcagtgcaaccatattgctcgcaaaatgagagagagataagataaatcacataatgaaacaacaaatatgttatatccctaacttgactaaacccctaaactctcttcatcagatttgaaaacagtcactaacccctacttttataccattttcttcctcccctgctttaccttctggatatcactgcgaatcatgctggtatcaaactcgtcgtccttctttctcatctcaatgatcttcctgtgtgagtttgaatgcacagatgggatgaaggtcgggcttgaggctggccggtattctggaactaggcgaccagatttgaaccggactccgcaagcgttgcagagggtcttgggtccactgggtccttgcctccactgtggggtcgtgattgtctcacaatgagtgcatatccggactatcccatccgacttacttgactccaaagtggaagactcggtgtgggtgatcagatgaatcttgcgcttcttcttggcatgttgctcagaagaatagtaaccctcggttactgattcacccggagttgactttctgggttcaaaggggaaaaggtagctaagtctcactgttgtggggcgtctgcgcttgcttctcatgcctttcacagggaaagccaatctctgagatccggagttttgggtggagagagaaccataactgttctcgagaactgacactggagttagagactgaaatagatatgaaactttgatatcaggaggagctgaagattggtggggagtgctattaatgccggacaaggcttcagaagaacaggactgcttctgcacccacagaaccaaagaaagcagatggattaaaattcaggaatcaggaacacaatcaatgcacctctacatgaatgatgctaataagcaagacaaattcagtttaaatagatgatatactctatctaatagggtaaaactctatcaagtaagtgataagaaaacaagaactgaccaaagcaggaatcatgttgttgggaatccgcacacgagcggcgcccttgggacaagaggtgaggtcagaaggcaaagcagggaacatatccaagggaggaggctcaaggtcttgaaacctggcgacccaatctccctcaccattggtggaatcgatgtcttcaagtgggcaatcaaggtgattggtgagaccatcaaagaaatcaccagagagaatacctttcaagtgctcctcagcttcagcttcaggtaaccaattcatctactgtaaaccaagaaaaggtaaagcgattagaaaatgagcttaaaactcaacacatatgcagcaggagttcaagaacagctcccatgtccaccaaaaaattacaagttaaaaaattcaattacgaggtttcactaatgacacagacttaaagcaatttcgcaacagataacaatgacgacatttgaaggtaacgaagattgaaacaatttcttttaacagtgagacaagtgtcggtcgcaagtattcattcccacaccaccaaagcaacaaaatataaaacccagtaaagaaagaaagaaagagagaggagagcaagaaccttgtaatatataattagactacacagagaaaaggacgacgaatttggagatggtctaaattgggggtttagggattgcaggttcgttcgaatttgggaatgggagagagaagaggagggagaaaaaggtagatggagttttcaatgtctcgtcatttttgtttttgcttttaatggtcaactggtttgggatttatatacacagaaatgaacacatgagttgcgattagtcattccaaattattaatcagagaccctttgggttggggtatataaacacaacccaccaaaaagattagaccttgggtaccaacaacccactaaagcagagaacataatgaggctaaggtttgttatccatcttcacaagtcatgaggctaaggtctccaaccaaaagatcaatgttctttatcgatgatgatgacaccaagaacataatgagcctcgacattaccaatgcctgacgtcaaaaccgaatctttgattccaaacggttcagaaagatccttctttgataaggacgtggaatttgtgggagtggaagcacaagtgacagagaaaggcatggagcaagcgatgaagatgaacaaggagatggctgaggacctaaagactgaggaatgaaagagttcaacgataacaattactggaaagtggatcatgaagttggagtttagagtcagcatcttgtacagtgtgattttgtatgagcgtaatgaaacaaaacttggttttagttgaaatttcttgtaggtgagtctctcgtctctgtgaaaaaagcttttgttttctaatctttctctgttatcattaagtttctgttgttgtcagctagaggaagttgttacttagcttaccaccaaggtgtccgtctttaacctacatagaaactcttttgcacttcagtttccttctgttgaacattaatcatatacgtacataagcaagcagcctccatgactgaatttgatgggcgtttatttttcaactaatgcaaaatagtaaaacagatgaaaaaaagaagaagattatgggattgaagaataaaaagaatagatttgaaatagcgaaaaaaagagagcaaactttggcttcacctgttttcctctgatacacaaatgtcagccaagagataaagataaaaacacataatgaaacaacaaaatatttcatatccctaacttgaactaaaccactaaactctcttcatcagatttgaaaacagtcactaaaccctacttttataccatcttcttcctccactgacttcccatttctgcggatcagagaccaaactttaaaaaaaaaactgctttaccctctggatatcactgcccgaatcatgctgctatcaaactgttcgtcgtccttccttctcatctcaatgatcttcctgtgtgagtttgaatgcacagctgggatgaaggtggggcttgaggctggtcggtattctggaactaggcgaccagatctgaacctcactccgcaagcattgcagagggtcttcggtccactgggtccttccctccactgtggggtcttggttgtctcgcaatgagtgcatttgcggactatcccatccgagttgcttgcctccagagtggaagagaccgtgcgggtggtcaggtggatcttgcgtttcttcttggcatgttgctcagaagaaaagtaacactcggattcaggtttgcccggggttgacttctcgggctttcggggttcagaggggaaaaggtagctaagtctcagtgttgtggggcgtttgcgcttgcttctcatgcctttcacagggaaagccaatctctgagatccattgttgtgggtcgagagagaaccataactgttctcgagaactgacactggacttaaagactgaaatagtttcgaaactttgatttcaggaggagctgaagattggtggagagtgctggacaaggcttcagaagaataggactgtttctgcaccaacgaaaccaaacaaatcagatggattgcaaaatcaggaacacaatcaatgcaccagtaaagtaagtgacacaagattatactcggattaggaataccctctacatgaatgctgctaactatggttataaacacagcggaaagtgaaagattgacatcactcaaattatatgagtaactaaataagcaagaaaatttcaggtagaaaagctttttttactcaaattgggtaaaaatcaaaacaagtaaaatgcaaaagtgataaaaaaaacaaagaactcaccaaagcaggaatgttcctttgaatatccacacgaggggccttggccatgccagagccgcaagaggtgaggtcagaaggcaaagtggggaacatatccatgggaggaggctcaaggtcttgaaacctgtcaacccaatctccttcaccattggtggtatcaatgtcatcaagagggacgtcaaggtgattgatgagatcatcaaagaaatcaccagagagaagacctttgaagtcatcctcagcttcagcttcaggtaaccaattcatgctatctatctaactgtacccaagaaaagataaaacacattcaaaaatcagcgtaaaattcaccaaaagctgaattcaaaaacagcttcatgtccagttaaataaaaaaaaaaaaactttgggggtttcactcaaaactctgacacaatcagacagagacatatgctaaaacaattacaaaacagaaaatttacccaatacaataacaatgacgacatcattttaaggtaacgaagattgaaacaattccttcaaacatcactgagaatttaattaaaaaaatcacagagataagtgtcggttcacacaccaacaaagcaagcaaccaaatttatttcctacatttttcgaaaacaacgcaaaacgtaacagaggaaaatgcaagacaagacacaataaaagagaaagcttttaccctaacgagagaaagagagggagagagagacgcaacgaaccttgtaatataattcgactatacagagaagaggagagagagagagagagtcgtcgtacgatgacgaactggagatggtctcaaattggggatttagggattgcaggttcgactttgggagggagagagagagaaagagaaaaggtagatgggagttttcaatgtctcgtcagtttctttgagagagagattcattcatttaaaatagataataatgtaatactattacttacttacttacttacttgtatatgaaaattattattatggaaactgcttttcttaactttaaagaaaaatcttaatcagtttctttgagaaataaaaatctctctatcaacgcgttttaccaaaaagaaaaaaaaaactcaattttggttcttttacatatgtcaataaatatatatatacactaactgaagtagtaatagtatttgttaagttaatccaagtcaattgaaaacgttgcactaaaacttgtgggtacaactgtaacattaaacctcttcttgcaattaataaagatattgtatcattaaagctgatatatataaggtaagtaaaatatcagtcaaatattttatctgaatgggttttaaggaatatatgtcggtgtaatgaaaggataaaagaaagaatttacccattttaacatggtaatagtatgtcgacatggaaattaaaagatggtaataacacttaatgatggtcaaaagaattaaatagagaaatgattgcgtggaatagatctaaaaaggaaaataggataagcacatggcaaaataaccttgagggaaggatggttgatagatctcgatctctagcaataataatagatagtatcatgaattgatgtataatttaatttacgtagcaaacaaataagttgggtttaacataatatactaaaaacctttagtataatagagagagtcaaagtgaaatggagagatcaccgacgaaggattaagagacgagaaccgaaataataataataataaagatgattatggcgtttcctcatgggaaagtgggtcccttgcctaactctttgcttccatctcccacatgatatgtttcatccctttcacttactatcttcctcccatcaatcaattattattattagtattttttatataaaaaaaaattaatatacacgatcttcatatttcttttcattttttcttcttatatagtttatatgattttttcttcaaaatttttgacatattattgtttacactgcgtcgttgataagaaaacaaatatcacgtgggggtatatttactgcttttgtacaatttgttttatagagatttgtatgaactgtactttaaattgcacacagtctgttgcgtgaaaaatggtacagtcaaattcaaaccagttagtagtgtactttctcaaaaaaaaaaaaaaaaaaaaattgtgaaatcttattacttttatctttattgattaagctcacttaaacaaaaaaaaaaaaagaagcactaattttgtgactttacctgttttgtttagccttttaaaataaagtagatagagagtttttttttacttgtgattttccctttttcacctgtaaggtaaggcaacacccaaaactttttctttttccacgaaaagtagaaaaagaaagagaataatattacaaattggaccccaaaagcttcttcaaattgctgatttggtccaaaatatagtgacaatgatcaaatcttaactttggaggttcttctccttttagcgtttacaaatagaaagaagaggacgatcaataaaagcatcaatgccactggtacgaacttccatagcttctcttcacccatttctcccaatacgctctttaactcactcggcagatcaacaatgcttctcttagactgcacacgaatcatggagtttagtcttatatcagacagaaactaaaaggcgaaatgtgaagacaagaagtttcttacacttgagatcaacttattcgacactaattcatgttctttggcaaagattacttttgcatatttgtagagctccacatcgaggttgttaagcgatttgatctgctgaatgacctctttaggaactcttgtacgcgtctgttagatgcattgtcaaaagatttcattattccagccttctctcattaactttactaagtttagatcatgtacgaaaacactttacccctcttgtaaaatttgctggagttattctcttcagagagttgacccgtctggttccttgggactttcgtaaatgagtgatgcagccttcatagacttccataagggtttttaccgtcatctgaagtgtatatataaaagtcacacaaggtctcaagcgttgataataaattggaaaagggattctacttacattcccactcttagcttctgccttattcaatgtaacttcagatgtaccattctgtaatgtcacagccattttcagcaagacaattacaaaaatgacagttgaacaaacaaattattaccttctgcagcaggactttacctgaatattactcttatctgacccggtttctgaaattgtgacacttgcttctgaagcatcaaggaaataaagttgacaatttggtgagtgcaagtacaaccatttgttatcctgactttaaatacaacaaaagcaatagaaagcctaggctgtatgcacatgaactgtcatatcatcattctacttactctaagagactatgattaaccaacaaagaaactttaataaacccagggacccagagtaacaagacacaagtctaaaacaaaagagggcaagagaacctttaaagatgatgtgacaacaagaaacatagatcagaaaaatcttcatgatgaaagacaatcaaaccttatacgataatccccaaataacagagaacaataagtagcttccctaggtaattaaaaatcaaactcctaaaaagtgaatgaaaaatatcagtcaaacattttaatgaataatatgacgggttttgactttcaaaagccaaaaactaaagtaaataccatctccaaagcggtactctgaaaaaactgtacactgtgactaaaaaaatgatcaccatgtccttcaactaagttgctagattctccttagatagcccagcgatggtattaagaaacttacaccaacctgatttaagagctttgattttcgcagttgcattggacggaaccacttgagacagcacttgagaacccactacattggcaaaaagtgatgcagattccctgtgctcctctgtcagtccaacatacaacatgctgtctagcctcctctgcaaaatttaaaaaagcttacagaatctgctgcttttaaaagcacaataccaagacgcagtgaactatgatgaagaagaagtgttactaccttggcaacttggagaacagactcaccaaggcttttgaatttctgcacacaatgccgaacctcgtgtgcttctgataaatgggagttatttgtcaatcctgcaatctgtgaagtgaaatgaaaatgctctggagatctctaatcaataactttgaaaacttaaacaaatagcatgaaaaagtacctgaaaagtcgctccattgtggatgatgtcatgagcagtaggcgcatcaagatatttgtgcaaaggcataagcatctcctccatgtcatacgggttatcgtcctcaatgatcactacctccttcaattttcgtgcatctcgctaagaaaagccaaggatgagtaaaaaaagcttcagcccaagttttatgtgttcttatcatgttctagcttaaaagccaaaaaagacgaatgggataggtcgacatacccgagcaaacaagtcttctctcatccatggaactaggtatttccatggccatatgtctagtgtgcttattacattactcttgcgtatgcggctagacatccttgacgcagaagttaaattgggatgcaccaaaaacctagctgctacctctacggaaaattcataagtgcttaacacacgcgcaataggatcccgaactattgtcatcaccgaagttctctccctcggaagctttgccatcaaactataatcatcatgtgtggctaacaacttgcacttttccttcctataaatttacgagtcaacacgatcttaactgtccgaaggtagtaacaccacaggcaaaatacttttttcacattgtttttctttaggtaaaggaggctagggaaaattgattttcatatgaaacaatatttaactttatatatgtctagctaagctatctaaagtcaacttaacaaccaatagaatgtacaaacagcattctgtaagccatcttattgtttccacaagaaagagtctttggcatcaaataaagacgtacaattagcgagagcactgatgaaattaagataccttggattgaagtggagcttgtcgtaagatcgaggacattcctcagagctatcatacaacttcctcaaaaaactacaagagcacaaacacagccttaaccacacaacaatcataaaagaatctctcaaaaactttttggtaaaggaaatcaaatcaccaatgaaaatatgttctgcctccagttcgcggaacgtggagaaagaagagcaaatccttaagcgagcgtttgtctttattaacatgttcttcacgagatgaagaagaatcagcccattttttcacaagagtttcgcaatggccaaaatcaagttccgcaaaagagccaataactgagatataatttgccaattattccaagaacatcagagacaagtccagcttttttatcaaatgaacaattttgtaaaaccattctgcatacatacctgagctaagaagtaataacccaagagacagcttccaaacagagttcatttgcattgtgcctcgattccaaaccctactgattaccaaaacgattataagtgaaagaaggatcaatctttattcgaaagaaacaaaacccaggaagggaaaagagtaggtgatcaatcggtgaggatgaacattaacggttgcaagttgtataaaaacaaaaccgaaagattttgggggaaggagacagaggaaaaacagggcaaaagggacccagaaaatcgaataaagaaaggaacaaaggaacaagagagagaagcagaggcctacgtgtatggggaatcgagatctcgtgctcataaattccctcgatcgctgttttgggggcaaaactcgctatctactaggtcctacgaaaacaaggaaaagatgtgtttttgtgtgtgtgtgtgattacatcgattggaggaggaagacgaagaagaagagagattgtgtgcgctcccgagagaacagggtcacgagattttctcttggtttctcgccacccagaaaaattataaacacgcactgaggaagacactagtgtcaaatttgatttagccaaacgaattaatcttttttgagagagaccaatgctttttttttttttttttttccactagtcagtaatagtatgaatgcactttcctttctggttcgagtgcggtttgaccaatgccttctatataatacaaaatgaaatacataaccggttatcggaacgaaaaccgaaatcggtaaaccgtgggtatacaactatacatcccctctttgtgtaatattttgttcttcacttcttttggccttttagttgcgtcttgatcttcttgttgcttctggtgacatgtacatccatccctcgttgtgtgtgaaagacctcaaggaggaaacttatagttacaggatcatggttatgagttatgactcatttgttcttagtcattgcttcagttcaatcattcgttcacagatttttatgagcattaaagttttccgttgagatttgagagttcaatcctgacagtggccatactttatgcttaaatgttataaggcctaaagtctagagtttatttgctttaagtaaaaagaccagacttgtctacaaaaaaatgttgtgggttcaaatgtctcatgctgatggcggatgctgtctcctttcaatcttgtcatcgttccattcgttttgcaatgacttgtttgttttcatctatacaataaaaatatctgttttttaatttttaatataatttgttgccatgtttattgtaatcctaaaatatcaataaatatgtatttaactaaaaatatatataaattcctttagagataaatattacctccataggtttccaataaatagcaaagtaattatacattaactagtatgctagaattcgtataaatgggtaattattgccattgggattgaaatgtcctaaaatgaattatttttttaaaaaagttggtgatgacaaaaaatcatcaaaggttgtagatttgagaaatacagtaggattaaaaatgcttggaaaataaaatctagaaggatagtcgtaaacctttgtgttaatcttatggttttaaagaaggtttaagatattaatacaattgggcctgataattaaatgggcctagtgtcttctgtttctccgcttatcattttcttaagtttataaaaaatattaaaatcgcaaaaaaaaaaaaaaaaaaaaaattgctgtcaaagaaaaaaagaaaagataaacaaaaaattacagacctcatgagtcaaaggtatagagattttctcactcttttgaatcgtttctgaaaaagtgccataactctaataaattcgatgatttcgtatcatctaatttgtcgtgcaatctttttgtcttttagattagattttttttctttcattaatggcatcacgatatgcgactaaatgtttcttctcgaacttaacgcaatttgtgaaatagcttattaggggtactattcaataatcatggattttaaactcgttgcttcctctggtttcgtttacaagggctttgtctgaatgtatggttttactgtctttttccagatattgtgacaccatcaccatggactatgaagaaaactccattgaaggaacatcaggttatgtggaacccataactcctatgatctctaaaggagacagtggaatcattgcaatttctccactctgtgaccactacaataatcacatgaggattgattctcttactacttgttccgatgaagaaatcattgagtctttgtatcaaaacatctttagtattgttctctgccttcaaacagaggaatctggttatggttctcacacacctgtctctgcagcttgccctggagctcccatgaagcttaccaagttatcaagaaacatcgatccaggattccaacggaaactcttctgacgtgacatttcttctttgttcaattcctaacattggatttaactttcttgcacaagactttgtggtaattgtgtactctgttgggaaaaatagttggtcttgtatttgtgttcatgtgtattgttatcatatcttgaaatgcacactatgagatatattgcatctaaccaagtaaatttcatcaatggaattgcaagatcagggaataagaaatatattaggtaaaaagctaataatgtagatatatctgagatgttttaaactaaataggggactacatagatctctctcctcacactcacttgatcagggaaacgtaagcttcatttacagagacagagtaagaagaggcccaaattattcttttaccttgtgttgttccatgtatgctttatcagcttctgccacgcgattctggaacatcgtccattcgtttctgcatctctccctcacctgaaaccggagataacacacacactgaggttgtcaaaaggatagagaagcaagtatattagtaagtacaataatgtgtgctaattattaccccttgccatggagatttcccctcctccgactcaccctgtcaaaattacattattgagtcgagatcattcattcagatatataagagcagaatctcttcattgctcagagataaattgtaaaatcacctgacttccaagggaaggaatcacttgatggataatccactgtgaatctaccacaccaatcttctcatgagcaggctgcaaatggaggagaccacatacagatggagacttaacaaggagagttcatgagatataacaaagctcccaaaggaattacacaagaagcagagggtagtggtaaataacctcaacgcatcgtctgagagcaaaatcgagaccccatccatgaacaagatcattctgcaccagaaacaaacaagattgtttttaggctaccaagtgatggtctggaagactagacaaactccttttgatagcttaatcagaaaccaacgtagattcatcaatgccacaaatttgggtcatgtgaataccgatcgtaaaaaggtgaataaagttaaacaaaaacctgaatcatatgccatacacatcgccatgcttctctagaaaatacaggtgccataatctcaacaaacctgcaagtgggaaaacacacctgttatcgaaaattgatataagcactcttcagtaggttagtcaaagagagagaatgagagaaagagagtacagagccgtacgcagcacatggaggtaaatgtggatcactgcaccatcctggtttttccttagtttctctgttaaccactcaaaaaccttagagacagattcgaattcagaggaaaggtaaaagagagagagagtgagagaaagctcttacttgtggacatctcggtcacctctcctctttgtcatttcccatgtaagtccgttgtttggctctaagcctggttgagaaatctccaaaccatgcttcttaactaactcaacgtacctgaaaatttaaaataaaaattgtaaagattgtcactgatctgcaactacaatttcagacaagtaattcacctatctgcattgaagtgctcgactccaagatcttcatcccatataaatatatactcataagctgagacaacatcaggatgcaaaaatctctttgcataccacctgccaaagataaacagctcaaggtgaggattttgtagataaattttcatgactattagaagaattagagtatatcgtgctgacctacatttcagatttcttaccattttgtttgcttttttgcactgatatgtattgcatttttagaccactcaaactggtcccactcagttgttcggccatcataatggaataacaatatttggaaatcttcagaaaactgaagcaatgatgatgaaagcaaaaatctttaagtgtcaatactcaaatagtttacaaacaagaggggagaaattgttgcagaaccttcttaacagctgcattaatgttgtttctctgctcaaatccaactgtaaaagttacgagatactttggcttcttcttcaaatcctacagaggtaatgcttttgttaaagaaatctcagtcactatattgttagactatgccaattgtgtacatgttgccactagaattggtacatcaataagatcatagaacttacttcactaggttcaccccataatcggcgcaagtagaaatctgtttctgccactataatcccaggaggaagtagttctgcaccatgcggattggttggaacatatatctggatacatagaaacagcaatgatacatttttaatatcatgaaaaacaaaaaaagtgcactgcctcatgaacttctgtattatatatcttcaatctagtatgtacgaagatggttcttgaaatataccttaggagactttcttgaaccaatatcttcaggtgatctgccaccagaaaacaatttcccatctgacatggctacatcaagagatgacataaggcctgaaggtaagctaatctgcagaatacaaaaatacatcaaccggtgaaaaagagacgtaaaaggaagatataccaatggatcaaaaacctcatatacctttctaaaggaacctaatggtaatgtgataccaacaaaaaaaccaaacaccactcccacgattgtcgttatgataagcttcgcattttcatttgtccttctgggagcaccactgccaaagattaacaatttaagtaatttttcaaactgaaagcaatacagaattcgtttattacatcgaaccgctaagaactatttacctccggtgcatcgtccccatcggattgcacaattctcaaacaatactgcaagaagaaaaaaaaactaaattcaatcgttaaaaaagactttgaaggacacaagaaagaaactattcaagaactgacgaaatgttctttgtattgatcattaaacaatcctggaaaattacatacacagcaataaatagaaaagaaacaaaattcaaagaattcaaaacaattctaattgacctaattgatttgggaaagcataaccgtccaattgattaattcaacagtcacatttatagaaaagaaacacaacaagctcatcagaatttctacagtgaatttttcaatagttgaaaccgacagctataattgcaaaaaaaaaaattttaaaattgatccttaaccatagattcaaaattacttaaacaacaaagccggatcaaaaccgaaacacccatacacagaagaaatcgaaatccggctcaaaagaaaatcaaaaaatgaagcaattcaaggaaaatgcgataatacatacttacacagagaatggacaggatcaaattgatagattagggtttcgaatctcttatacgatctcgcaggactactgaagaaacactgaggagagaaaacgagccgattgatattgtttttctcaggtgaattataagccaacaaacaaaaaaaaacttgttttgatatttggaagagcccaacgctttgttttatcaaaagcttcacctaaatatatgcatacgtggcttcctatcttttgattttgtctgttggtaggtgtttaattacaacatcccgtcttaatggtgtttttagttaggctgaatttggatcttattgtataatcttattgggctgtgtaccatttttttattctcataaattcataatagtagtaataataaaaaaagaaaagaaaaaggaaaaggaagactattgtatgcacaattaaaccaaatattgaacagagataaccagtaggtacatattgatgctcaagaagaactagtagaaaccatgtccccggttcagacttaaccaactcaatgtctctcttcacactcaccaaaccaaaataaaaccaaaccagcaatcacagaacccattttcttattctttctgtcaaattcagctttgctctccacgaccaggggacggtttagtagggctttcgagcaccagtagctgagaccgagtcaccatacgagccattggagacgtctgatacgcctgcaccgggctaaaaccctgggtcgaatctccacgagcagttgctctctgagccgaatgcgagctcatgctcgagaaggcgtaagctcgccctgatgtccggtacatcctcctgctagtcatcctttcttgcaacgcactcaactcagacgacagtgattgacaaagcctgtcgctggattgagcagacggtgtctccgacaattccctctcacggtttctaagaatcccaactgccccgctcaggtcacccccatccgctaaaaccctagcctctgacatagcttgtgaaacaaggaacctgtttagttgcctgtcaacctctatggacaccacttctttccctgttagcttcattggcctttggatgcttagttctccagattcaacatggactatctctttggtaacaggatctttgtagacgcatctaaccttcagcaaagacaaagattcagattccccagacccattgtcgcagcacggaatttctagaagcaccaggaagtccctttcttcttcagcgtacatgtctcccacatcgattgtggcggttcttgcatcaggtgctatacggcttctgtagcttcctgcttttatagaggatattttcaggccctgctcatgaatgcactcgatttcaacaacttgttcaagaatcacgacgctgagaagccctccaatgcattgcgcaaaagcatcctgaatcacagtctctgtttcgatgaacgaaaacgtgccactagagacttcagaaattgtgtgcattagctcagcatcgtgatctgagccaaacccaaaggtatgaattggaatccggcaagaactgggaagcaaagactcgtaatctgttctcagacggaccccagcatgagaaaaggtaaagttgtcctgtccatcagacaacagcatcatcccggaaacagggttcttccaccgtctaccctcaatcactctcgcaccaatcttgagcccctctgcaatgtttgtcccgccgtcagcaaccaaggagttaacagcctgcatcgccgcttgcttccctgtctcagacatcagtctaagagggaatagtctgcgagccatggaggagaaggagataacagaaagcctatcagtctcaccaagattctgaatcacaaaactcattgcatttttcataagctccattttgactccatccatgctaccactcacatcaagaacggtaataagatccaaaggagctcgagcgcgcctagcatcatcactcacaccctcagccttaagatgaaccagaacagcaaaatcagcacgagagaccggtttggccagtgcagagacttcagggaagagtttaatctcgagggcttgatgatccgaacgatgaccatcactgtggatttgggtatctccttgaggtaaaggctcgtcatcttcaaaacccctttgagccacaaaggtagggacagagtcaacatcacacaaagggacttgtttccactgagttctgcataaagggcaaatcctgtttccgtgtttgacgttggaggtaatacagtcaaaatggaaggaatgagagcactctgcagtaaaaatagccttcccgtcttcctttctaatctcatacaagcaaatcgcgcacctgccctgcaaattttcaaagaaaacaatctctattttacaatctttaaatcttagacctagaaacctaataggaaaagggacaactagaaatcaacactaattaaaagttacaacccattcggccacaaacgataaaattgcgtcaaccctaaaccaaaacttaagccacaaacgttgattatatatttaaaccaattcgatgatgaaattgcatcaatttcgcatcaccgacataagaaaaagagaaaatattggatttttggataatacagagatattagagaggagtaagagagagaaccttagagaaacggaggccagaagaggaaggagtagagccagggcgagaagaagaagaatcgggacggttcgggtcaacggatgatcttgaggcatcgctgggagaaggagatgaaggatcgagcgttttgggaagagtgagacactcgttcaagttgagatgcgatttcgattctcgcaagttgttcgggttctccattgttacactttccgatttcgattctcgcaagtagagagattaagatggagaagaaggagaaagttgataagatcaaaaagacttggaagacgaataaaaagaagaagaagaagaagaagaagcggttaccataaagaagaagaaagcgaattgttcaattcaaatcactttagtaaacgtcaactatctattttttttttaatttaacttttttaacgactttttgtttacttttttggctttttctactggctgggggagtcatgggacggtggggaaactggaaagaaaagactcggatacttcttttaacatcacaaaatagttggagtattaaaatctataattgtaaaattatggggtcttaaattttaacttcgaagtttgacatgtttataaagttgtcgctctataatttgggttttctataaagttaaatcagtagtattttcaatcatcaatttgtgttgtgtgatcagactgtatttatatacatgaaagtagaacgttgcgtttcaaaaggagagaccttagccaacgagtcggttcctgactcactaaattagattaacgacagagattaggtaacctacttatacatatatatatatactattattaactctctaaaaatcaataactaagaccctaaccatctctcctcttaggtcactcgtcgtcagaaagacaaaccacttcattgttgctctgcaatccactgctcaagctctgttgcggttgttgttcttgctgctgctgaattgacacagctgaatatgtcaaagcttgaggaggcactgacgaggttggagtagctgtggcgacgggagttgaagaggatggtctatatgagtttaggtgtggtgcaggagaacgcagacctggatttgttgcaggagtaactgatggagttggagctatgttggatatgagaggctgtctgggctgaggcattggacagaccgcaaaattcagaagaagggctgatggacgagagactgaagaaggaaacgaagatgcctgaggctgcagaggagccggaccaggagcaggaaatgatgattgctgaagttgcagaggagccgaaaccagagcaggagcaggaaaagaagatgcctgaagctgctgaggagcaatgtaatttctcagtgcactcacttgtgctgctctctgtgctagctgctgaattttacctggagaaaaagtgctattatgacttcgtcgccttatttttaaaaccaatttgctatattattcgacacttaccccttggagctcctgagggagataccttcttgtcagtacatttggacaagaacgcattcgccaacagtttgttcattataacaagattcttatccttctctatctttgtcgttctggtgttatgctcggcttctacctcatgaaattttcttcgaaactctgcttgtacttcagccatcttcctctcgagttcagctttcaagattgatttctgctcacaagcaactgagagtcaatgggcagctagaaaataaaccaaaacaagaggtaactgggtaatgagggaaactgactttttcttcaaaagtcttctttgagttctctgattctctccgcaacttctccagttcatgcagaaacgggtcgttgaacacagggaaaggtatttgaggaacaggttgaacggcaatctgttccgtaccattgttaagaagtgatggaacaagagctgttacacctgctgaatgctccacgccaccttcatggaaaagatctgcacaaaaggcatctccttgttagctgtttggcaatcacatatgtcgacctaggtgatacttaaaaatgcccaaggcagttactgacttgcaaaggttgaccgctctacttggggaccaggttctgaaatttccatttcacatgcatctgatccacttatatgaggctcagctactgatgtgttatctaaaccctcgatattaactgctgtatcagggtgatttccaggcgaagataatggcataggagatgcatcctgggcacactgtccagaaatattaaattcacaagcaaaaataaccatatgatcactatccactgtttgcttagtttcaacattactaaggactagacctttaaaccaacacataagaaagtccttgagcagaggcaggtacctgatctgatacaggagatccaccggttacaactgcatctgatccatctgtgggaagttgagccactgttgtgacattttgaccctcaatgtttgctcctaggtcagactgagttccaaccgatccagatggcagagagcatgcatcctgagcacccattgtttcctgcaggatatccagaacgagcattacaaagatgtaagacttttaaacaacaaaagacatttgtctttagttaaggcaataacctgatctattactgcataatcaccactctctactgcatctggacccgctacatggggctcagctgatgtgttgatattttggccttcaatatttgcttctggcgcaggctgatttccagtcggtgaagatagcaaaggacatgtaacttgatcaccctgtcaaaagagtcgatttaaaacaacaacgagacttgatcagtaaccacatttccccacctttttctcacggaaacttagaatgaacataacacagattgataactttaaactagtaaaaaaggaaagtcttcaatagggacctgatgtgatgcagcaaaatcagtagtctctactgtttctgaaccagcagactgaggctcaattgcttcttcaagattttcgctctcagtgtttgctgctgggtcaggttgctttccagccagtgaagaaggcataggacatatatcttgaccatactgtccagaaaagtgaatttaataagagaaaaaaagacatctgatcactacccgttattttcaagaaagcaagaatgaacattagaaaagattaaatgaacaaggcatcaactattctacagggccagtaagtacctgatcagattcagcagcacccctagtctctaccacagacgcaagatgttgcacaggcatcgctaactcgtcaggaatctcttggtcaagagaacaatcttctctattctgctggtccaaaatgttatcagtatcaaaacccacatgacttgttcttctattttctgttgtaaccaaagcctcctctctatttagagaaaactcgggggaggcagaaagattttcgagtgactgggatacctctggcacccttgatgaaacatcttcatctgatgccgcagatgttattctgtcacaattctggtcttctgacaaatgcacgttcaaggccgcaaattcctcttgacagtcagcaggaatcaaaatctcaggcacagtgatagaagcgtgctcattggactggctctttgtaagctgttcacgagacaaagctgagacatccattgtctcgtcatttcttacatccaccatttcatgaacttgttgagtgctgccacccgacatggttcctaatgtgttttctgcttctggcacttgattaaccttggaagccatgcaattcgtatcagcgtaagtagcttcaacgttagcattattgcaaatttgtacatcaggagcattttgggaaatgtttgatgaaccactaaaatgcttgttattgccactttgaatgggaacacaaacttttaatttagctgcccagctctttatccgattaatccaacaggcttcatcctcagccaacttcttctttgcaacatcgtgcatttgctccagacttttgaggcattcatttttctcacttttgatttcatcaaactttctttcataattatgatccagcagtttgagatcacccacttgagtactggtccgtgaacaggtaatacgaattactgctgcttccacacttttactagtttcaagtttctgcttcttgtctgcatacatatttaacagctccattttcttttcctcatgctcttgtacaagcttttgcacttgcttcttgtatttcttttttatgccactaatagtcttttcgatatctcttgttgctgtgctataatggctacatctcttctcagtcatgcactcttcatcctctgagctatttcgcatcgacttcgtattaatcttttcgtcacgcactgtagcccctgagagactttcatttactagttttgtgctaaccactgactgtttagaattagtaccaaagcaatcgaactgcaaaccttgtgtatgctccaggaacagactcttcatgcaggacaatatcgaataaatataatccacctctactctagagcatttgaaagctaattcagaatttgcacggaccagagattctttgtggctaagaatttgctttaccaacaaggctgcaatccaactctgaaaatgcattattaacaacgtattcagtatgtcaactattcatatattatgcagcgatcaaaggccagttaatggatatttgaatcctatgattggaaagttaaaactaaaggagtgctgccttctgaggacattctaaacaaaggcagatgatgaaggaaacaatgcataaattatcaaagtaaatgctgtcataccagggctatctggaatgcctgaaaagtagtggctggctcttcgtagattcggtgattttcaataacatattcgagaaaatttccgaccatgcttgtgcaagcatcctgaaaacaaaataatctgttaaccaatcacacattgcaaaataccttttagtacaattttgatagacggagcaccgtgataatcacagaagtatatggacacgacagcggaaacatctattagccaatatgtgaagacataagactaccttaaaatagcatcagacactgtattagtttctataccaacagcgaacagataaacttttgacatgtctttgatcagccaggtacaaaggcctaaggttatatatagttatatactcccacagatggatcatgtaaagtagacagaaatttctttgcttcaataaacaatgaatgacatgaggcacataactacctactgttttgtgcagcagttgctcattttaacagtgcattggtaacgaagccagatataagaaataaaatatgcttaaacggatggatatagttgaagaataaaactctcacatttggctgtaacaggaaatcaggtaacaactacagttgcaatcagctatatataagcatatgcaaggctaaaataagttgtggaggtgaaaaaggccacttactgaaagatgcaaaacttggcaaagttttgccatcttcggctttaaaacagtgtggagcctcctctgtgattcatccggtattttcccccaatcttgactagctaacatatcctctgggattccagagatatggctgcccatagaatacaagccaaaagcatcatttccatccaatgtaccatctgtaccagaagatttacatgatgactggagtgttatgacttttggtgactccaaagcccctgtaggaaagatagtcagcaaagtagttgcataatcaatgaacactagaggtatcggagcagaaattaaactattttacccatgtgatccttcccagaggcctttctttcatcatcatctactggcggatcagtgacccggggatcagtgacatcatcagaagccttctttcgcttctttgcatttccaccatcgccagttttgggactcgcttcagaaccctcaaaatactgaactcgttttcgattcctttggggagtatctgaagggtatttccacataggattttttccccccaacagctttgaccaaaatatatttggactctcttcatctgacaacttaatatggtcttcaccaaatagagtagaatcactgctgtaagttccctgagcatgcttggcctccaaaagtagacacagcttgacttcattttcttctccacctttggaagaaagtatggacgagaattcatgaatcacgccgtccataatagattgttcaaatgaaactcctgaatctggagtttcactgctgtgaaaatgatccagtttatcaaataagtatgacgccccccacatgagcagtgcgtgcgtgagagagcggtttaggttctctacagctttattttgccgcttattttgcctagccagaatcagggctttttcttcaactgtacatactgagtacaatcggaatatcttagttctttcagaacatgactcgatttttatcttctctacgtgcttaacatcatgcgatggattcaagctgcttccaaaaagaataaacgcatcagctcgcaagagtttaatggtttgactgcaggcacgtgtttccaacagcagaacacagcattgactctccttgttgaaattgtttatagcggagttcttctttgaggaatatatcccatgctcataagattttggaccaaatctttgacccacaaaatcttcgagaatattaccaagcagaagcccttcaggggtttgtgttgcctgctgaaaataaaaactgtaattcaaacatacatgaggcacatataacgaaaaagaaagaagagaaaagaaacattttagttcagcatatctcataatgctagctgactgctgaaggctaacttacacttcataattgcacgataaaaagcatactttcatcccactcaaatttcaatacaagacagaattccattgtcaaaaagaaaatgcacatatattgagaatgcacaaagtgacgtattcatgacaaacatagagctattcacattcgcaagtaatagaaaatgcacctggtagaagacaactgcttttaaaccattcttttttatatgagtaagcattttatcaaggaggtgaagtttcccgctcgctttaatttctacatccaggatttcatgcaactccagattcttggtgagcagttgtttcaaagatgcatccataacgtatggatggtcacaggtctgtcaacaagttgcaaacacataaagaagattttaatatattcacacattaacatgcagaaagaggccttgagaaaatgtgatgctgaccgacaatagtcgtatatctaagcaaccccaaaactgtcaagtttgccaggttctatgtgtttcaaaaaagcataaaacaaatagacccaaaacctttgctctaccaaacatcaaacagaaaggcataacacctatgtgacaacctcttgaaagcatggaacacagaattgtttttttggctgcaatgcggtgaacaccttatcaatttttctattgctttctttatcttatcaccagtaataactgggtacttaactcacaagtgcattgaagaataagtgtttttaaaatcaagtaacttacttttcttacagaattgagagtttcttctagagctccaagatcaatcttcgaaagtgaagaaagagataaggatttggagaagagagtctgacagtattgctccagctgtacatctgatagctgcacaggaacccaatactctgggtacaccgaagaatagaatttgggatcacttgatttaccatgttgtatttgcccgttctcctcatattctctgctcgtaactggtccagtttctttcatatcctaatcaaatgcaaaatagaattgcagattacaagtaaaaggataagtaaatctagtatctaactatttaagagtccactgattaacgggtctccgaaagtaattagaaaccaacctgtgtcacgttatcagattcttcaactggctggacaatgcaggagcaaacactcctattttgacaatcaccgttgacccttcaaaattttgaacaactcattacaatacagaacatatatcctaagaatcaaacccatctgcccaacattcaacattggcagatcgtttcaatagacagacaacactaaaaaaactcttacttttgccgttttttacacgtgttgcacatttcaggtcgattatcatttttgcacccagatggagatggaatgaccccatcagaactcataacgtgatcatctccatttgcaactgtagcacatgcatccagctcaatttctgcagtgtctctttttcttttcaaaggcaaaactatgtcggtttctaagccagttttactgacaagaagcttttgggtttctaaatttgtagatggtgaacatataacgctgtcatccctagtttcaactatgggggatgcataaagaaccatctttccagtctccgtagttgatttcaaaggaaaatcagtgtccttttctaaactagtttcgccaactggcagcctttttgattctgcatttgcaggtggtagacaatctgtgttatcatcttgaaacttttgtggatattctttttctaaactagtttcaccaactggcagcgttttcgattctgcatttgcaggtggtgaacaatctgtcttaccatcttgaagcttttgtgtctctaaattctcagatggtgaacctataacactgtcatccccagtttcaactatgggggatgcatcaagcactatcttctcggtctccgtaactgatttcaaaggaaaatcagtgcccttgtccaaactagtttcgtcaactggcagcctttttgatcctgcatctgcaggtggtggacaatctgttttaccttgaacatcatcattgcctgcaggtatgcggcgagaacaaccaacaactactagttcctcttcatttggggaagcatcaactaatgcctcagattccttgagcttccctctaaacaatgccctgtaacttcgggctgacattataggcttgatcttatctgtcgactcttcaacactatcctttctctgctcaatatccggtgaagtatctcctttcctgatagaattatctgatcctttggaactctgcaaggatacttcagtcttccccctattggaccttcgcaaagaacttggtgtggaattcttgacgattccaccggacttttttgaaactgaagcaggtgagggagccagtctctctgactttctagtagcagaagctggagttattaccttcgtagatggtgtcccccggcttgacctcctcaaaccaggggtttcttgttcaactgaggcaggaattgaagctgctagggatctggtgtaaatggttctccccgtcaaaccaatcttttcatctttcttcatattcactgagagcacgcaacggaaaggaccttagcaaccaaatcaagcacttaaaaacaaagaatgtgagcaccgaagaagaccatcaaacaaaatgtctacaaatccggcgacctaactttcaaatcaaaattcctatatgcaaaactaatgagttacatctaacaaacgcctaagatccatccccaagtagataagattctctgaaaaacctaaaacgcaaagcccgaggcccaaaaccttcgattcaccgatagattaacaccaacctaaaacagggaaggaagcatacctgcgcgaaagtgtgtaattgtcagaatctatcgcttgacggagcttggtggaaatttccgattccgagagtgtgaaagaaaaacgcgagggaaaatttgagaattccagcacaattctcgattaagtggttcttcaggccatgcaatcctcgcggtgtttggggtttcggaaaactgagtttgaagaagacgagaattgggttcgcaggattatgtacggtactttcctcttctagcaccggcgtttctcgagcgagcgatttttgattttacgattaccggaaggaaaaactcatgcttgtgatttcttagatttaaatttatatattttaagttataaaatacttcaaaaatagtgtacatatgtaattaacatatgttatgtgaaattaacgaaatgttacaccgactatgttagtatattacttatagtttgttttgaaatttgtaatttttatactatactaaaatatgaaacgaattagcataagagtatgttgctagaattgaagattaaatagaacaaattcatatacaatatgaaatataactgagctcttcgtgtattcaaaaatgataaaaacaaaaacaaaaattccaaagagattaaaaatatgtatatgttctgcattcgtagtattcaatcaacatttttacagtgattaacacctatcatctttgattgtggtactcatcatcaaaatatttctctaaacttcaaacgtttaattaccagtttggcctcgacagtagactgtaaccactgcggaattacgtacccataatgtttagagtcgatcaaccttgtccgctatcctattacactatgtagaagactagaacgaaagtttacatatatcattttggtcgttccaaaatacactgtagtatttgcatagttttttcaatacattaattccaataaatccaatgttatttattagaagcattatctcttacaatatttcaaagattactagaaagaatataaaccaaacttaaatatttaatatagtttactatgccatgttggtatgtaaagtgccaccggacgctcatttttacgctgaagcggtctagcatttgagttagattgctgcatggaaaaagaattatgtttcaaacttacaattttcttagaaattaaatacatattggtcacattagccaagttagtacacttagttaacattagaaattagaaattattagagacactcacatcgtgtacagtcactcgaagcatgatcaattgttttaatgtcacagtcctcatctgcaacattttgaaaatatatcaatccgaaacaatgagctttatattaatcatttataataaccactctggaatctcgatagtaataattacctctttggaaatcgtccaaatcacattttcagaacacggtggagttgtaagtgatccgataaatctataatagtgttttgattcaaaaccgaatgttctaggatgaaccatctcgacaaattcctgggattcgtgtgtatcagttatcctcttcaagtatctttccaactagtcaattatcaaatattgaattagtgtttttttttttacttccaaaagtataagttagtaattatttggttaaaacgattaggtacgtaggaaggttgaggttgcaataccgtgaggagaaaatagtcaggttttcccaatttgtaaaagaaagcgacaacagcgttgcgtccatctttgctctgatgaaccatgtgttcctcaagaacaaacctatattacatgtgcattattcaaatctttgcatgcatcctaatcattatctcaaaaaaaaaaaaaccccatatcttgaaaacgtaagccttgttttgattaagatatgtttccctctaatcatatctcaaatgtatacgagtagagatatataccttttgccattgagtgtgtgttcggaaggagagtgccaatgaatctgttgaagtttatattcagtaccattaatagtgatacctaaacctgcatttcctccttcaaatttcatctgccacaagaacaaaacaaaaattacatattatatatgatccaaaaatgaaataatatattggaaaagcttatagtttggtttaccatgatatcatggcctctgttcttaatggtggcatttgaaggtaaatactggctacgaaggtatccaagattatgatcaatcaagactcttttgtccgtaagatcaatcggagactgcatgttgccttttccacacattgcccactctggctttagtcttccccagttctctggccccttctctcctttcttctcgtagttaaactgcgtttcgtcctctatattttttttggttatacacgagttaaaaaaaatgtgtttcattaagtctaattataacttataaagaggcttatggaatcatatcaattgaaagaagttgttaaaaaaaaaaaaaagaggcttatggaattaacggagcttaccaacttctccatgatctggtgaactcgaaacaattgtaatagagatgaagataaggaaaaagacatagccaattgatggtatcttcattttcttgtgctatatatcttggggagagagatagaagaaaaaaattcaaattttggttttatcctcttttatagctcttattcttatgaaacaacttcaaggagatgttgatcataaatcaattctcttgttttatcctcttttatagctcttattcaagttaacaaattttacgtgccttagctatagttttcaccttaattttctctaattttctttatgtttctttgtttttaggtaaattgtatcaatatatttaattatataaaagaaaaggaaatctttgtgggactcaccagttaaatggaggagtgtattggatcattaatttagagtgatttgagtttttatgagttttgatatttttttggtgaattttgttgaattaggaaatttgttattaaaattctctcaaatctcatctaaaactatgggatttggatcttatatttttaactaagaaatttccagaaataacaatggatttgatcgtacattttaaaattactaatccaataaggcaataacacttgattccagaataattccacttcaaaatttccaaaacaattatgattaattatttgtattataattttttataaaattttatttatataaaatgaacgcttcacattcgataagaacacatttaatcattatagttaactattatacatactttgtaaaaattattttgaatctgtgataaatgtaaaaactttaattgattttgattaactatgcttcttggaagctaaagtttcataattttaaatgtaaaaattagatgattactcaattctttgcatgaactatacatgtatagaaaaattatacgtcagcatttgttatttgaaaagtgaaaagtctttctttacatgtatacccttacatcaatgaatcagttacaccttatatgcaatttacttgcttgactaatcttcttgtaatttacagctaccacacaaagaaagtcatattacagttcttgaccaacatcattggtaacaagatcctctgaaatgatggctaccagtagtcattgcaggaacaaacaccatctctaaaatgatgaaaccgagttctgtctctagcaataatctcccttttgtaaatctttgatataagctttgtagcctcatgacaatttctgcatacccttagattcttcacgattgtaagtttagtcccaggctttgtactgatcagcccaaatgcaatagctagcttctcgctgtgatgccgcaatgctccttccttccattcttcttccatctcctgcaagacttcagaagtatctggaacaaacccggctttctctagtaacacctccatttcttctaacattccgtagatttctctgttccgtggatggaatttatccccgatgatgaactcatggaccacagaatctatttcgatagagctgcaaccaggaactttcttcatacctttatcattgaggagagctcgtgtttttgctacttcgttccatcttcctgctgaggcataaatgttagacagaagtacataagaacctgggttttctggctcaatcttaatgaggttttctgcaaatgattcgcccaactcgacattcccatgcatcttgcaagctttgagaagggagcaccaaatcactccatcgggctccatttccatcatgtttatcatttcttccgcttctttgaatagacccgaatgacccaaaagatcaatcatgcaaccgtagtgctctaattttggggtcattttgtagtcctgtgtcattgttctgaaaatatggcgtccaagatctagcatacctgaatggctacaagcagacaacaaaccaacaaacgtgatatcatctggttgaatcccaatctttctcattcttgagaaaagatcaaatgatgcatcagctctcccgtgcattgcaaacccaaatatcattgcgttccaagacgacaagcttttatggagtatactgttgaacacttggtgtgctgcctctatgtctccacatttagcatacatgtcaatcaggcttgtacggagagaagaagcattcgtaacaccctttaatctcttgtcgatatacacatgaatccatcttccaatatctatggctccaaggtgtgcacaagcaggaagaatacttagcattgtcacatcgtttggagtttcacctgatctaagcatttcttgaaacaacaacaatgcttctttgtaaagattcatatgtgtgtaaccaccgatcaaggtattccaagaaattacatccttgtacggcaatctttcgaacaaaccacacgctgtctccaattcaccacatttcgagtataaatcaatgagagcattaacaatcttgagatttgaaccaaacccatgatcatcaatccataaatgtacctgacgacccaattcaatactaccagactgagcacaagcagaaactacagtgaccattgtactctcgtctggcctaacattcgtcttcatcatatctttaaacaattctaacgcttccttatagttaccggtttcagcatatcctgaaatcattgcattccatgatactacgtctttaacgggaatttcatcgaacaacttctgtgcattttcgatatagcctctcgatgcataacccttgatcaaagctgtgtatgaaaccacatctcggtgaggacttttatcgaacaccttatgtgcatcttccaatctcccgttttggacatacatagagatcagagaagtatgtacatacaaatctagatcacatccaagtttcaaaacatgcccatggatctgttgcccttccttaaaagctttcgactttgcacaagatttcaatacaaacggaaacgtgtaggaattaggaagaagcccaagtgaaatcatacaaacatacagcttcagagcagaaacagggtccgaactcaacgcgtgcccacgaaacatcgtgttccaaatcaacaggtttggctcctgaatagttttgaaaacagatatcgcataaggaaggccttcaaagtgtggagagagaatgcagaactcaataagcttactgagagcgtaattggtgttgtggagaccgattttgatcatctgagcgtggataatgcggagagattgaagagttttgcaattgtggagaagagaaagagaagggtgatttcgtatagaatcgtaagggggatcagaagacgaaggaaggaaatggaatgggtaagaagaagaaggaacggtgagaggagaacacgagagcatcatcttcttcttcttacttatcgttgcttccaacggaaattttcactaccgccacatttaaagtcccaaatagcacacggactttgtttgggcctgtgatttttttgtttgcaactatatgggcctgtgattaacttttcacttacgatgtttgattatatatttttttggtaggatcgatgtttgattatgttgttttgcaaaatttaaacgtaaacggcagaaatactaaacgagaccaaaataattaataagtttttaataatatccttgttgtgtttaccattattttcgtggacgataaataaataaaatcaacaaaacagtctaacgtagagtaactagagaaacctttattttagggtataatcatgatgtttatgtgaataattaagattagtaaaagctttcagtatcttcatatattaaactattggtctgtataagtgcactatgcgcttgttggttggttgaaccggcctcgcattcgaattagcatcctaataaatatcattcaaaacactagttaaaataatgaaaaaagaatgaataaattggatggaaaaaagcatcatcatgggatgaatattccattgaccataaggaatctcacttacatcgtgcactgccacgcggaggagcttcacttgttttcttgtcacggtcctaacctgaaattttattaaaggaattaaacattgctattaattaggtaattaagaccaaaatgaagtgaaaatagataaataaatacctttctaacgacgctccaagtaacgttttgagtgcaaggaggagtggtaagtgaaccagtgtatctgtaatattttctgcttccgatcttaattttggtgggatcaatcattcctacatttttctcagcctcctccatttcagcaatgccctctaattctttctccaactaaaaccaacccaaattttcaaaaacaaataaatcaacaattactgttggttccaatattacatatcgatgcagttaataatagatattaagttttttatatgtgtaccgatctgataaaagtatctgctcttccgatcttgtacaacacagtcacaacagccattcttctattcctgccttcgtgaaccatatgcagctcaagtgcaaacctggtttgtttgcaagttctaatacttttagttttgtgaaccgatcaagatagttttgatgtagttagtaattattatcttaatgaaatagttaccttcttccattaatagtatgttcagacggagagtgccagtgaagctgttgaagttcatattcaaaaccattgatcttaatagttcctgctccatcttcaaattttaactgcaacaggattaatcaacacatgattattggtttattaagggttacggtttttaattagtagaaactagaagcacataggtggctctataataatggcttctgtgtaagaataaaaagttacctagttttatatataaacacaacaaaatcaaacgaaaaaagtgtgtgctagcttaaacagaagatgagtccatgcatgtttatatatattattataccatgatgtcatggcctctgttcttaagagttgcatttgaaggattatagtctctattaagccttccaagatgagaaacaatgttaactctctcgttcataagatctatgggagattgcatctctccttttccacacatttcccattccggtttaagttctccccatctctctggccccttctcatcgttcttcttgtagttaaactcgcgttcgtcctctacatcaccattaagcaaattaaagattttcataagtaaataaaatagagagaaatttaagtcttacgtaccaacttctccgtgacttgaagcagcactcgaaatcgaaacaattgtgaaaatactaaacagagccacaaagaagatgcaactgattgatgagtagttcaccatctttgttttactgaagagggagatataaaagcgttacgttgatagttttagtctttaaaattttgatcgataagttataatgagcttggttgggaacacacatgcagctataaatacttattgagacagatgattttgtacggattactagtccacaagacttcccatgctttcttaattccttccggacgacatctttgacttccttgtaaatatgttttttttaatataatctgggaatagaaggcagggtgtgaatcaaagcctaattcatcaccaaatctcttatcactttcaatttgaataagaaaagaaaataaatcacagtgggatttatcttggttcattccgattttcaagatatggcacacagaactttacttttgaaaataatgaagacatattttctcattttaatcattatgttttcatttcttcatattatgatgtgtcaaatttcaaagatgataataataaaaagtttgacataagatatttttaatagctgcaaaatttaataattaaaaactatagtaattgacacataatacctttttcaaaattttaatggagtttttggtttgcaaaaataatattctaaaagatagaaggaaaccaaaaaaaaaaaaaaattggcctactaagtcaataacttgaaatctaaaaaaaatgttttctttctttaattttaaagatttaatcaatatttgtttacttcaggttttttgacaatttgttccaattatctcttagaggtattagcagttataaataaatgtttaccatacattaatttaagagttttagttctaaaacttttataagtggttgtgtctaaaaatgatcgatgatatttagataatttcctgttgttttcatcagttatatgttcattatactttatgaatatatataatctgctctatattcaagttaattaacacggtaaggatcgtccaaatttatagaaagtagaacaaccacaacgaaaaggtgatgaagaaaatatgtttcccaaaagaaaaataatatgaaaacaacatatgcgttgctttcctgcgtacgaccaattcacatcaggagtcaggaggactcactttctgaaattagtccaagaaagaaatctatttagggtggttggttaaaatttcagtatgttttaaaaatcatatagtaaataatagaaattccaccctaaggattcctcaaggtcaaagagccgtttcaccttaccatatattataagttcgtaaatgttgaaatgttccttttgataattctaatggtcgtatcatctagaaactaattattttacactatatcgatcatattttcttgattaatgtgaataatacctaagcgagtttgtgccttccttttttgaaatggtcctaccatgcatatgtcttaaacttcttactttttaactcatatggggaagaaaatgtagtttcatccggtaccaaatccgtgaccatctcttatgtgagctccacgtctctcgcccactacttgtttataggtgacatctgtgtccgaaagccgatttttatcttcgagaagatactatgctaataatcagccgtcgtttatatgctttatcttaatttaaacgatactgcaaatcaacttataagaaatcattcatctttaaaattttaatccatttaagcaagcgtactacatgcatcgttacaaaactcctatttgtcgttcgtaagtgtaaatatataattggtgaaaactcaggcaatatgggagtgaaaccagacttttatgactttgacatgttttcatgtcgtcttcaagaagagtctcctaattgcatcatgacgattgacgactagaaagagtgttcggttctagctagcatcataaatgagagttataatttttggtgttgacaaacacgaccgggacatagatcaggagatatagtttgtcttcaaagaaaacaaaatctagaaataatgatagtctttgtagataggattcgagtttataagaaaaaattagatctgcgttgaaattatatagtgttttcatttgatcgaatctcatgtttttttttttttcgttttcagttacacattgtaatataagtatatttatcctagatcatttgatcgaattatacttatcaaacttcgtgagccacgtggtaggcttgctattttgggcctatccctttgggcctggttaccgattacgggctttgtcttttttgtttgtttcagttaatgttctgtatttaaatttcaggctccaatttttatgggccaagcccactatgttggtgtcaataaatatgaaacgctctctgacaaaaaatggatcaattgggtattttgccccttaggagatacacaaaacttacaaaggccgccatgtgaatactgtcaacattgaaaacgttttcgttactaaggcataattgaagaaaagcctactttttgtagaggttattcatgggcctaagttaattaattagtagcccacacaatgaagcccttcctatcccatttaacactaaattttaatttctaattttgagttaaaaatatttttaatgatatatgtttatataatattaattttgcatgtttcatcaaaaatacgctttggaatattggtataataactgtttttgttaatatataaaatacccaccatatgtaaatgtctgcatatacattattatatataggacattgatcataaatgtaacgtcaaataaagttaacacttggacgattggatctaaaatatatagttttacagtactagtagtttgaaattgaaattgagagtcaacgaggatgtcaatatctgaaatgtgaaaattatgcagaaagtctaatggtccgtcgtcatcaaatatctaaattattgagttgccagcatttgataattcggcaaaccacgatgcagagccgttatcacaaaaaataaaatcaaagtctctccgacagcccaagcgctaattagaagaaaatatctgaattagtttatttgagttgtgacttcaactaattgaaattatacgtacataggcaagctgtgtataccccaaaaaaaaaaaaaaaaaacctcgagtatgtagctattagatggataagtccaagaatagcctgtttccgaataatctacacttggccgatgtggaatcttaatcaatcattagtgaatttgaattatagtaaggtttgcgtgatatttttgtttacggtgaaaacaaaaactacgaaactggttttgtagaatcaaaatttgataccaatttgccgtctaaacagataaaattgtggaaggtgtgtgcaactagatcacaaccataattctttgtacccaaaatcattatgtacattaaatagataaaacgtctgtttttcgtcttctttctttggagttcactttttactttctccaaacggtgggggcaattgtttcttcgctaagtcatccctttctctttttagagtctacagatttttctaggtttctcagataagtttacaaagtggttccttcacgaataaacgtagccctaaaactcacttatcctctagtttttgggagataattacgtggctcgctgccttttttttttttttcttcctcatgtcggtaattttgggtttcgaatacaagcaaatgaattttgagcattacatcactgttccgaagatccttaatttgttggtttttatgttcaaactaataaaaccatgcatgtcatttggcttaataacttgatgtcattcaaaaagtaaataaactggataaacatcttacgacttcttttatcggtcagtgaaaaacattattactaaacgctggtattataataaactggatgacattaaagttcatacttcattttgtaattagaaaacttctttctatttatatatttctaatctaatttatttattttccttacagtaattttaaaaatgaaaaagaatctttgaattgtagttaaatatataaatcataatgtgtaattctgtactttaatttaaattaatgaggtaatatcatggataatcattattaatttctctgacgtgttgataatcacattataattataggattctcttttgtccggtacacatatgtgtcagattatttaaggaatgtacacacatttaatggagaaaagataatgagctcatcgaaatagttgactttttcacaatttagacatgaaatttttgtcttttatcaaatcccaacttgttggaaatttgacacgtcagcgagattgatcgatacgcacttagtcgtttgactttttcaaatacccatcgctacaagagtacggaaatttgcgtgcaaccacattctaattatacgcatatctacatatcaatccaccgcaccgtctaatctactctatgatattttcaagaccttttcaaaaattcagatccgctagctactacgaaaatctaaatgactaaaataaaactcttaatcgttaactagatatgtttctataataatatatgtatatcatactgttttatttagtttgccgtttttctttgttctaaagtttttttttggtgtgtttaacactagtaatttttttgttctttttaatgttaaaatagatattttcaccatcacatatacattgacatacgtatctagggtttagatgaagacatgtacacacacgatattgatatttaactatgtgtttttccttaatcaacgatttcaatttttcacaccgaaaatgacatatgaaatcaataaaatagttctactaaaagtcctatatatgcaatcgtaagcaatttgaagagacaactaatgtgcagctaaggccactctaaatccgaccgccaaggagatcaattagtttattcactaaaggatcatcttccccttttgtgaatactatttattaccaaaacaaaacaaaaaaaactattcacagttacaatgacaaagataaccctccataattaattaggatcatagactagtaaccattcatatagaaaatatcgtcgccgttacttacgtagcctaaatgataactcatgcagtcatgctgttacagcagttcaaattaagtgtccaggttatgacttggtgaaagaggaccaaacttttaaaccttaagaaaagaagaggaaaaaaacaattagcctatcctgtatcactgtatgtaaccagacttatgtttggtttccacgcaatttgacggatacatgtttctatgataataataatgatagttttattactaacacaaccatattgttgactatccatccataaatcattaaatcgcaagatgagggaagggtagagcggtcatttggaaggatatcggcaacctttggtgataagcgagagactaggaagatgcttgcggcgaaaatggattcctcgaaaattaatatttaaatcgatagttaaccgttgagaatctccaaagaatgcttttttcattgtcaacactggctaggaaccctatataagccatcgtgtgattaatattcagacatcgatcaaataaacttgaatcaaatctcaaacttgcaaagaaacttgaaatattttataacaatgggtgattctactggtgagccggggagctccatgcatggagtcaccggtagagaacaaagctttgctttctcggtgcaatcaccaattgtgcataccgacaagacggccaagttcgaccttccggtggacacagagcataaggcaacggttttcaagctcttctccttcgccaaacctcacatgagaacgttccatctctcgtggatctctttctccacatgttttgtctcgactttcgcagctgcaccacttgtccctatcatccgggagaatctcaacctcaccaaacaagacattggaaacgccggagttgcctctgtctctgggagtatcttctctaggctcgtgatgggagccgtgtgtgatcttttgggtccccgttacggttgtgccttccttgtgatgttgtctgccccaacggtgttctccatgagcttcgtgagtgacgcagcaggcttcataacggtgaggttcatgattggtttttgcctggcgacgtttgtgtcttgtcaatactggatgagcactatgttcaacagtcagatcattggtctggtgaatgggacagcagccggatggggaaacatgggtggcggcataacgcagttgctcatgcccattgtgtatgaaatcattaggcgctgcggttccacagccttcacggcctggaggatcgccttctttgtacccggttggttgcacatcatcatgggaatcttggtgctcaatctaggtcaagatctgccagatggaaatcgagctaccttggagaaagcgggagaagttgccaaagacaaattcggaaaggtatatttatctatataaatatatattccttaataatttaggctgcttatgttacagatggatcaaaagattaactcgtgatatcgtataaatgttgtagattctgtggtatgccgttacaaactacaggacttggatcttcgttcttctctacggatactccatgggagttgagttgagcactgataatgttatcgccgagtacttctttgacaggtttgtttttgatctcgattggaaaatagaagaattaaattataacataagagtaaaactaatgtatacatcatacatggtttgtccaggtttcacttgaagctccacacagcagggctcatagcagcatgtttcggaatggccaatttctttgctcgtccagcaggaggctacgcatctgactttgcagccaagtacttcgggatgagagggaggttgtggacgttgtggatcatacagacggctggtggcctcttctgtgtgtggctcggccgcgccaacacccttgtaactgccgttgtggctatggtgctcttctctatgggggcacaagctgcttgcggagccacctttgcaattgtgccctttgtctcccggcgagctctaggcatcatctcgggtttaaccggggctggagggaactttggatcagggctcacacaactcctcttcttctcgacctcacacttcacaactgaacaagggctaacgtggatgggagtgatgatagtcgcttgcacgttacctgtgaccttagttcactttcctcaatggggaagcatgttcttgcctccttccacagatccagtgaaaggtacagaggctcattattatggttctgagtggaatgagcaggagaagcagaagaacatgcatcaaggaagcctccggtttgccgagaacgccaagtcagagggtggacgccgcgtccgctctgctgctacgccgcctgagaacacacccaacaatgtttgatcatacattccacccacggtggaatggtgaaggatgatcgcatataagaatatgtcacacagtgaaaaaaaaaaatgcaaatgttatcaatgcttgcataacattactatctatctttcatttactaaacaaaccttttgctttttgccttgaaatctttttattatatatcaaaatatatctctatgtcttgagatttgattattttgcatatatcattaatgatttgataatattggaactggaaactcctttgttcaattcattaaagaattacaccgcacaataaagactatcattgtatcccttaagttggtaaggtgggcgaaggtagggttaagaaatgatcatgacatttactttatacttagccttgagaggtgaccaactactaaattgtctgatttcttattatctctgatccctatatcaaactcacgtagaagtagaaatccagtgtatgtagttttcatttggcgtttatttcgtcagttggaaagtaggaaaagtgagtattgtgggatatagatgttgagaatggtagctttggcagtgctgagtttccatgttgttgatgtttcaataggatattaattggagataatttcaatagtttgctctaaaccccttagttggcaattcttttgacttccaaagttcatcatcctggtactccttgtacacaatatagtcatcacaatagttaaccgtccgtaaaacctatcaaattgaccttgtaatcaataggatcctcaatgattataaattctgaacttttattttggtaccattttgatgagtctaaacatgatctcgaaattattgctctcaaacaggaaatatttttacaggtttagaactggtttgttttgtatgtgcagaaagttttagaactgataaaatatttattttaacacaaattcatccggatatttgtatctaaatgcctttctaaaacgcatctataggtgatgataatatatagaagttttaaggatttgatgcgtataagcgtgtacaattgagtataacaactatttatatagatataattagtattagtaatctaattagctttaatatcgccaagcaacagttttgtttaccttttctggtgctttcacttgttctttttaaagttagcaacacgtacacgtcaaccaaaaagaacatttaagtgaaaaatcgctcgttacaaacatagaaaagaataatcaagaaaaacaaaaacaaaaagcaaaacgcaataaaagcaaatgatgaaagaaatggttctttattttccaacagtttatgtccatttcacataagtgaaattattaatttcttgatatcaatgacacatgatcaagcattgttggttgcgttccctttgtggacgctgctgcctccctcggtcttggctccatcagcaaacagtttgctttttaaatgcatgccaatctgctgctcctccttactatattcgccaacataatagtgctccgtagcgtcgaccgaatcgttggaaggagggaagaacatgcttccccactgaggaaagtggattaaggtaacaggcaacgtgcaagcaactatcatcactcccatccacgttagcccttcttcagttgtgaagcgcgaagtcgagaaaaagacgagctgtgtgagtcctgacccaaagttccctccagccccggttaaacccgagataatgcctagagctcgccgggagacaaagggcacgatagcaaaggtggctccgcaagcggcttgtgctcctaaagagaagaggaccatagatacaacggcagtgacgagggtgttggcacgtccgagccacacacaaaagagaccaccggacgtctgaatgatccacaaagtccacaacctccctcgcattccgaagcgcttggctgcaatgtcagatgcccagcctcctgctggacgagcaaagaaattggccattccgaaacatgctgctataatccccgctgtgtgaagcttcaagtgaaacctgaacataccatttttttattttaaataaaagggaacgattgacaaaataaaaataaaagggaatataaattttactcttatgttattcctgaatatatgtgaagttgtcaatttccaatcgagacagaaaacaaacctatcaaagaagtactcggcgataacattgtctgtgcttaactcaactcccatggaatatccatacagaagaacgaaaatccaagtcctgtaatttgtaacggcgtaccatagaatctacacgatttatacgatatcacgagttagcctattatatccgatccatctatgacatagttagcctaacttgttttgacatattcatgtagatagagatatacctttccgaatttgtctttggcaacttctcccgctttctccatggcagctctgtttccacctggcagatcttgacctagcgtgagcaccaagattcccatgatgatgtgcaaccaaccggggacaaagaaggcgatcctccaggccgtgaacgctgttgatccgcagcgcctaatgatttcatacacaatgggcatgagcaactgcgttatgccgccacccatgtttccccatccggctgctgtcccgttcaccagaccgatgatctgactgttgaacatagtgctcatccagtattgacaagacacaaacgtcgccaggcaaaaaccaatcatgaacctcaccgttatgaagcctgctgcgtcactcacgaagctcatggagaacaccgttggggcagacaacatcacaaggaaggcacaaccgtaacgaggacccaaaagatcacacacggctcccatcacgagcctagagaagatactccccgagacggaggcaactccagcgtttccaatgtcatgtttggtgaggttaagattctccctgatgatcgggataagtggtgcagctgcgaacgtcgaaacaaaacatgtggagaaagagatccacgagaggtggaacgttctcatgtgaggtttggcgaaggagaagagcttgaaaaccgttgccttatcctccgcgtccaccggcagattgtactttttctttgtgttggtcggctcactaccatctaccgagaaagcatagctctgttctctaccggtaactccatgcatggaacttccgggctcatcagtagaacccatgtattttaaacgtatcaagttcctttgagaaaattcaagtttatatgattgatgtactagatattagtcacacgagggattatataggattcgtatagctttgacaatttcaaaaaaaaaaagaaaaagtattctttggagattctcaacggctaactaaacaatattaaaaatacatttttttcgaggaatccatattcgccgcaagcatctttcccactctctcgctaatccccaaaggttaccgatattcacctctcagatgacaagtgacaactgtatccttttctccttttgtgtttcagaagtggattttttttttacatgtctgtaatacatattatcttataacaggatcaagcaccacatcgtgaactcattaaaatccatatttaaataatttttaagcgatgtcattgtgattctcttttagaccatatattcttcataatttcttaagggtatcaatgtaattctatatcacatcgtatcaagaataggaatgattgtggtgaataaactgctgtctcctggacgatttaatttgttgtggccttagctgcacattagttgtctctaaaaaatcaataagcttattacttcaacaaacttatcatatattttccatatataacactgtaaaaattagataattttgtatagcacatatagacataacttaatttgttcgatattttagttggttgtaatgtaatttgactggcattagcaatttcacatgtcctttgattatttaaacatggattaattaatgactttaatttgaataaatttagaaactttggatttcccacaaactatgaaaatatatgcattatgcttggatataaacataaaatatataagatttgacttttgaggtggtctgatttcgaaattcaaaatcttcttaattttttgggtaaattttgttttaaatggtttcagttgctggaaaaatggttgctgctttggaaatttgattaaacaactcagaccaaaaaaatcataaatataaatatgtgacataaaactgatcaatgaacaagaaacttcctaatcacgtgtttataagaatagttacataaagaaataggtaggtattaaatcgactcctgcgaattgataggtagagctatacgtcttgttctaaattataacccaaaatatattacaatgtagttgtagatgacgtcttaaatataacaagaaaaagtagttgtattcgtatattttatgccgtaccatttccgtgccactagcgtatatacatcaatcttggtgacgtggccggtgttccctctgttgaggcctgttggggtttgagaaaagacaaaattttgctgtccgattttggaaagtcaacttatcgatgatgtcacaccattgtagtataaatatagtaaatgtgtctatcagatacttgtcaaatcaaaattttattttattttaaacagcataattgtcaaatcaaatacgagtcaaaaacaacatttaaagtctggaaacgccggggcagatttagaatcttggaatgatttataaacctattacacgatcgaattaatggtttattaaatttcttggtaaagtgcttggtttagttatacattatgctaagttatctataggtcaaatataccatttcaatccaatgttatttgatttatttaacgtaataacaacgtgacggtataagaagaaaaaacgtaatgacgtcaacaaagaaaaaaacgtaatgacaacgtatgagttgttttattaagaaaatttcagatttaaagtgtccgtctaatggaaaaagaatttgattttccttcatcacatctatttgttacctcatataatttatgtatttgtatcttctcaaactacgtatattaatcgaaatacttaaatagaaaaaaatgaaattattacttaaaacctaattttagaagaaacatctgactctaagttttcattttttttgtggccgtaggtaaatggttattgtttttttttttccttaacacatgcagcatgcatggctctgccccgagactccaactggagctgagaaatcaacattgctcatcaacagttttagtaaatacacaaaaaaaaatacatgtttgctcatcatgcatatatacactcatgcacacgtttattaagtttagtataaaagtaggtgtttcttgtagtcatgcatgcatatatacactcatgcacacgtttattaagtttagtataaaaggtctttccccatatgatatcaaaatttatcgctttgtaaacttaatctgttgatcactaaatgttttatttgtcattgggttgttgtcaacttgacttctgattacacgcatctctgcatagatcgacatggatagaagtgtcaattgggctgtccaaagcccattggtcatgtccacttgaaccatttttttcatgggttttattggttggtctttaatggacaatggtctgaaaatttgtccaagaccattaaagaccattgtccaatggtcagcccatggccagcccatacaatgatgtttatatacaatgatgtttatatacaatgcattttcacacaatctcgttaaaagctctatttataaaaccataacatcaacatgaaatcaaaccaaaatctgtcatccaagttgcaaccttagatcggataccatcataacctataacaatctgtcaaagacatacatcatcaaatcagccatgtactgagaataataaacacataaccataggctcagagcttaagagaacagccatgcacctgtttcttcccagtcttgaaacgtttatgcaagggtggtgtttgtgtcctcttgaccttggatctcatcagtttctacaataagaaaaaccgagctactaatctaaaagttgcagtccaaaagccatataagtttactattataaacgagttcaagatgtgaatattaccaacgtcttgaaatccacgaaaccagtttctagtacataggagggcttgcacattagtaggtaaaaggcagcttctatatttgttaagcacacgactacctatactaaaagttgattccgatgccacggtagtgatcgaaatgcttaagatatcacatgccatcgatgacaattctttaaaacgcgagacattgtttttccaatatgcaataacatccatatctctaaaagagaccatatctaacacaggctcttccaagtacatatctaatggtgattttccagttccatttctttgagaaaagtaagagtaaaacccctgaaatatgaccaacaaaagaaaatatgaccagccgtatagttcaacaatcacaacagacaacccattctcactaagtataagaatgcattttcatagccactaactatcacaacaaacaaacatacaagaacaatactgtaaacacacaaaattagcaacttacatcatatccaaatgggatatcctttcgtgaagattgagaagtgcttgctgcaacgttgcatgtggttcttttataagctccaaatagttgaaccatcttatcacgcacatgagtcaagttttccttactggtcaatggattcagaatattataacaatattctaaagctgagaatttcaatcttggatcaagaactgcagccatcgcaagaatgtcgctgaaatcttcccaatatttatcatatttctccgtcatatcttccaccatttcacgaatagccctatcatgagaatcatcatgatctcccagccaacatttaatcgcccatacttgcataaaatacacgtttgctgtcggataagacgaacccgaaatcagctttgtaatctcagcaaatggtttcaaaaggtcacatatcagttctgctctttcccactccacagcagatgggaaactcttataacccctatctacttctgcaagactatgcaatacatccttaaactgaattgctcgtgagagcatatgataagtggagttccagcgggttgagacatctaaaactaaacttgcctcagtttgaattccaattgtatccatacagttctgaaataaattttctcgagtctcagatcctttcacatacttcacagtctctctaattttctccaaagctccagatatcacttccaaaccatcttgaactatcaagtttaggatatgtgctgaacatctcacatgaaagaattctccgctgcagacaagatgtttttgtagctttctctttaaaatgctttgcatagtatcatttgcagaagcattatctacagttaaagtaaaaactttcttctcaattccccaatctttcaacagctcactaagcttcattgctatagctactccagaatgtggaggcgggaaagcacagaaagataagatcttcgttttcagaacaccatcaacatctacataatgagctgttaagcaaatataactttcaacagttaaagctctccacaaatctgttgttaagcatattctacccgggattatagctaacttttccttaagcttaattttctctctttcataaatcttgtagacatcagaagctgcagtatttctgctccaaaattctatagaagggttaacatatgtaaaggcttctctaattctttcatattcgacaaacgaatatggaagattatgttgaactaaagccactgcaatcatttctctaaagaccatcatatccacctttctgctaattctaggtgtacttccaggagtcttctcacaagatctcatatgacgattcatggtattagtaccatttcgtctcagattcaagtgataagtctgctcacaatatttgcatgtaacctcagttttcccattaggatatttttgtcctctatcgaagtttttccagcatgcagcacgaaatctacttacactacttttacctctctcaactgtccctgaagaagcagtgtcatgaggtagtatctgatccatttctggatcttcatcgtccatttcttgatcctcaagattaaagttgtcttcatcaaccaagttttgagtatccaattccatatttctgacacaaataaagacataaacacgtttagcagtgataaacaaagactgaacagaggtcaatgggctagctccattagaaaagtacataacatgtgggaatatcttatccactatggataaaaaaagaagaacaaggatccttaaacaaaagcaataatctagtgtttaaacaaggatccttaaattagcttacaacacaaagggtctctacatattgatgtgcttcaattcataatgaaattcgaaatggcgaaccataaacaaaatctgaaaagtgcccatttgctagctagctctcctcatatccaaaaagctaagattctttcagaaacactaacaattgaaatttggacaaacccacaagctagtagaactaaccggagtaggagttgagagagatgtcgagcttggtcgtcgccgagagagagctttgtcgccgggagagagagcgtcgttgccgagagagagagaagagaagaaaattgatgtgttgaaaaaattgatgggccaaccataaaccgtgtgggctagcccattaaacccatagacaaaattggtctttagaccatataccccgttttcattacgggccgaccatggactgtccataatattgtggactgggctcagcccatggtcagatgaccatttgacacttctagacatggatcaacaacacgaaaatttgaatacagttaccataatcttgcacaactctccagattgttcccataatgtttcacaatatggtcatatactcatattgttatccacgtacgatgcatcaaaacaaaataatatcttttcaattcctacaaatatgactatatatactcacgccaaaacgcttagaaagtagaaacttgcttaacccaagaataaactcatcatagacacggttaatcaccatatctatttttttatacatcaatttattaacaaacattcactaacaaaaaaaaaaatacatcaattcactaacaaaaaaaaaaaaaaaaatcactataacaaacaataacttttttttcactggccaataatcaaatctgtcaccgtcaattcagtcaattctaggcctcatccgtagataaaatctggttatcgtcgatccaaaccggaaccgagcaaaaccggtaaggaaaacagatttctcgaaaccaacgacgtcgtttacaactaatcccgtagtctctggacacaaacacggcattttactcatttgagcagaccccgaactcttccactctccagtcacagccacagaggtaaatctctctcctttttcctttttttgctcaaatattttctgtcgcacgaattgctaatccaaggatacgtaatcatgagttcgtactcaatagcaagtgctatatctcgcatatcacctctaattcgtttcgttaaaccttattccaccggtttttctttcatcacttgcgcttgcaacagtacccggaggccaaaggtgtctgctttttcggcactcacttgcttgtaatcgttgatttggactttttgtgttgattaatcatctgggtcgattcgattttgtagagatttgatcagctttgtgtgttttccatggcgtcggaagcgagggaatcaccagcaaacaatcctggcttgtcaacgaatcgagatgaggctacaaaaggatacatcatgcaacagactgtaagattcctctgcctctatttgcgatttggttgatcatgacctgtaatctccgtatcgaaatcggaagttatatgtcttggggttcttaaggtgaaggatagatgtttgatctcagttagggctttcgtatgtgttatctagctgcttaatcgttgagtttacatgtttgactgagattttctaaagaactgttgtttgatctgctctagtgcttgacattgtgttcatgaacatattttgcatagtatctttcgatttggtgattatggatgaaatgaaactatgataatcatcaaagtagctttcatttgaagatataatcttaatatctagaaacgacaagaaagtttgctagagattgaatcaagttatagatttcattaactcttggtgtggtgaagaatgtgtcttttcattgaatgtaccctgtagtatataaacattcggaaaaaccgtcttttgagtgttgttcctctctgattaggtgttgtaagccgtcttgtatctcctttgtttagatagtgatttttttgtgctttcttttttccacttcaacaattgatattgttccatttttccatctttttgtaactctcagatgtttcggatcaaggaccctaaggctagtcttgacttttactcacgtgtgctggggatgtcgtaagttttttccaaatcttgaatcatctgctttctgaattcctcatggaagcatactggttcttctgttattaagggttatgggctcttatattttacgttattccagattgctgaagaggctggatttctctgagatgaaatttagtttgtacttcctgggctacgaggtagaactttgacccttacttagttatactattcactaagctagaggtgattctagtaaaacaaaaagtatggaactttgcgagcaatctattgatattttaagtggagttaaattgttattttttgaaatattgatttccttgttgtggaccactcagatgaatagatatgtttctcttgggtgcttaatcctactgattttagtggagagttgaaaaagctgggtttgattctttattatggtacaggatactacaacagctccaaccgatccaacagagagaacggtttggacatttggtcaaccggcaacaattgaattgactcagtaagaaacaaatactaatcccttactttctctctttcctttcttggattgaacatttcttacatatgaattttacttgcagcaactggggtacagagagtgatcctgagtttaaaggttatcacaatgggaactctgagcctcgtggatttggtaacctcctcctaaaaatatctctatcttattatctctctacattcagaagtaactgaatagagtttcggtaggttatgttttaggggagctttaaatatggtggctagaatgtatagcatcgatatgaaccagttaataagcctaaaaattgaagcttgagtaatggcaagtctaatattattacacatgtaaaaaagaaactatgttgttgtcacagggcacattggggttaccgttgatgatgtgcacaaggcatgcgagagatttgaagaattgggagtagagtttgccaagaaaccaaacgatggtactactattaccagctgagtccaataaacatttgaaattttcttttttcttttgcaactctgtttggggagtctatatttaatcctttatttgatgaaaaccttgcaggaaagatgaagaatatagccttcattaaggatcctgatggctactggatcgagatctttgatctcaagactatcggaactactaccgtaaacgcagcttgatctcaagactatcggaactactaccgtaaacgcagcttgatctcaagactatcgggactactaccggaaacgcagcttgaggaagtagcgattgcgctatttgtgttcttttgctcattccacccgagtgtgtgcatacagttaaagaattttcatgtttcatcgaataatcggaacaagatggtcgttgtttatcaatgtggtctgtttcttgacatatatataatgagctaggtcgttatcattgttaaaaataacatacacgtccattattaatgacaatcagtttggtactgttctaatctggtctgtcttaatcactaactaatagattgggtttgctagggggcgaggaagacggccacaatcggagaactaatcaaagactgtcacaattacaacgataattgttagttagaaaaaaacattcaagactggaactaatggtaggggctgcgcgaacgcaaaccccctctgccacaaataatgacgtaggctcttcctcaagggaagaccttaagcatagcacccttccggtatgtgcaatggaagtcactagcctaggccactcgtcttcttgatcgcgagttgaccccgtccaggtaagtaatttgtatggagtcatgactctcttatttatactcagctttagaagcctcctttgtttcttgttaccgatgtgggacttttgccaaactccacatattccaccgttctaaatctttgaacatgcacagcctgtagttttcgctttccacgcacatcgtgtcggaaaggcttaatgaatgaaacgctaatattaagctatcatatactgggccggtctctccctggcccaaattcaattatttactaggtttagaatgaccatgtcacacttgggcctttctcgcgattcttctctagggttagggtttgacgaaggcaggcttgaaagctattctacacgtctagcttcaattcgccattgaagaagccataatttgaacaaggcggttttgagataaattctaagaacaaacgtggtgggaaaggtgacaagtctaaatgaaaaataggatggattgtgaggaaaacgttgggaatgaatcgctagttctgataaaacaaggagcagaagctagggtattggagtctacattttctggaagaagatccattgtgaaagaacgtttctcgaagaaatatcgccacccgattttggatgccaaactcacactcaaacgcttgtatgacaaaggcaagaaagctaggggtttgtactccagtcatctatgctgtggatactctgcttcactctttaacacttgagtacattgagggcgtctctgttaaagacattctccttgacttttggggcgaatggggttgttgaggaacggttagatgatgttgctactcagattgggacggccatcgctaagctccatgatggtggcttggctcacggtgatttgaccacatcaaatatgttagtcagaagtggaacaaatcaggctgatttaatcagctggtactaatcgattttggcttgagtgtcacatcgaccttgcctgaagacagagctgttgatctaaatatataccttgcctgaagacaaagctgttgatctaaatatataccttgcctgaagacaaagctgttactctcaatgcattcttcatgcgggaatgtgatggatcgtatactgacagcgtataggaactcctcaaagcaatggtccgccacatttaacaagctcgcccaagtgcggcaacgagggagaaagcggactatgattggatgtggccatgagccaagatctccaattgtcctgtccttaaaactttgagcacaaagccacccaaattctgctatatgatcgaatagaggtgggaagacaccatgccttggatgtctaaacacatgtaacactgccttgtatcatttttcgattgctatccaaggttgaaggatgatatgtgatgtgtgatcgctttttcaattatatcagaaaacaatgcagaaaataagaaaaggaagatttcattcattgtatagagtctccatgataccaaaactaaaaattaaagtggtggatcttgaggaacaaggctctgaaagtagctaatgcaacattattttttcacctacaagcaaattcaaagaaaatttacacaagagattattttacttgcatttatgagagattacgtaaccacaatggtatgtatatacgcacctgaacatctatcttaacgtcacggagaagctgtgcagcaactgtaccataccttctcatctcccattcacttagctttccatcccgtagtctcatcaacaaactatcttcattaagacgaggaccatgtgtaacaacagcttcctcttccaccctcttatggcattctccggttgggactttcgtctcacactttgtttcgtctgtgtctataacaacttcatctcggcttacgtttccagagctctcggcagcagatttctgtgccatgatgtacagatgaatgctcgggtcttggtattcaccatccatctgcagattgcgttccagaataagcggttgtatatttcatgaaacttaaacagtaactgtgccatcaacgtaccttggatctcggtatggttttgacttcaaagttgtctttccacatctgaagcattttctcatgaacaaccgtcgaacgtatctcatatcccaactataaaacaacaacaacgaatgatcttgtagttccaatgatatcttaaaagcaaatatcccaagtatcttaattcataccataactgttgtctttggccctgataatgcaagtatcgtacgcaatagcggttccagaagctgctcagaatataccttaaaaccaaatttaaggtgaggtcagtctcccttgagctgaattcagtctttctagattacatgattagagtgaatcatttgaagattccgatgaacttacaacatcagtaccgatgacatagtcaaagggaggctcaacggccgttatatgatcttcgtttccccagtcgagttctgcaacccggagcgatccaaatgctgccacaaggaatgaaaacttcattagacagtaattataacaagtcaagattttcttgtacctggataaagtaagcatcacatcgagagttagttctacaaacttttccttggcataagaaaatgaagaaagctgtagatagaagcagtaaaagaagcgagctagctactagagaataaagtattgacacaaacctgaaccaggattcatctgtacgattctggacgtattccattctacattcctctttagcagtggtaatacctccttttggtcagttgtaaccacatcacaccccagcatcgccaaagctgacacatgaacacaaactccaattgaagatgccaaagttccagtttcaagcaaagatatagtcatggataagaaaggggaatactccagatatcaatacatacatgtattacgtaccaaatcctgcaacgccacaacctgctcctagttcaatagcacgtttccctttcagtttagatgaactaaaccttcccttcctgctatttttcccctgtaaatattttaagcgtcaggaagtcagacaaggctttcttgttaagtctagtaaatgactatttgtaactaatctagggtttgagcaggaggtctagctttgccagactaacaacagaccttacacggttagttgtggaagggttaaaggggagcaaggagagtgcattgaaatcattctgtattggtctaggtctctaggatctttgctttggtcaagagttagacactttcctagttaatcaagtctcttctatgttgtagttctttggtaaataaaataaagaaggagttcactggttcataaccaactaaagcctcaccgaagatctattattaatgagtaacagccctaagttaccaatctaaattacacagtataaagaagataatctctgaggagaatcctagaatttaagcgggatacgaaagatctatttataccagatatttggcaaacaccatggacgcatcccacacggtcgttcctaaatgcttcgaatttggatcctatcatgtagaaaattgtagcatcattgaccttaaatgtaagaattcaaggagaatataagagtcacacatacctgagcaaagtctaattcgtgccccaaaacctcaatggtaacagtacaggtgcttggagaatttaaccttaaaagacagcaagtgtcaaatttaatcaacttctcaattggaaaaccttggctcaaaactcaaaaaaataactgaagtatttcagaaaaatgtaaaacttaattctcaaatgaatctacaagagaatctcactggcaaagattttacctgaaacagcaaagatctcgacttgcctactaacgaaagacagcaaagataacaaccaccgaagaaattaaagcttctataagctaatatgattgttccgtaaccaaagaccattttcatatttgtttgcgcaaagcttataacaaaaaaaattgtctgataatgaatcataagccaagttagaggatagataaagtggaatacctgtcgggatccatttgttcgtcgtccgatcgaaacacaaactacggcgatttatcgtttcaagtagattttcagtaaaggcgtttaagttccagtcgagcatatgggaaacgacgcccaaggccaaaacctctgcctcaccaagaggtgttaagccttttgaggttttaagccttttgaggttttaagccttttgaggtttcgtctttttacacttcggcccaaatccagtttaatgagttaatttgtggacctattacaattacatgtttattggttttaaaacctacggtttaggcccacctactatacagtatttaactatttatttatcttgcttcgagtgagactacaaaccagaggctcgtcttctgctgacaactattaaactcataagccaatgatgtagttactgtatcttgcctcaagtatcctgtttctactgtaaacatattccacatttctgccaatcatagatagctcagtgatgtcaatcagggcagtgtttttattcattccagagtcagttgatgagtgtaccaatttttttccagaacctttcattcacttttcctaaaagcagttttacataagcagttacagttgaaaactcaaacacgcaatgtgcatcattagcaagttacgagcaatgtcgtacatacgaggaaatgtgctctgaggccagattactgttgttcaatcatcgtcacctttgacttcattacttggatgattgtgtttctgagcttggtacaaatcagcaatctgaaaatgtgcagggaaaattgagaattagaaaaaggaaaagagtttcaaaaccagtctggtcttgtctttccagtattgaaaacatatgagtgtaattagaatgaaacttcacctgctcagatgatgttgcttcctcgggcttcttgtcttcccgtacacgaagtagacgaggaaaacgaagagaaatccccttttaacgaaacaaaattgaaaaccaatacgtaacaatatatcagcagagatattcaaaccaaaaaggaaaaagaagaaaataagtcggagaaagttaaaccttatcaggatccactatgccagtagctgcacggtgcacagggctaattgttaagtcagctgctttcacttcccagacctttaagcaaacatattttttacctttcatttcaacccatacgatagaatggcgaaactaataaatataagataacattttgagtacaagcaaacataatcctacctcagtgggctcaaaccaaacatctggattgaggctgtctccaactcggtagtattgctggatatttgaatcattacaattaaataagaattcatgctagagacatatatgataaggaagaagaaaatatcctacttttggagtagcaatcacttgagagcgaagactggacgaccgctcgtcaagcatggcatcagaaaatccagtacctagtagcccaaaccgtataaccaaggtttaagaaacttgaaaaactgaacacacatacataatatgaaataccaaggtgtattcatgtattcgactgaccaattttacaaatgctctggaactcttccttatcaacatcatagcaagcgagtaaaaatgcaccatagacacctagaaggaaatcataaggctttgttaagagcatagagaatgaagaatgtatcatccaatgtattttcgtggttttcacctgtgcgttttccacgtccatggaaagcagcaattggtacaagatccacagagtccccaatgctgcacatgtaatcctatagtcagtaaaaaactgttcgatttaaacttttttaagaaaaatgtttaagagagtcttgcctgtccatatagtctttcttcagttttagccaattatttgatcgctttgcaggctcataggtagcatctgagtccaatgttttaatgattaaaccttcgcagctgcaaaagaaaaaaagaatatatagatgaacgggaacatcatagagataaaaggcataggcctatgtaatagacataggtgtagagaaatcacaacatgcgtgggtcaaattgctaaaaatgcaattttcatcctgaaggcaaatcatgaaaatcgaaacagcatagagatattgaagcagaactcaatgtcatatcatatatcactacaggcatggtcaaattgttaatttatcatatccttaaacatgtaacagataattggataactatctaaaatagaatacccgaaatgagtaaatatctaccagaatctctaaatttatgtgaactcagatgaaggtgaaagatggtgctaaagagaagatgctaggcaacaatcagtacgagtatgatcaaattgctaaattatcatacccttgaacatataaagataactctctaaaataaaaaatacctgaaagcagtaaatatctaccaaaatctctaactaatatgctactaaagagaaagtgatatgcaacaatttacaccaaagtttactgcactttttagagatacagagaagtgtcaagagatatacccaacatcaacagaagcgtcaagaaacttttgtatttcatcgatatcgttagatgttacagcagttgcaaactggaaatacccaggatcttcctcaaatgattcgtatagcttctgctagaagcaaggtgaacacaaatgattacatatttgcacaacaagaacttgactgcaaccaaagaaaaacaaaatattataatgatatacagatattgctcacctctcggcgaattttaagattctcctggataagttgttggccatttagatataacatgtcaaaagcaaagatgcatacgccaaccttgatatcattgacattcacatttttacgggctcgagtgctcaaaatctggaaaaagaaaagaaaaaaaaagagagagaaaaaagacatcaagtcaaatagtttgaaatagctaacttcaactaatgtaaattaatccaataacaggagctttataacaattgatatatattaacaatcctcttcacaccaacactaaacataagcaaaaattaggtgaatcaccaaaactgtctgagtgccattaaagatccataagtgtaacaaggtttattcagtaacgttggcaaaattaaaggttagacagtgtccaaaacccgaaaatctggtctaaaagagcattacagctatgcttatttcttaattcactggctaacaagatggaaactctaacacatttaacatttctctggcatttctataaaataacataccgtaaatgaatagacaaaatataaggctgcaaccatactttaatatcagaacgctattcacttatgagttacctggaacggaagaattttctttttctccctgtcgaaagcaacaacttcacaatccagaataaaagatttcacagaaggcttctttaatctgcattgagatgtttcactaacttcagtagaaagattgaatctctaatgttttcaaccagttacaccagatgtttaccttgataacgcaagagcaacatccgggtacttcccagtgtttctttcagcatttcgactgtatatctcaaatgtaccatcctccataaaatgtatctgcagaaattgattgatgataagccataccatatttaaataactcatatctaagaatagcattcatcctaattcagtagacaccaaatatcacctgtgcacgttccccatcatatttgtattcacatgtgaaaacgatgtcctggaatttattcagtatctcagctacacctttggttggttttgcaagcatgggtccaattggaacacccaatgtaaagttacaagtttttggaagattccacacaccgccacttagaagagcaggaacaataatgtcatagacaggaagtacagtgaatacttgtttaacaatctttgcagcctacaagaacagagcagaatgatggatccaggaaagaagtgtaatggcataagattacagaaatgcatagaaggtaaattgtgacgtctctcaaagaatactacatagagatcctacagcaacacaacatccttagagtagctcagaaaatatatttttactcacaaaactcggaaagaaggattctgatatataagtgggagatacaaaaacaaaaagagatagcagacctcttctaaaggagacttggtatttgggggtggctttgagtgctcttcattatatacagcggcttgtcccaatgcggctaagacagtctgacctgagaaccctaaccgcaattttgcctgcaaggtaaattaagaagggcgaaataaggaacccaaacggataagcagaaaaatagtggcggttgatgcatacctgaagtaatcgtgttaagtaaagaggttcacagtctgttgtcgccacaagaagtgccttcattcgattcttcttcttttcattactatcttttccactttcctgtaatagttaacatgcaatagtcccactcatcttctatgcagtcagacaaaaagacggttgactgaatctcaattgaaagcataaacaaaatttcaagcattcaaaagccacaaggttataaataccttagcaatttgtcgaaacgtatcgaaaaccttgacaacagtcaatggttcgggcttgaacatcatagtctgagtcgaacggcttccttttgctacaagtcccaagtctcccagttcctataaatcaagttcaatttcagaactgctaattttcttattcaaaaaccttatagcaattccacaccagacaagctcattgaattacaaggcaacaaaagttttaaaaagtcaacataccgtattctgcttcttaacatgatcctcagttctaccaaaagcctcagagatagccttgataattgtactctcaccaattcccaattctacaccttcatgagccggggcaatctcattcgccgaaagataaacagtagcgaccaaatcctcaggagtagtggcaataacagttctcaacatgttacacagaatatcagtaatcacaatccggccactttcatttgagatcagatcaaaagccaatgcgacaaacagaaacggaactctctcccctttctcccagcaagacattttttcaggatcgaaatcattcggcttcttcttcagcaatccaattttgctcttcatttcgtctgtcttgctcaaagtcttagcctttttcgctcccgtctttgaatcctccgcaattgacgatgtatccgatctgggatttgcagaatcagaaacaggctccagcagatcctccgtttttggaagtgtaccttcggaaacaatagttttgcccaaattagcatcttgggtttctccaattttccttttgttcggcgagcgagacaaattagttgtctggggagtcttcttcttggcggctgcacgagcattggacatgagagcatcaaatgcagaagggcgggaagaagacatggctctatggcacgagctaagacgcaagtgggaaatttggcggctaaaagagattaacacggaggagaattgagagatttgggttttagtacagagagaaggtatgcatcggaggtaattcgacgatcgaatcgctaacatcagtcgattttgaaattagggttttagaaaggacaggtgttgcaagtttgcaaccttgaagaaaggtgataatatattggcggcagaatttctcacccgccactctctcctttatgttgggccaaattaggaccacctgaagaagcgggctaagatatcttaagatggttcggatttgccgaaagaatacgattttttatccagagtttctacctgtaattactaattagggttagtccaaatctttaatagatcccaatgatcaaattttatttttttgaaaacttcaaatttggacaaaattgtgatgattatttcaaaggttattgtaaatataatattttataaattacatcaaatgctatcactaatggatactcatacactaaactgtgccctagttttaaatttttgttattgggcctttttattttatgtgggtctatgatatggaaaaaatatcgttatagcccaatagacagtataatgtcagcccaaacgtgacgcgtatggttatcgaactgtgaaatctaagtatcttactcattcgcacaatgagcgcgtagacgccacctatccgaaatccatgcgaaattgctgttttccgtaaaattaaaaaattaagcgcgtgaagggctgtttacgagttcctcaacttttaatctttatcttgtttaattggccaattaggatacaaatcttagtgtagaattaaaataaaacacatatttcaataatttagtggttgcacatgcaccctgtatttcttcactaaatccgcctgttaatttgtgggatcgatgatttaccttctcatcacctagtatatgtatttctcccctatacatgaatgatgaacatgtgttttgtagtccttacaacacaaaaaaatctattgtgtgcttcctataagatccgttacactttgtttgtaaaggatcttaatttcaataaggaaaataaaccaagattgaagctaactcaatttcaggataaatgcttctcactcttgttgttggacgactaacacggaggctctagaaggaaaatattcagatgctaacaaatctccaatgactccaagttcttcgaattccatccaatccccgagtcctctggtgactgtagtaccaaccccacttcttcgaccgactatgaatagatcatagtcgtaagacacggagtgcaaaattttggatgtctctgtgccatctcccaccgtccagtcaatgatggttgacttatctccaggcctttggtcttcatgacggttcatgtctaccatttggctatgaatcctcaagctactctcatcggcataagacgtagggatcagacgcaagaccgttagaatcacttgttggttacctctcatgtggtcagctaatgccagggcctctttgtcgtcattcccacccacgtaaatcaagcacacctgcatttaatgtatgaaaataaaaaatattcaacatcatttagaataaacaaaaaaaaacaaaaaaaaaagaatgtagttacttacacggcacggagattctagggctttggtttgccaaattggtttgcgataaacaaagattccgacagaacaaggggcgcgtttcagaacattaagattaagacttcttagggtttgatcgtctgagataatgacatttccgttaggctcccaagtgcggtgaaacgagaggagaataagattggaaccttgactaagagcaaaccaacatatttgttcatgcatctctttagcggaagttaaagacgtgaacatgtttatggaagcggagtcccaataaacctcttgaaacagttggaaagagcttatgacattttcggaataagaccgacttccaggctttggtttttgaagctggtgggagataaacgtgggagtagcttgacccaataactctattaggtgaagaacacaacattccattggagagtctttagatggggaagttgctctaagaaggctaatcatcgatgttatgttgtcaggcttgttgatgcacaccagcgtttgcatttctggcttctctttcaagtttcttcttccgtaacacacaaatctcttagaccggtcatacaggaaatgtatagccattggtgttaacaaagagtttacgagaatgtatacgcccaggagcgacaagacctccagactaatcctctgttaaaaatgagaaacattaaaacagaaatatatatacaaattaagatgatcatcatatccgttatatgagtatagctaaaatattcttacgtctttttcgaaggctgtaagtacgtaacccaactcgaaactactcttggtgcccataatgacacctaggataattgagtctctcaaaggtatctttgtagctaaggcggctaaaaacgaagtagcgaatttcgctatgtatacgatgggaaggaaggaaaaacactcgtacatatgtccatggagatgccttccatttccaaactcctttcgtagaaatgaccaatctagtttgatcatgctaagtgatccaaagaggggtaaaaaaatgccctcgttgaagctatcgaatttttgtataaatactgatcctaatggcggcccgttagggacagccaaaccaagagcaaatgcccctagcggtccgaagaataagaagcggctccaataaagataagataagtaagcaagcaagagaccaatgtagagatagacgttcttcaccggggctccttctggcgtatgtcttataacccaaagcataaattgtcgcacaaggtacacaaaaataaagaatgccataaaagctaatcccattttcactccttgagtttcatcacggctaacgtaagccgatacagtcaagaaaaaggcaagcaaatctgttaccattcccgctgactgagctatttggccgaaatcagtgtgaactatcttgaggtcagtaagcaacatgttgacgcaagtgaaaggcgtcatgctcattgtgaatgtcattacggtatactccatttctgtcatggtcagaatacttgatttctctctagatgaataaaggagttttcctatttgccatgggatgatcattgaggtgatcccaattacaacactcttagttcctgactttttcattattccaacatctgtagtcactccccttagaaaccaatctaggacaaaagcaaatgcgcctatagtatcaggaacctttgtcatatactggttataatggataaatatatgctttaaacatggtatttgcatagatccaaacatctcacttaagactgctccgaccttcaagaacaagaaaagaaaatgtgttatattattcgaacatccccaatgacatgcggatatttgaaacccgtaattacgtacaagcatcatggaggtgaacttggggataggaacacctaacttcttgaacaacatatcaaataaacgccataataggaatatggagagaataatgatctccaattgtggaagagggtactcccaaaaatccattcccttagatccggaagccattttctctgcaacgccatgtgagttcaacattatatgtggacttacatcgcaaaacatcttcgtccccatctctgctcttttctcatcgttgttccacatgaactctttgcgccaagtcgcattttctgcatccatttgggacaaatcttgtctacgtaaaaccaaaaagaacaaaaaaaaaaattgacaatgaaaagattttgcagtcaaaaaaagaactaaaattaaaaccggtctgatggtttcacacagatcccaaaggatctctaaaattaggataagggtataaatatagggattgtctcgtccaggtgttgtctttgtttttggcgcttgtaagttgtattactttaaaataaaatgacctctttaggcagtctaaataaacgctttacccatttttaataagatgatccattaattaagacctcaaattcaatcttttatcaaagggaacagagcagagtactctgttaggtaccaaaatctctttttgttgagaaaaacagagtattttgctctgttccctctgatatctctaacacatactaaacttaattataacgtgacaaagtgtgtatgttaaacagaccctgttactacaagagaatatatatttttgaattgtgataacaaaggcagctatagttggaaggcgttatcatagagcaggcactgccacaagaaattactctaatcttgttaactcaaaatttgattaaaaaaatcgtgaagtttatatcatcatatccagaagaaactcgaatcaattactccataacttcaagcagcctaaaactaatgtttattgatgtagagaaatacaacattgaaaagctgagcattgaacatatctcgcattatttcttagaaagattttctcctttggctttttgtatgatgaatgtacacttgtttttgaacaaccaacactgatgcacttgaaggatattcatgtgatgctaataaatctccaataggtcccaattcattgaactctgtccattcactaattccgctagtagcctcagttcctattccgctgccgcttccaacgataaacaagtcataatcatttgccattgctcgtaagattcttgaggtctcagatccatcagaaaccgccttatcgatatatgtcaccttggcatcattttctttgatgttggacccaacgatgctagtcacggactcctttaggttaatcgattgctgttgctcccactcatcgttatccatttcagaagattttggaatgaatcttatgatcgttagccttgttcgtttttctgtcagtctcattcgatttgttatcgccaaagcttctctatcgtcttttccaccgttaaaaatcaaacatatctgcaaagatgagagttttatcaggttaaaaatgctaatatattagtaccatttcttttgttcatcataaatggtaaaggaaaatgaaaagattttctttcagcatttaatttcatttagacgttgcaaaaatattcttttagattttataaaattctgaaatttgtattttcacgtacccaaacggataattaattagttttcaaaataaaatgaaaagcaccttgctgtgggacttagccatatgagattcaacgatgggcttgcgatagacgaagattccaacagagcatggggctcgtctcaggacgttaacgttgagcattctcagattatcatcgttggagataaccgtggatcgatcaacggaccaggttcggtggaaaggaagcacaatcaaagataggcttctggatagggctagccaacaaatgtcctcatgcatgtgttgggacacggagacggaagtgaaaatatccaacgatgtgtattcaaagaattgtctttggaagccacggaaggagattatgacattgtcagacagagaagtacttccgggctctggtttttgcaactggtgggaaatgaacataggattggcttgacccacaagctcgacgaggtgaagtatgttacacgccattggggaatcttgtgatgggctaaaagtttccaagaggtcggtcatggaagttatgtgatcaggtctgtagacgcacataagacattggagagccgcaccgtctttcaagatgcccaaattcctttttcggtagcatctgaatcttttggttgggtcatgcacgagctccaagagcattggtataaagatagagttcaagagggtgtaggcagctaggattgtgaaaacctctggccttattagctgtgaaacatgtccaaagatttgattaatttttatgaaaataaactaattcttctgactttaaatatatatagaagagtttaattgtacgcacctttaattcaaccgcgtacgtgtagtaggcgagctcgaagatccccttattactaagcacaagggctaaagcaaaagagtctctcaagggcattttaaaagcatacgcggttatggtggtaacaacgaattttgtggtattcaccaaaagaataaaggaaatgacctcatagatttgaccctccatccgtattaaatctccactctctttgaacaaccgtaagagatctacttgcatcatggttaatgatccaaagagtggcaaaatagagccaagattaaagctctcaaacttttgaatcaaagtagtacctaaaggatatccatttggaaccgtcaagccgaaaacaaatgatcccgcgggtccaaaaagatgaataaccttgttaaaaaaagtgaagcaggcgaaagcaatcccaaaaatcgagtagaggtagaaatccttgaccggcctcccttctggagtctgcttgatcacccaatacatagccggccgcacaacgcatatcataacgacgacaaagaggcagaaacctacggtttgcatgaagccgtacaatttttcgtagtagattgcattaaaaaatgttacaccaaaagccaacatgtcagtcaccatagccccagagagggctatcctcccaaactctgagtgtttgatctggaggtcttttaggagtgtgtcgatgctcgtgaacgcggatatgctttgcaagaatatgatcaacctgtattccatccttaatatgcttgagtcccctcttcgttctctatatctaaaagtgaggctgccacaaatcaagggtataattactgtaatgaatccgatcacactagaccttttctccgtcctaaatggcaattcggcatccatggtcacacctttgaggaaccaatataaaacgaagccgaaagcccctagggtctcggccacctttggtcggttatcatcagggaaaaaaatgtcatggatccaagacttgttgctgaaatggcaagtttgacctaaaattatccctgccttcaacaacaaggcattacaacgtttaggaatatgcaccgtactgattttaaaatttaaaacgtggagggaagagggagattaagaaaactcacgatcatcatatatgtgaatctaggtactcgaagaccaattttgttgaatgagatgtcgagaagccgccatataaaaaaagtagaaaagattaagatctcgagattcgggagcggatattcccagaagttcatccctctcttgaaagtcataacctcccatatcccgtgcgaatttactatgtgagggtgtgactcgcagaagatagacgagttcttgtcttcattgaattctccccatgacacgtcccaataactcatgtctatctcctctgtagccattttaaggagaaagacaaaagttaacgaagagacttgcttagggatcaagaagatctaatggaatgatttagggtttgtaattcgattgggaaagaagaagactagggatggttttgttataaacgttgactaattaaggtcgaataaccagcaaacaacagatacgcatctcaggtacagttaatatttacccattttgttttctttttatagcttcattcttctccatctcttgttccttgtcaacattagcacacgtatgattgtacatcgtctatttcaccaatcaacaacgccaaagctatacatataacgatatatatttagggaattttgcatccacttgcacactttctcagggatatatatatttttgttttgacaattttttctatgtttggtgaaataggaacttatactttaaaatcaccatacaaattaagtcattcaaacagctaagcatgcaaattaaaccaaataatatagcaaaggaaaatggatactaaaagagtcttactaatcaaggcagggtaagataaataacaatataaactaaagaatattgtacctaggtcaggataccaaattactctcttataaaatttctccaaattcaaaattactaattaatgcttgaaccctacgtatacgtaaagcataatcacaggattaagattcttccaagtagttaggcattaaatattcattggctagtcgtatttgtggtcttaagactataaagaaatgagaacaagtgtaaatcacctacaaaccattttgaactcaattcctattggttggtaatagattcctctaaaggttttaattgggtaatttcattgaatgtatactacgtgcgtgaaattctcatcatttttaatgatcaaattggtggcaagtaggtcttttaagactatatactaatttgctatgtaatttatttgtctagtttgcttatttttgccgtttttctttattgtatagcgaaaaggagattaaaacttgtaaaacatgtaaatagatgtaactctcacattgaatgttaatttaattataaaacatgtactatttttttctgatttcattgtttttaaaaaattatgtggaatcaattaaatttaaagtcatatttgcaaatgttatcatcacaaggccacggagacgaactgtcacttaaaaatttggggctacaaatgtgtctcgtgtgagaagtgtatttctattttttgtatcttataaatgaataaagagtagttgccaatgtaatatcatctacaagctacattctgttgttgttgcaccaccaacaccgaccctctacggggaaaatcttgagacaccaacagatctccaatcacacctaactcatcaaactccgtccactcactcaatgcactcaccacgtcggtccctactccggcgctcctccccaccacgaataaatcaaaagaattagcaatcgagagaaggagtgttgatgtgtcggaaccgtcgttaactgtctcctctacgtattccacaaaactatgttgtccaacagtattgttattgttcctcagaacctccttaacctctgccgagtccagcatctgatcccaccctgtagtcatcccatccattttcgctgggattagcttcaacactgtcaggttcacattcggattcctcatcatttgccttcccaatgccaaggcttctctgtcgtctttcccgcccacgaaaattgcgcagacctggttttagacaaatcaagtttcacacgtaaacacaaattcaagcacggaaactaatgattagcgtatggaacaatcaaaccttcaaatatgtgttacctcaaaagacggactgctcttttgcgcagataaaagcttttgacgatggacaaagatccccacggagcaaggtgcttgtctcaagacatttaagttagcgttcctacgcatgacatcgtctgagaccaccgttgtctggtcaagggaccatataatgtggaaagggagcatgagaaaagaagcttgtttgtcgagagcgagcgagtaaatctcttgatgcatgtacctagggtttgagatgcatgtgaacaattccagcgatatcgatttccagtaatgtttgaagttatcaaaagcgattaggacgttgtttgaataagaccggtttccaggttcggctttttgcatttggtgggagataaagactggattgtctaaacccacaagctcgacgaggtgaatcacgtagcaacttattgtggattcatgtagaggaaaagactgtgctagaaggttgatcatccctgagatgtggtctgctttgtgaatgcacactagaaacttcagctctgatccaagcttcaagctcattagattccgcttctggaaactaatgaatcgttttgacgaatcatataggtaatgtatcaacactggtgatatcgtagagctcactaaaatcatcgttgccataatcgtgaaggacttcacatgaagaacctgtaacacaacaaaataatcttataagacagaaagaaaaaaaaaaacattaagtgttggagagttgaattgtcttgaatataaagttaaatatgggaactcacattgctttcaactccatacagaaaataacacagctcaacaattcctttgttgctgaggatgagtgccataacgaaagagtcggtcagaggcattttggctagcaatgcaggaatcattgagaagataatcttggcgacaaagacaacgatgatgatggtcaaggcttcatacaactgaccgtcaaaatgccttagttgaccgatctggttagctaaccaaggtccatcgatttgcagcattgagaagaacaagaaaagtggcaaaaggattccagtgttaaagctttcaaacttttctaccagttgagaccctagaggaggaccgtgaggcacacacaaacccaaaaggaagggtccaacagccggaaacatgtgaatttccttcaaaaagtagtaaccaccgaaggctaaaatgagtatgatgtagatgaagcattccttcaccggtctctcttgtggtgtccgtttgatcacccaaaacatggccggtctcacaacccaaaccatgaatatgacatatccgataattcctacgccttgcagcgcagaaaccctccagtccatccaagccacaagggcaaatagattaacaccaaaacccgttccatccgccaccatagcggtcgaaatcacgatcctgccgaactctgagtggttgatccggagatcccttaatagccttgagatacccgtgaatgccgagatgctctgcatgaataaaattgttctgtactccattcctgtcaagtatttccccccggtctctcttagcttaccaaacaccatgttggccgcgataatggggagaataacagtggcaattcctgttacaatcactttcgtacctgtcttcctaaccatcccaacatccattttaacaccttcgatgaaccaataaaagacaaaagcgaacccacctagcgtctcaggcacttttggcctagtatcatccgggaataaaatgtgctggatcgtccagtcattcggcaaaagattcgtttggctcaaagctgccccggccttcaacataattttccgatcaatcagtcaatgcaaacaacttttatacaaaagaacaaaagaggaagaaagggttcttacaatcatcatggaggtgatctttggcacagggaggcctatcttctttagggataaataaaaaaactgccataaacagagaactaggacgattacgctctcgagatggggaagactgtagtcccatatcttcatcccgcgtataggtaaatctagcttctcccacacgccaaaagagttcacaagaatcggtatttgttcgcagaacttggacccgtcttcactaaagccatatccatgatatgagaaatccccccagaaggttgcgttgtatgccccctcatatgcctcgttacgcgactccatttctcctagattctttttcttctcaagagaagaaaaagatcaagagaaagagatttacagtttccagaaaaaattacaaaatcttggtgttacattgtcttattagaagaaattaacactactaaaaatagttgataatctttgtctctctctattttttttttttatcttgttgttgttaactgtctgtttacgtacctggcgactaatttatatgtttgttttacctctctgcttatttaagaacctccatcaatttgtgtctatccaagttttgttagagatcccgacatatacggattttgcatgtaatcttacgttataaaaatcttgatgaagttattaaatcgtcatatattattagaaataaaaatcgaatcacttacagagcaataaaaatgtaaagcattttaagcccaaaaaaataaaaaatataataattaatgatgaaaagaaaagagaaatggaatgactggcagaaaagaacaaaaccaaagaggaaatttaaaaaggaaaaacacacacacaatcaatcaatgtcacatatagcaaattttgcacacaaatgaaaccaattcaagatgaggataaatcaaactaaagacgagttttgcataacactctctggaatccatccaacgagcttgatgtaacgttgatcattaccggcgtacacacagccttcaacgtacgtcttctcgaccggaaaatccacgtcttgtagctcactctagccgttatatacacttccatttcgatcgtcccttttgatttttcagcccttaagtccctggcattgaacttagacagtgccacattgtgggacacaagctgcgtctcaatcctagtctcgttcttaggacgttgcttgaaaggagagatatttttgtgagccacggactggttatgatgagccgtggagatacgcatggagtggtatcttacggagacatgtttctccgggttgtatgatttgatcacgtagctgaattttgcgttgatgtgatcgtcattgttgcctatagcaaactcttggaccgacgcggcttctaccgtgtagatgagtcgctttggcctgagtgtgaggtatgtgatcaatatggcgagacccacgaggagtcccaagaggacgagggcgacgatgatgcataggacggggttcatacgcctgcccggcaggggttgtgctcgaggttgcgattggggttgcagttgcggttgcgttcgccgagccggttggtgggctgggtttggaggcaccattgtcagagaaggttttgatggacttcagttaattgcttggaaaggatagagagcaaagattgatttgattgctttgatatggttcgacgatatatataaagggactaacacggacaattagattctttgcctttgtataaggattagtcacaaaactactgatttaaaattcttaattctttagcattgcttgtgaatgaatcaagaaatcttggaagctggaagattcctactttttttttttttttttttggttttaattctttgcttctttttgtaacgttgtacaacactacaacttgggtgttgataacatttatgttttctctatccgattcgtctgtaaattttgtcgtacgcatatttatatctaacatcaacaactgcatttacatgtaaatattacattttcattaacacacagcaaaataaagaaaaggagacttcgtgtggtgtatgtatggtttcaatttagttaataacaaaaatcaacattctaattcacatgaaggtactacagtttcatttatagatgaaggaacaaagaattgtgtgagattgtaggcgtcactcatcagtacattcagctaaaagcctaaaagtttttcttgaatagagagataaatttccatttccattttacttttaagtctttaactaacattgttatgattagttatttaattatgctcctttgctttgtcggaagcctttattcctttcccgaaatgtgcaaaggaaaaaaagatagtcagaaaaaatgttgtgaacttaagggaaaaaaacaaataacattttttctgcagaaatatgttcccctgctctatttttttggccaatcaaagacaattttgtaagttacaactttcttctgcagaaataaattcacatccgtataaaaaaaaagaaggaaaattatgacttattaactctgttttcggttttagaacagtcagaacgacagcgtatcaaaaccagttcacttctgttaacagttgggcccagacccagtttaagaccgaaagagggacttaatatatttgggcccaggcccacttttatatctgtttcgttaacacttaacagagccgttaagaagcggagaaagcagaacagagcaaagtgggagcttctttctctttcttttctcaattgtgttcatgtaacaagaaacgtgatcaagcagataaaattataaccaaaacaaagaactttggtgttcttctgtgctgtgttttcaccttccgtcaagagtgcgtttgatcgagtttaaagctttttcttatgcagagcaaatatatgtgttgctcagctcgtaaaaaaaaaacattagtgtaaacgaggataatgttccgttcaatcgaaataacaacaagacctactacaaatagattatagaaagatcaacaataacaaaacctaaaaatagagagaaacattgccaaaggttccgaagttgcccggtcaaagagaaagacacatgatgttcgactattatccattgtggttgccgttgaccacacttacgttttcaagtcggtcaaaatcttgatctcttttctcttccaaacatgttcatcgactcttcttattatagcctatagtaggtgtcggtgatcccttagactggttcaggacaagatcagaagagtagtcataattattagaagaatagaggtaaacaaaataatgataataatcatcattaaacgactaacccgaagatcttcttcgtgagtttttggctcgactttgctcttattattagccatgctaccggcaccgggtgagagatggcgatcataattcattagttgtgaaaggtacaagaagatagttttatagaaaatgcatgtgacactagtgaaactttaaaaagttattgcaaagtgatgatacatgcttttttgtataataaagtatgcctttgtaattagtataagttgatacagttgaagtgggatcaatttttatttttcaccttttttgggggggggggggggatatatttctacatatcgaataacttatggtatattccttttggtggtgctgcttatgcatatattgttgttatgcattctgagttggttgtgtgtttttatggtacaaaaacacatatatactcagacacgttctcatgtatgtgtatcaatatatgtagaggttggggtggagaaggtcaaggagaaaggatctttcaagggatatgcggcgaccaacttcaatgctcagcatgtagtgagtactttttacttttaccttttccatagttcccattatcttttcccttattctgcatcacttgtcaatggctctgtttctacaaacacacacaagatcaaattactttagtggatgtcactaattttaacgacacaacaaatgtaagagaacaaaatatgaaagctaaataaaccacgattcaaatgatcaagtccatctccattttcaacaacataacatatattctacagaacatgtaacataaaacgaaatacaactatagaaaccatactctctaagttaaaccttacactaacagtcaagttgaaaaaaacattacacgaaaaaagatacaacgattagggaatcaaaaccaactaacgtttcctactatcataaccaacgaagttactaacagctttagagccttcagcgacagcgtggcggctaagttcaccaggcagaaccaacctaaccgctgcttcgatctccctcgaagacaacgtcctccgctttgtataatcgcttaacctcgctgcctcctgcgctatcctctcgaacatatctcccatgaacatgttcaccaccgtcatcgccttcgacgttatacctaaatccggatgcacttgcttcatcaccttatacacatatctcctatactcatctcccgccaaatcgtctctcttcttctttttcttcttcttcttattctcctgcttcttctcaaccttatctgttttcttcaaagtgccttcactcttggaagcgggagtttccggtggctgaggtgaaggttcatctcgaacctccaccggagtctccggcggctgaggtgaactttcatctcgatcatccaccggaatcttaacggtggtaacgttttctccgacgggaagtgaccgttcgtctggaacctccactggaatctcaacggtagtaacgttttctccgacgggaatggagaaagtgagatcttgcgtctcttgatcgttcgctgtctcggtgatcacacacggatctccttcttccgtgacggttactttgattgtctcttccactactttcttcttcttcgtcacggaaacaacctttggttttctcggcgccatattcttcgttagaaataaccgaaaatgttatgtggttaagatttaaaaagggcgttttgggatgggtcgtaacagtacttctgcgattgacatgtggtgccacgtgtcgttcgaataccttagcattggtgattaactgtctactacgcggtggttataaaaactaaaaagtaagaaaaacttatccggtgattcgtatctgttttaaataactagcccaaagcccggtgggcatataaatgggcttaaatgactagatctaaacgggtctcaaaagcccaatacaacatccttaaccgtacttaattttacacaatataatttttgttttccattatatatttttaatgaaattatatgtgaccaaacgacaccacgatcaccctttcaccagcaccagtttagaaaagaatttcgttcccataaacaatgtaattaggtttcattccatttcattacaaatttgaaacatgtttggactggccgctaattatctgatcgctaaaaaactttttttttctagttcgtattgtatttttctttctatttcatggttttgtggtagcagaaaaaaaaaaggatctcagatataaagaacgttgggacttaggagagagtaattagggacgagtaattattatcataacacagatatcattatgaatctaatctttaatttataaattatgtcatgttcgatgtctgaatcattcaatgccaatttttttactaacaaaaaaaaatcactaccaaaccaaagtaattatgtttttaaccctaaacacctaaagatagatggttatcataattcacctactagtctcccattcatatctctaagttcttaaccctgctaaatcttagaaacaaaatcatatcccaccatttttacaaaaaaaaagaagaagatcgatatatacaaaatcatgtacagaaccagagttaaaatcccataagaaaatacgaattcggactaaagatttattaaaataggtatataaaagtgatcgaaaattatgtgtaaatcaagtaaagaaagaagagtatatctacagaatcaaatttgattcaggcactattactccttcgtttcttacggacatggtttggttcgtgaacaaataaagtctctacctcttggctcccgacgtcggtggcttcaaagaaccgaagatctttggacaatcttgtcttctttgtgagagaaatctcacgcggtcgctttcttggcggcggaggacacgtctccacctccggaatcttgtgatcacttgaagttggagtacacagagattctaacaactcttctttcttcgagctatcttgatgatcttcttcttcttggcttctgggtttctgctctactgtcttttcttcttctagggtctcgagaagctt

SEQ ID NO: 1115 - DNA, 88643 bp, Arabidopsis thaliana
aagcttcgtccacatctccggtccttgaaaagcatcaccaaacggattcggtgcagctcgtgacctagcaacagacgcctccgcatcagccaatccagatttcaacgcctcgttagtcggatcgacatctaaacctttcttataagcagtgacggctaactcaaactggtttaaccctaaatgagcagcaccgagacggctataacctttaggccaatacggtttgagtttaatcgtctctttcgcatcggagagagcttcggcgtattgatgaagcgacgcgtgagcagcggaacggtttgagaagaggacgtgattggttggagcaagagctatggcttcggtgaagtggtttatagccgtggtgaagtcaccggaagagaaagcagcgtttcctttagctttagcttcttctgccattgtttgaatctgagatttttgcaagtctctgcagcttcttgggagactactctctataagaaaagaacacttgtttggggttttgagaaattgagggactgtttggatatgaggatagaatttgttagtggatatttgtccgggtttataattatcctcgttacgtttaataataaagaatcttataaaacgatgtcgttttgtgttgtcgtggaaatcccggttatcagcagacccacgatttattcaccggttccattgtttagagtttcatttctccggttcgattttgtttttgtattcacttgttcttcagttcatttaagaaatagtgaaagctcctgaactgatctcacttctaagtgagaactgttgcttgagattgaatttgttttcatcacccatttcttgttaccagtctcatagcatttttcatcattatgatacatttcttacttgtgattttctttgctaaggagacatgcatgtttttagtaatatggaatcatagttacaagcacctggattaaagaagacaagaaaatcttgaggtcaagttttctttagctaaatacgttcggtgaagtttgtctacgagtatagagttttgttatcgtacttttgtttacttttgtttacttttgtctacaagttttcttacttttgttttggggttgtgtgtggactgtttggatacgagtataaaattatattgtatcttaagaataaaattactaagaaacggtgtcggttttgtactgtcgtggagactccggttattggtagaccaacgatttcttctccggttcgatttttctttttgttacttgttcgtcaatttcgttcaagaaatagtgaaagctattgagttgtgtatttcacatgtaagctcttgagattgaaataaactgcatcgaccattcctgttaccaggctcatatatagcattttaaataaaatcaaaatcaaaatcgaaactgcaaaatcaaaatcatggcttatttaatttattttcaatacacttaattaaaagaaaaaaatgtcggtgtatatagacacatcatgcttagatctagagagttattttcattatcttttgttaccctctttattttaatatgagtctttttaaatttttgttcattaatttctttatcttatgattactactataatttcgtattattgttccgaagaagacatataaaccaaaatgcaatcatatctcccatttccatttacatcttacattctctaaagcatatataaacgaaaatataataaatgtaacttgtaataatttgacacacggcttgagctggccaactatgaaatcatgagggtcgtcgtcgatgtgcatatttgtttctgcaaaatggctgacttttacactcatacatactcatacagtcaactcaaaatagaattcagtctttcttgaaatatcatctataggttgacaattaaaccagtttgtccaaaaaaaaaaggttgacaataaaatcatatatataaagtttataaaccatatgcatgcttgctgttgaatttgaccccaaaaaaacccatatatatgctgattgatgttccaaaaaattgttcctatgaattaaaaaaacaattccgttcaaaaaaatttaaatttcagatatctacttgtcactgggtttactgtttatctcttgaattgggtaataaatttataatccaaactgtttaaaggtcattattagttgagtttgttgagttagtattcgtcgatttgaaatcttccagtaatttttcgtattcaatgattcatatcgcatgaaataattagtcgtttggtgcatggtatagtgattaaagccatgcatttagactattgttacgtataattattaatgataattagcttactaattattatggatttaagaaaaaagtaattattagaattttatgtgcgcttatttattgaataatatagatagtggtggccctaaatattatttactggggcagagtacacttcaaacataattttttttggtaaattatttacaaagtcaactacaactattacctcaaaaaatttgtaataccaaatatatgattttttaaaattaattttttattttatttgaaacaaagtctttaaaataattaacatgaccttcataacaaaaaaataaaaaaaataattaatatatttcacaataatcagcattttttgtttacatgcaacattttttgtctcgcatatatatatgcatcatttaaaactacatagaacttattttcggagattggatatctagtaacttactagtagtaagtagtaacacataatacaaataaccattattgataaatataaatgtcacaatggtgttacttagtccgggctcgttttggcaattggcatggaaatgacgccatgagattctatggatcgatccatccagattttgatcttgttttataaacattcatatttgatctgatcatttcagttttgtggccattcagaaagcaacttcaggcatatctataacaacaaaacaaaaaaaagcgacggggtgtaaatgtgtaatggatttggtctaaccagactcaaatctaagaaaattggtcatatatgaatcggtactgaatcatctgaagttgagtatttttctcaaaaaactaaaaagttcggcgctatgtaaccctaaaactaacgagccgatttgaaacactggctgtacgttggctagctgtacatcatcactagtggtaagatcaaaccaaacaataagtaagatggtagaatctttcacatggaagtgttttcacatgtaacaagtttttctcatgggacaagaaactgacaaaaggaacaaacttcccacgtggtttaattcatagggaatttttgtaatgattagggttatgggacaagttgtgaagaaatatatcttctcatcaaatggatatacaacacgagtcatgcgcaaattccctctaaaccctagaacaagaaaaaagccttggacttgcaccgttcatttattttcgattatttatttggccgtaattacttaatgtgtcatgatgatcattgtaggttctacggtagtatatagtagaagggtattttttagaaggtaacatatttttatattttataagaaaatgtatgccaccttggcccatgcgtatataggatagtataattagttgtcttgaaggttttatacactcaattgaaaattttaacatgatattagttagtaaaaaataccatccatatatatagaggtattcatggagattcttcttctagaatccaaaattattatttattcatagtggtaacttgcaatttcagcaggatctatgtgaaaagtattatatcgaccattttgtaggttaattgtaacgtataattttggattctacaaaaagaaaatagtattttattcttattttaatattccacaaatggtaggtggcccaatgagagctcaccattcaccattaataatcagtatacttaacaaaagaaaaattataaatgaaactgtcatttatgtcttagttaccattatatcccagtaatcagctagtgaagtaaaaacacttatgtttttataactatgtaaagattgtttacgaaatactaacgactatggttggtaaatggtattatggaatgacaaaagtgcagagatttttagagtgttttttcttacataactatgcaaaacgagaatttttattcatagtcattgtaatacagtatttactaacaaaaaaaacagagttcgatgagttatagattgactatggaaaaaaacaaaaaaactatattgactgtgtatcattatattaatttatatggttttgcatatatatcaatatgaaattaaaaagtgtggaatactaagaataatttaattacaatatcaaataggtaatggacaagaggcaaagtgggaccaaaaacgacacttttgggatcacggtctttacttttgcttcacttctatgcttcgtttcaacaacacacaaaagcaaaaagaaaaatattaaacgaaatctacatccaatttcctctctaatactttatttgtttgtaattctttattgtagttttatgaatataagattttcttagacaccaaatctttgccccgaagtccctagcatcagccgcataaccatccgatatttgatgaacttacctaaacacaaactatagctatattcaacatataacttacctaatatgtattttaaaaatattatcctgttagttggttagttaattagttaaatgattacacgatattgatataatagttaagggtcggaagaaaattggtatagttaatcggggaacatattttaggtacatacattcacggataatatttctacaaaatttgataagttagcaaaaaaaataattcctacgaaaatttccgcatgggttagaaattaaagtatatcactaatatgtaactgttcaattcatatattcgataatacacatatatagaaattttttagttgaagcaagtgatgatggttctgtcacgacttttgaattaaaagattgtttcatgtggtacaacgattccaaatattgagttttttttgtttcttttcatttatggattttttttattaataaacacctttactatttgctctggtatggtagaaaaaaaatatgtatcagttataatgaaattttgtggaacacgaataagcaaaattcgtttctgttagttttttgtaagaaaaggtagatgatttttttagtaacacttaaaacgatcacattcacattttttttttataacacagtgcattaattaattaataattggattaagaaaggtttaagagaacgggataacgggaagggacccacgtgaccaaccggcctgcaacaggaaatgatcgatggctcgctcacgccggaccaccacccgccacgtcaccacatcattccgtttctccccccctttgtgggtccctctttacacttaccaccttgctcaagttccgcgctctttttttcttttcttttcttttttcttcttcttcgtaagagcagaacaatatatttggggtaatcaatggcaaaaattttgatttaaaagttgaagttaagactttagataatatatttttttaatgttgttttatgctcaaaatagtttaagatgaatctttctttccagtcaattggaccaaaacggaagctgtctatggttacttttgaagtttccaaaggatgaaaatattcatatatgtaataatgtaaatagagagcaataattactttaaaaaatatctcatagaacaggttttcttcaagaagatacatacactttcatattatttttagtatgtctccacatttcgtttcatcagaatgattatgtgaatacaagtacaaaattgtaaatacaattaaaaattgctcataggtcctagattaccgaatcacatggaaatgatgtacagtatatatatttgatatttcaatattaacgtaaagaatttgaagaagaaaaaaaatgaaaaccaactcctataagaaaaaatgttaattcacattattggtagggatcatacactgtttgtctcttgatgattttatttaactcatacgaagtacagaataacttataactaaattatctacaaattttaatgatatacatatctctagataatatatatgatctctagataatatatatgatagtcttgatagcactaattgttgtgtgcattggtgttcgaacttcgaataatacagtgacatgccaaccttgaatttaagaatcatcatgcatgttgatgttttactgagatatctgaataactctggatgtatagatctttcaacaaagattttcttgcaaattaacctaccatcaaaccagcaatatcgttgggttctaaactagttgagtacttgagttacttttttttttttttttttttgacatctctagtttagcaagacaattttaggacataaaaaagaagtccaaattaaagtaagaaaattaaccttaatgttgatgatcaagtatatccatcaagagctggtgggtggtaatggatgttgccacctctctctctctctctaaatcttacttgcccctttatcctcctctctcttctccccccaagcttttgcaacaaataaagtcccccccccctctctctctaggttcaaaaggactcacaagagagagatagtatgattgatagggaaagagagagagatgaaagaaagtaaaatatataatagattattaggacacgattgtcatcttttgatttgtgtcttgtgtgctctctctttcttctcttcctcgattgatcttctttatataaccctactctctttctcttttcccattctttctatcattctccctttctctctcgggatctgatctctctttccagtaacctattcccgaggagcactgtcaaatcttgtccactctttgatcttatctcgatctctttctctttctagtcttgtgtagtcttcaaacttgtgatgttatctatatagtaatcacgagagagaatcatacaatagctgaaacataaagctttcttagaagctttaaaaaggtctcatctggattatcctgtttaatttctagagtttcttcaggtaaaaccctaattttatgtcaattttctatttattaccaatcgtcacaaataatattggctgttttttcttctttaagtaaaacttgatcatcatctttaatcatccttgatcataatcttcattaatcacctaaggtgattcaccttgatgatcatcatcatcatgtccatcccatttcatactcaatgttgctgatgttacaagcaaagcaaaatatcatctaaacctaaaatatcttattataataaaatagacataagtagatcaagctggggtttttttttgttaagttgattaaaagttttcataagatgttatacaataatctaaaaaagaatctcttaagatggatcatcctctctttaaaaaaaaaaactactcctcttcatcttctgatctttacttgtttggttatagtacttagatggaaatataagcagaatcaaatttaataatcgatctagtctatttgaagctgaaattatgcatctcattaaatcaattaactatataccatcatacggtatataattgggtttcactgattttactttcttgaaaattcagttatttaccatgagtccatgactttaaactagtgagtttaattaattatctcgaacctacataactaaccatgtgaatagtcttcacatatttctttagatgtaagcatgtaacacaactaattcttgtaattaataaatgtctgacgataattcctttcgattttgaattcaacctcttatatattcagcatagtacgtctaatcatatgtctgtcgaaataatcaactaattcacaatcacactatgtaagatatgtaactacctagctatatataaccttcttatgttcataatttcatgactttgttttcgatttgtttggtgattttcttataggcagattattaaccgatcaagaagacaaacatgaattcattttcccacgtccctccgggttttagatttcacccgacagatgaagaacttgtagactactacctgaggaaaaaagtcgcatcgaagagaatagaaattgatttcataaaggacattgatctttacaagattgagccatgggaccttcaaggtttgcccaatcccaccatctctatccttcattactttgtctctatttcctaaggaaagattttaaaagtctttttttattcgtttgtggaaatagagttgtgcaaaattgggcatgaagagcagagtgattggtacttctttagccataaagacaagaagtatcccacagggactcgaaccaatagagcaacaaaagcagggttttggaaagccaccggaagagataaggctatctatttgaggcatagtctaattggcatgaggaaaacacttgtgttttacaagggaagagccccaaatggacaaaagtctgattggatcatgcacgaataccgcttagaaaccgatgaaaacggaactcctcaggtattaatataacaaccctaaaacattacttctctataaaagttagttgcatgtttatactaaacaatctcattatatgatagttgcatatatgatctcctaaaatcatttgaggtaatctcattaaatgatatttgggttgtaggaagaaggatgggttgtgtgtagggttttcaagaagagattggctgcagttagacgaatgggagattacgactcatccccttcacattggtacgatgatcaactttcttttatggcctccgagctcgagacaaacggtcaacgacggattctccccaatcatcatcagcagcagcagcacgagcaccaacaacatatgccatatggcctcaatgcatctgcttacgctctcaacaaccctaacttgcaatgcaagcaagagctagaactacactacaaccacctggtacaacgaaatcatcttcttgatgaatctcatttatcgttcctccaacttcctcaactagaaagccctaagattcaacaagataacagtaattgcaactctcttccttatggaacaagcaacatcgataataactcgagccataatgctaacttgcagcaatcaaatatcgcgcatgaggaacaattgaatcaaggaaatcagaacttcagctctctatacatgaacagcggcaacgagcaagtgatggaccaagtcacagactggagagttctcgataaatttgttgcttctcagctaagcaacgaggaggctgccacagcttctgcatctatacagaataatgccaaggacacaagcaatgctgagtaccaagttgatgaagaaaaagatccgaaaagggcttcagacatgggagaagaatatactgcttctacttcttcgagttgtcagattgatctatggaagtgagctgaaagagaagacatataaatgcatatatacatatatatatatacgtacacacgaacactaatcaagtgtagatgatgatgatggtacagatttatatttgctttgattgattcttactacattattgaacttatgtcatatgcatatatacattgcgtatctatgcatatttatacttgtactcaatatgattaaccatatataaactctaatctaaatgtaactccaatattttttaaatagacaattgtctcttcttattttattttattttctaaataatcttctagtataaacaatttcacatacactaaaaaggaagctttttacttcaaatttatacgtctgatcagattctcacttgctgtactatatccacacaagtcataggtatatagtatatatagagaaaattcagaaaatttttactaattaaaatgtggactggcgacttaccggagttgtgttcatgagaaaaattactccaatgaagcttgaagaggatgtataaccataaatagagaattagaaagaatgagaagaatgtggcttgaaggagatacatactcgagtcaagactattgttatataaagacaagccgtggaaaaagaaagaagaacctcttttactgtgtttattttcttattcacatgaaagaagaagctaaagcatttcaggaagaattttgtaattattgtgtttgattcaatgtcggcacaaaaagaaaccgtagattctaatttacttggatagaaaaaaaaactaaaaaaaaaattcttactgcaattaaggaatataaattgtgattactcaaagatgaattaacttagacgactaaattctgttcattatgcggatatattgatttgggccactcctggatcggagttgattgatcatcaacacaaaaaaaaattgaaatataatttgggattttttcttctcaattatatttagaaaaaaattcgtccgcaattaatttggtgcaaggaacatcatgattagggcgtgctctttgggtttggcaaacaaggtccagaggagcttggatataatccaaattttcttttattaccggcggctataacaaacaattaattacgctttcgaaaagttaattaacattgtcacaatttaatcaccaatattcgataccgacttgaaacctgagtaatattagggagttctgaagcatattattaatatgacacagtagcatgtgacgtataatcattagtttgtttctactttttgtataagccactaccacaaatcccaagaccataatatattttgaaactgtaatgattatttaactaatgttgaagtaattatttgttcaattgccaaaacttattgcatttggtaagtatcataaacccaaatgtgacttgttgcaaacaaatttagattaagattttggtttttatttgcaagcataatttttttaagttttcatagggatattaaattgctaagggcatattttttagaatgctattatgatttatgtggtctaaaaagtaatcaatcacattatttaaaatgctaggggacaacctagtagagttaaacaggcttttacaccttttgattgtcttagagacaaaactgatcattatctcctctttttcagtgttatctttttgttctttttctttctccagtcatttacaattcaatactcctataaacatacatcacatgattagtgtttcacaacatataaagatacaaattctatatctgtattgtaatcacacatgatacataacatcttgaaactacttgacatcacagagaccggtcttttcatcgcagaatccatcacggcctagcagacgttgaggcggtgcactgagaagaggagaagaaggcgaaccatatgcgtttctccggctatttccacagccaagactcttcctcgtgtccactccggtcaatgggtttgtcccggttgcgtatttacacagagccttcaaaacgttatgaaaaccattagtaaaatactttttgatagtggaacggaagctaggataaatataatggtgtgttgttgttacctgtttctgaagaagatcaatcacagcgtcactaaaatcagcaccttcgattttggcaccaccgaggtcacttctggttagaaccgatcggaccagcactgcatttgtcagattcgcctcatttagcacctagaatcgccagtaacagaaccaaggtttcaccgaaagataaatgtatcatatgcaagtaattgtatacaaagtatggtgtgtggtgtttaccatgcggtccatcaatgtatcgctcaaatcagcacctgccattgaaatccacagctttcataaatacaaaccacattaagattaaggtattcgagaagagttattatgaatgaatttccccacaaaatatgaattcttgcaagagaagatttcttggcttaagtagtttacagaacaacaaactggctcaagtactaaattctcagatttctaaggctaacacttgtagatttgaaagctcgggagttgaatctaatggaggttatcactatgaacattgtgaagttcttggagaacgttttaaagaattgaggatacacatctccagggtcctaactcctaaatgctcaaaacattgctgacatataaaagatgaaagatctactccaaatggaactaaggatgcaacatgtagagcaactgttactgcatttaaaactatgtcaaaatggaggcaaaggattaagattcaaggaagttagttaaagggtacatgtgaagaatcgattatgatttgtggaagttgttcactttcataattcttataccataaatccataatcattgcaaagtgataacacagttgagagagactaacctgagaagttagctttgtatgcaactgctttctcaagatatgcgccattgaaggtcgaaccgctgaaatcagactctctcatgtcggcagaagtaaagttggctcttctgcaatatcagtaagctacttcagttcacacaattagaacacaaatcttgctttgatctttattggggtttgctaattcaagattccattcattaaaaattgagcaaaccacaaaactcttgcttcctaaagattaaagctttaaactctatcatgacaaactacagtcaaatttttacctgaaattttcattggagtgaactgttttgctgcaaaagaaacagagttcatctcaacgaactatcagtctatcaccatcaaaaacaaatgaaattctttaaagaactttaagacaagaactctaaatgatacctgagatcagcagaaccgtactgagcagccgagccaatcccaaactcgccacgtgtatcggcctcgaacctgttaagctctgccatggccggaacgccggagctcgaggctataacagccgccgccattgctgcagacaaaatcctcttccatgtatttgactcagcgctggaacaacaaccttcccttttcgaaaaacaattcaatcccctaagtttctaagacactaagatttgcaaataacaagaaaaacattgagattctatgttttgctagtgaaagtattcgagtctcactcacctagtgtttgatgaatctttgatttctaagtttgaacgggaacttagctgtagacgtctcaataggtatctctgaaaatggtaaggagatcttgagacagaagatgaggatctcgaaatgtcaagtgacttcataggtagaggagatagagaagagaaagccattgttaaaagtctaaaactttgcaggggagaaatgatacattcaactttgtagaagaagagatgaattttgcacgtgtgaaggatttcgaactttatccactttgcttgggcaaggtgtgcacacgtatgtcacttatgttcacctgttttgttcttggttttctattctcttccaattccaagtctttcacaatttactttgactttgttcttccttgtgacaaagaacacagaagcagtagaaacaaaacaaatcagatctttagtttggctttcaacaaaattcagtaacaaggtcatgaacagaaacttattgctttgcttatataccgatgtctgcgtgaaatgaatccaactaaaaaaaatcacaagaatttcacaacgcaaactactttagaatgtgtaatactcttcgaggttttccggattgaagtcggggtctacaggtgcaccgttcttgatctttgcttgaagctctaaactcttgggaagtataatctcaattcctaaaccttgtgtagagaaatacctctccaacaatatctgtaacataagattcaataagaaagatagcagttacatttcacgaactcgagattgtttactgttcgccttaccacagcagcatatgcatctgatctgttctgtctttcactcttgctaagtcccctgaaataccataatgctcaaacattaattcagacacaccgtaatcgaaattttcatgaaagttcagtgatttaaggttgttgatagatagataccaatgtacataaaaaaaaaaactttatagacatcaaaaccagaattgctaaactaagaacagagagagattcagaaacgaaactaacattacaatcattctatctgaagcttctgacgttgttccatgttcatcaaatacataaactctccaacccctgcaaagcacagaactttaccaatttcatcacacttcatcgatatataaatgtgtgagtgtgagtgtgcttcacctctcggcggcttgaatagcgagccgtccagcaacagaacgaattttgttcgattgaatcgtctctttcccatcagaagatctcggcaacccaattataaattcatcagcctcttcttcttcagcaatttctaaaagcctggtctcgagtttttgccctctcgatttcaaaacctaatagtaatacccaattcatatcaacttcattactgaatttgaaaacgcaacgaggtcgagaaatttcgaaagttaccgtgagaggtttaacggtgtagcctttactaatagcgattccggttcgagataaacctaaatctacgccgagactgaacccacctctccaattccggtctattttccggcgaacagcattaggagggatttcgtcaattgacgtcactgcccacggtagaggataattacgatatcctataggagataagcgatgaacgagagaggtatttacgtacttttgagttctgaatgaaattgctacggaagaaaaagagtgaagagaacacattgctacagagagcaagaagaagacgaacagtattacagtagttcgttccatcgccaacacttttgttttgacgatgagccaaaaaaaagaagctctgtttctcaaaccctctgcgctaatccgaaggttctgacttttaatatattacatgaaaaaaactattaaacaaatttatttctccaaaattgtaaattgtgataatgatgtttcagtgccttttttttctaaatcaaatatcaaataaaatcggaaaaaaccattaattattacagataaatctatgtataaaaaatgagaaggaagtaaaaataatcaggtacgggagagagcacggacagcttcgtcagagtaaggatgaataaaagcactgttcatttgccaaactgtaaacgacgccgtaaccgtcgcatcaagagcattattgaacaagaagagcttggctgctccatagattgcagttgttggatagactcttgatgttatacatgttcttccaccttgtccgaatgcttctactatcgaatgatccacctattgaaaataacaaaaacataatgtaatgagttaatggaattagtacatcaaagtatataaggttaatatatgattcagttatttaccaaaattctcatggtcagtttctccccttttagaaccggtacgacgctaccgtatatcggtttaacgacatcgtttgcaacagatgacctgtcataggaaagtgttgtgtgttacataaccgaatgtattatggcatagattgtaatgtgtagtgattttaagacattgataccttgaggtgtctgtgcagaagaaagttttgagctctgaatcttttcccttagctacatagaagtaaaccggtgtttgctcagacaagctctctgtggcaagtaccgagaatccgaatggccctaaagcaccacggacggtggagcctccgcttttttcgcagctaaattcctcggcttcagccactaccgaagcgtttccgatgattttgtctagagattctttgttaatctcgaattctgcttcgatgtctagctgagctgcggaacctacatcgaccggtaccactgacccgggaccgacctcgagatcaaattgcttgctgcttagtctaagagatttgatttcttctactggccattgaaccaagttctttcctgtctttgtgtcgaggacaacggttcttgggataccctgataaccgtatacacacaaatcttagaaacttggattacaagcaactatcacacacaaaaaaactaactttgacaacacgttacgtcaaggaaacaacacatacctggagagaagaccaacccttttgtacatcagaagcctcactatcagactcaccaatccaactccacaagactcttcgacccttgttctggtcgtaaaacgactttgaagcatagaactttccgtaatcatatcttaaactggcagtcatcccaacatcgatagtaggatcatcggggatccatgttccgtttgaatcgaaatacgtgcctacagcataatgatcgaacctcgtgtcgtccatgctagccttcacgatatgcttcacatccggtccattgaccgatgtgtcaagcccattgcccgcagtcttagacaccgggtaaaagtcaacacactcccacattccagtgttgggaactcggtgcaacaatgtgtcaagtttctcgtatgttttaaagtcgattgtgtcgtacacgagtgagattccagttttgttgagcttggaaccaatcgtgatccgccattttccttctgatgtcttccatgcagtcgttgggtcacggaagtccttagggaggataccgggcggaggtactagaaccgggttccccgggaacttgacccatttcaacagaagtgggtcgttggggtcttcagggtaggcaaggttttggacctaaaaacattaaattacaatcattgatacaattattaaacctaatttacatgttcagtatctaacataccaaaaatctggctatattaactctactacgcctaaagtttcaaaccaaagaaaaagtcttaatatctcgtttcttgttctaagaaaacattttcacacataaatatatatcattggatcgacctactaatcatcgaattagtttttatagttaaaagttaaacgtactagtttggtaatatatctttaacaaaaatacttgttagatttgacaatttattggattcaatcatttttagtagagttttattagcttttatatttagaaaagagtaatttggttgtaaattacaaaaactaaaattagatttgaaattattgtgtgttttatttttctaagttaattctttcttatgaatactgtttctacaattttattatcttgttccaacaatttaaaattgagtgcaagtaggaataatttcggggtacatacctgcaccgctttgtcggtggaaccggtatagagcatgactatagagccatcagggagaaatgtggctgagccggtccacacaccgttggagtcgtaccattgatcagcgaccatggctatgggcaaatggacccaatggattaggtccctagacacggcgtgaccccaaacaatgtcaccccatacggctgcgtttgggttatattggtagaagaaatggtaccatcccttgtagaacaatggacctgtacagaaatgcaaaaaactttagtttattggggtcaaaatgagaataactcagaaataattggattctatttatacataagaaagttttaggtaccaaagagaaatatagcttagttcgtataccccactggctttatccaatttgagacaagatccaaactttgcattcataaaaggattttatacaatcaagattacttttctatggcaaccaatgatttatacaaactttttagcatgtggaaaatctcacgtggaatacaaactggcaaaataaaaatttctaaataatccaaattttgcaattggttgtgaggtaactctgttctgattttgtctctgaactttttaccttttcagctgtaaataaatagtatatttccccaaaaaggtacaactaagtaattttgcaattggttgtgaggtaactctgttctgattttgtcggtgaactttttacctttttactttttagttgtaaacattggatacaacgtggattgtgtgttgtgttgttctgtgatctactacttattgtcgctccagttatttgttattattttttcaaattctaaaaaaatgctatatatcaaaaattcacaggatctaagagaaaaattcagaaaagaaaggaaagtaaaacttaccgttaggatctgatgatagaaaatcccaaatttaccattgagcaacaccatatggaaacaaaacaaacgaactaattagtaattaatctggaattaaaatcatcacaagatcatatgataaaattctctggatttgaatgaatcaaatcaatcactgttagttaatttggaaattttgaatatgatttcaacattttctcccagattatggaaaaacaaatatatgtgaaaaggaataatgaatattctttgaatttataacaaaaagaataactacttttgcaaaataacaaataacaaaatcaataatatattattatttttaatgattgcgtaccgttcatccaattttgctcaggctgaaaatgaaacgccgttcgttgccacgacaacatactattgttccattcaaacgccggcgtgttccgatcaccggaaagtttccataacccatcgttacgtttctccgacacaccagcaagacgtgcacgtgacgttatcgtctctgtttcatcgatcccttcgtcgttggatctagatccgtcgtgtgtggcgatgagagcgacgtaaaaggcgatgaacaagagaccaaatgagacggcgaggagacctttaaagggtcttcttctccgggggccatgggtttcttgattcgggtcggccattggtaatctcgtgtaaggacataatggttcttcttctctggcggagattggcaagagagcatcggagctcgccatttttctcgttttcgagtttctctttttttttctttttgagatttgatgacacgagaaagagcaaatgtctttatatatatatttgtaatatcgattattgttttttttcttaaagttgaatctcagagaaattgttggatttattattccttttactgtctcctgcttcgctggaagagagaaaattgggtataaatgtcaaaagtaaaaaagtttttttttttccaaagtaaaaaagagttttggtgtacaaattagatctgtaattttctatttgtatttgtgcggtgttattagaaaaatcatttaagtttttcaaaagaaagaaaaaaggttttcttatatttctactttttttttcttaccattatactgtacaatgggattatgcatgaaacgaagggtaacaaatttctcaaaaattggaaaatatagtaaaagaatttagtaaggaatacaattatattgttcttatcggttaattagtctttcgtttgtttgaatgggtatgacaatgatatgaattttacattgaattgtccacgtagttttatacatatccgtagatagatatatacagtcatcagaaattttagaaaattgacttggtggatttccttattggcatggtagatgtagttcctaatatgatttctcattttgtgcattgaatacaaatatgtaataaaatttaataaataaatttatatggttaatggttcatctgtgaaaccaggtcattgaacacaatcctatgattatgctgattgatttctgtactacttttttcacttcaagatttggagaatagtttaaaaatctgagagtgaaagaaatcaatcagcaatcccaaacgatagactgaacatgtgtgaattgtactgtggccatttttatgaccattttaactgattagaattgaagatgaaaagattagtgactctaatacgaaactaatcctgtttttacacgaaactaattcatatttagttttctaacattttgacttccgtgtaatagtgatattagtatgtcatctgaccaacttaatttaaactgatttaataacattgaattaatataatttgtttagaaagactccaaaaaacatgaccgaacttagtttaaactttagtaatgaactacaaatctcttctgttttggcctaattaagctagcaaataagtgattcatttgggctaagaatgtaataaacaataattctaggttcattaggaaaactagttttgcaattgaatatacatttaaccacttgttagtttggtcaagcacatgaaaaaaatgtttaaatataaaacattgtctcaatcacaatcgtgtcacaggaatcggtgtccaataatggtgaaaagaaatgaacaaacgccaatttgaacaaaaataaacaattattttaacacgtgaaacctcttgtagccacatatcagttgcatgtgggaattgaagcattggatggtaactaccaactagtaaaatctgaattaattattttctttcttaactctacttaagatcatatatttgttctcatgaaaatattgaacgtaacgaatattcaatcgataaggaacaagaagaaaacgatcgatacgattatattctatgcagtttgttatatttttttacatctatctcgctaagtacctaaacacggtttagaaacgacgataacaaacgcaaacacaatccaaaagccatatgaaaccatctttctttactaactaatctctttaaggttgtctaatggaatttacagtcatatacgttagatcaacaaattggaaaagacaagatcttgtataattggaggatgtgggaaaactagatccacatgtacatgatcgataggtttctggcggacaccacgtgctctgtctccctcttgaaatagaatctactatatgttgctaaacaataataatcatagaaaagaaaattacgaaaaaaatagcccgagaaaatttgagaaccttataattttcgtcaaaaaagtaataataattatctccttcaataattaaaaaggataagcaatcagtcagtcactcttttcactcaaataagtcgaattgtaatgacactacatttaaatcgagctatattttaaaaaataatctaggtatttcataattattggtatgaacccacaataattaatcacaaacaacatgtcgtcaaaggaaaaacgcaatcacacaggaaaaaaatgattgaactaaatttcaattatcttttttttttgtcaacaactaaatgtaagacgtacgaatttgtaaacattagaagataagatttataacatggtacgtttctgcttgtgtgaaaattactaaatgacattaaagaaggtggatagagaagtgactagacatcagataatgcatctgactgagattgataagtttatgttgatcctcttcattgtcttcatgatatttatcatttggtacacataaattcccaattttttttttggatttaaaccgtctttctcgccctaaaaaaactcatctttttatcatttatcttagaatttgtcaaacaaacagtgtttggcctatgtccaacttttttttgtctaagaatttttttatttattttcagtccatagttaaatttttagtttagtttgaactttaatagaacccgattggttttacaaaaacaatcggttcaattttggtttatcggtacaatcatgactcagagatctgagaaccgactaagtcaattacagagaaaaaaagaccgaagttcagacgaaacaacatgaaaaggatttggttttagacttttagtcttaaaactaaagtctcttatcttgtagcccaagtctcagacatgatgaacaacaagccacgaaaaagataaagagggcaggaagataaacagggtagtgttcaagtaacatggacacttagttctcttattgatacagatccttattgatgaagagaaaagctgtgtatttagacattaggaggtggccaaatcttcccgaaaagctcttcaacacgtttcgcttggttcgcataaccttcaacaccggctgataaaagctccactgatgcaggacccatagatgaagccaagcttagctggtcccatttgaccagctaaaccagaatcaaacaaacagggtgagacactggtttagtgaaaccagaagcaaatgagtgttggttagcttcagaactaacctctttgttggtgaagtggtaatgtgttgcagtttcaggagtaagtttccgaacaaatgagtatttttcatcatcgggaatggcgggtgaatctttaagagattgcagtacctttaatggtgcaatgacataatcgaccctgagattgaagagaacattgaaagttagaatgtgatcagaatccattgatggtcgaagctatgatttggaagtttgagtttacccgagaagactgaacaagtcttgtttgttccggacagcagcagccatcagcttggacttgtaaccatacttgtgaatgtagttatatgatcttttgaccaaggccaaaccaggatcttctcccgatttaatagcagattcaatctcggtatctcccgaatgattacgcgcccaatcctaatgattttaagatattaactttggcatatcactgaaatcacttagcagcatctgtttaaaaaatggttaccctgaggcgaccgacgaaaatctgaatgacagaagcaccggcttgagaagctgctgcagcttgtgcaaagctgttgatgaatgcaaaacgaaattataaagtaaacaaatcagatggatagacaattctaaaataaaagagtcaaaaggtatgttttatggtacctgtaaacaaaggtcatatgcgtttggattccctctgattccaacaatcttgcagcttcaataccctatgagagggataagcacaatactaagagaccagtaaaaggtaaagctttggtatttgctgaaaataatcttacttgccaagttgcagggattttgaataggagccggtcgtgtggtacatcgatttcattgtatagtctcagcagatcatgaacctacacacatcatcacatcacaagttagtgatttgaagatacaggagacatataatcaaattatcttatatatatggtgtagtaactaccttgcggataatgccatttgtgtcataagcaagacgtgcatccacttcagtagaaactcgacctggaacgagtttgacaagatcgccacctacgttgacaatagcctgcacttttctcatcagtaataagggcaaaaaaagcttttaagcagcaaagatctggaagtggaaaaacagataagggataagaagatcaaccttattgaaaaagcaagagagtcgagattctgtggtttcaagccctgcacaagaagaatccgccaaagccatgtccacagcattctaatcatgatgtaaaaatgtcaaaattaaatgagcccaaaacaagagatgtcatatactatcatctaagaatcaaaactcttgaaatgcttacgcggaaaatggtatcaggtagaccacagatacccagaagaagagcagagctaacagtagctgcagtcggcggaaacctgcagatcagtaaaatacaacaaaggtatcaatccagcacaattagaaaaccaaaaggttatactatctggttttcacaataactaaaggttagaagttatacttgtgagggagtgagtttttacatcttaagctaatttctttcttgtatcctcgatccagagaaaaactcagtacaatctcaagttaagaatgtctgactccatttttatgatataccagtgtaactaaagtctcatgaagtagagatatatatcatacctctcaaagtcatcgaaaacgacagtatcaggaacaatctcactaaaagctgaaacagcatttagctcattgttctcacctgaaaaaaaaaacacaatttcatcaaacaactcaatgatcatctaaaagcattccagaagaaataaagttgagaactttaggaaaaccgatatcatccaagaacaatgttaaacaccaaatacacaatttgtttcttcaaattcaaccataaatcaacactgttcagctaagaactaaagcaaccagaaggtcctgaactaagaaaggtaaaccaaaaatagcaactttgtcaagcatagtttcctaacaagtgactcaagacagtataaaaacaaacccacataaaaagaaagcttgaatcgtagtcaatctttcaaaaacccatacttttgttttgtctttccagaaatcgtatttattaattaatgagaaacacgatcatcaaagatataaacaaataccagcttcgagagacgaagacgcaggagaggaggaggaactagcggaagcaagaatccgaggaatcgatcgccgaagactgaagttaacggcgggaagaggagtaacggagaatccggcggcgagcgtcttccatcgtcccttctgcgaagttcaaagctcgcatccattagataaaaaacaaacaatgcacaaatacatgcgattgaaagaagtaagcgaagaggagagtactcggattgaagcagagagagttgcacaaggcggagattgcaacgagagtggcatttttttcgctgaagttgatctgagtaagcagatccagccgttgatatcttccaattaacgtgggtcccgccttttctaatttatccgaaaactgtcaacgagataagacagttaattattattttattacaatggttaggaacttgcaagtttttattcattttctcatgagtctctgtgtaatgtttctatgaagccgaaacaaacactcatcgtttagagaaagagataagtacaaatccaatgatcactaaccaaaagaacgatgagaacggttatgcaaacaagaagagacaaggaagagatttacacaccggcaaatgtctttagaccatgacaacaaaagtttgtagaagaaagtgaagttcattatgtttctctccaccgccacctggatgaaggtaagaaacggagttgagttgcttggtcctcccattcaaccctttctatccattctctctctccataatatatgacaagttcttcacccgcgatcccacttttagaatccaatggaagctttctcagcttttcacatttttctacgtggataactttcagacacggaaaatgcagagcctttgcatagattctcttgagcccgcgtaattcaaacaggtgtagtgtctccaatttcctaaaaggaacaatcgtagctgaatgctcctcagctttctcttcactaattatatcctctacttcctttgagaacccaacttcaagaaaagtaagattaggagcaaacaaaagccacgtcaaatccttaagaccatggcatttagctataaagactctggagaggtttgagaagcatggagttgtgggacttttgttccgagacgatgatgaagttgtcctctctatctttatctccctcattccacatctttttatcccgagcttgcggagattacccatggttggcaaagtcaatactctcactgattcttccttaaggtacttaaaatctacctcttttatacattccaccaacctttgagagcataacaatggctctgcaaccaaacttgatgatatatctagggttataacttctagatgttctaagagctgcagctccttcactaaactcatatctagcaacagtctggaatctcgtagtcccaatgtcctcaaattccacaaatttgatatccctaatatactcccaagactgctcatgtgttcgagattcagatgtattagctttttcaatgtccataaaccaacgggtagttgatgtatacatgtatatgacaagttgaaatatctcaaagaggccagctctgatatttcttctggtaattcattaagactctgattctctgatagatctaaaaccaccagatgaggcatacatcgaaagaattcagccgagatctttaccacgtcgttcttttggagaaatagagttgtaagtgcagcacactcgtgactgtcaaatatctcttcaatctcattattcatcaaagaaatctttctcacagtgttccaatccttgacttttggtacttcacgtaacccaacaccagctcgcacaatacatttctccttttgcttcccaagatcggatgatatccatagagccatctcacgaaccacatcatgcattttcacgtttgatttgttcctttcttcctccaacaacaaacatgcacggacaagggtaccaattatctcataaccttggttaatattcctctctctgccttctttttcatttatgaatccctcacttatccagtagtctaccaacccctctttatcaataagatagtcttcaggaaacagagagcaatagaggaagcaggatttcatcagctccccatttaaattatcatagctatacttcaaaacatggagaatttcatcttccatacctgaaaaatctatggcagatgatgttaaaacgtcaatggcatgacaccattcatgtactgttcttttgcatgccatagcttcaccgataacattgagtgctaatggtaggccacgacatttcctagcgacttttctagcaagtccgggaatgtctgggtgacttcccagtgtatttttcccaaccttcatttgaaacaaatcccaagattcttcgggttgtagacagctaacttccatcggatcatcaacccccatgcgcccacacacatctcgagaacgagtagtgaatgctaccttgcatccgttatctttgcttggatacgggactccaaccgcttttaaattcactttctcccatatgtcatccaacaataaaacaaactttcgtctcctaaggacattgtggatgtcaacggctatctggttatcgtttttctcgctccactccattcccccaaggcctaccttttctgctatgtctctttgtatcttacggactgttgaacttctagacacaacaacccatatcacaacatcaaatctgtcatctattttagaaaacttattgttgatcttcgtgagtagtgtcgttttgcctactccccccataccgtacagacccaaaatcccggatccatcttccatgagacggttccatgccttttcaagcattatctcctgaccaacaattgtgggttgaaaagggatctcatccacatcagcaaacggagttgcctcagaaaccacatcaaagaatccttgagaactgagactctcaacttccttcaacatcatgataactcttttcccataacgatagctcaatttcaaatctttggagcagaaaccacaaagacacaacctttgaagctcaacttcattactacgaagcagatcattaaactggttttgaatgattaggacactagtaagccatacctgaacttgggaaagcctttgttgacgccctgtaaactcttctgtttccaaccttcttatcacatcatattgccgagccttgagcattcgcatggccttctgcagagaagccagattcttggagagattgtgaatataacttcccctgacacataacaactgagagaactgactcactacttgatcacatggcaatgaaacagagaaacaacctcccatctctgcacaatcaaggaaaagagagagagtgagagagagagattcacagattaggtagagaagaggaatagataagaaaggaaaagtctatgtcactatatgcataatataaaatctctaagactagtcaatgtatagtaaaaacgtaaactttgaaacaatccaaagatgtcagtatgtcatcactacgttgactaatctctaatagacaaacaaaaaagctaagaatcatctcaaagaacatttaagggtttatggttctgtagaattgcaatcatcttgaactcagatcaacgaaggaacttactaaactcacaaaaataacatttaaattttccatagagaaatagtttttcacttgagaaaggaacacttacaaaaaaaaatctccacagagacaattcatcaaacaagtggtgtgcacactggaattgatcacatagggtaataaaaaataggctgacgaaccaaattgagaaatcaaaatcaactcatcatactagcatacttgtcttcttctatcttatacttgaggaaacagagagagaacactattaaggaacatattttcacattcttcccacttaaaatacaatcctagctacattacaatgaacactcacaatccaaacatacaactaaactggagttgttgttagaagtttgatgtgcaagtcatgttgacagatgaagcaaaaagcagagtaacagaacaaaaccaacgacacttttttgaggtttaaggggtcaagatttcgattccgtacggctaaaagattaattgacaaaccaaaccgaagttgggccgtggaataatagaaaaaaagttaggcccaaatgacatatataaatatatatatatagctagggtttaggaggcaaaggacaaaagaatcatggggaagaatcatcatcccttgggccggaggggcgggtggggcgggtggggcgggtgtttcgggcctatgacaacatcgaaacgtaatgtttacgctggaagaaaattcagtacgtgtgcgagactttataatttgaagggatcggatcactctgatcaatttcatattcaggttattcacttaatctttgcaattgagaaatatttctgtcatctaggcttttatttattgaattcattgatttgattattcttaattacaacttgtgttattatatattacaggaaaagttgtcggagattagctaaggattcgattcctccgctacgagccctaagcgtaaagaagaagaaactcttgatgataatccacctcaagatgtcatctacctcagtagacggagctgtctcaaccaccacatcaaactctacttaagagaactgagactcataatattccttcacatcacaagaaccattttcccattttttgggtcatggggctcctcaacgcagcctacaagtaggtaagaaacggtattgtgtcgcttcgtcctcccattcaactctttctatccattttttctccttgtattttatgacaaattcttcaactttgacaacacttttagaatccagcggaagctttctcagcttcggacaattgtttagtatgtcaagacatctcaaacgctgaaaaggcagagcattccagtagatgctcttcagctcagacaactgatacaagttcaggcattctagtttctggaaaggaagaatctccttttctaaaacacttgcagctttctctttgcttattatatcctccagatgcttacacccccaaacgcgaagattgatcaggtttggagcaaacagcagccacgtcaaatcctttaaaccatcacacccttctattcgcacattagagaggtttgagaagttgggatttgttagattttttttccatggtgtcttctctatcattatctcccacatccaacagttccatatggagatgtaacacagattatgtatagctggcaaaactaatactcctacggattcctccggacgctcccaatggtccctaatataaatgtgttgaatacatctcccaactctgggataacagaacaattccccaaccaaacctgacgagatatctgtggttatgagttctaaatgttctaagagctgtagttctttcataagccccgtatctagtgtcgtttttgaatctcttagtctcaatgttctcaaacttgacaaatatgatatccctgaaatgctctcaagtctcctcgtcctttccagtttcaaatgtactagctttctcaactcgtgtaaaccatgaggtagtcgctctatatatgtcccggacaaatcaagatactgcaaggacaccaactctgatatttcttctggcagttcactaagactgtgattttctgatagatccaaaacagctagactaggcatacaccgaaagaattccattgagatgtctaccaacttgtagttattctgaaggaacagagttataagttcaacgcattcgggactgccaagtatcttttcaaaattgttattcattagcgacatccttttcacagctctccagttctcgacttcaggtagttcatctaatccaatgccggcttgcacaatacatctctctttatgctttccaagatcagaaaatatccacagagccatctcacgaaccatatcatgcatactcacgacatctttatcctttgctccctccaacaataaagatgaacggacaagagtaccgagtatatcataaccttggttgaatgctttttctctaccttgcttttcttttatgaatccctcacaaatccagtattcaataagcatctcttttctgatttcaaaatcttcaggaaatagagagcaatataggaaacacgacttcgcatcctccccattcaagctatcatagctatattttaaaattggaagaatttcatcttccatgccagaaaaatctgtagcagaagtcaaaacctcagttgcatgacgccattcttgtattgtcctcttgaatgacatggtctcaccaatgacattcagtgctagtggtagaccacaacatttttccgaaactttgcgtgctagctggggaatgtctgggtggcttcctaatgtgttttcccccactttctttttcaacaaatcccaagcgtttccagtgtccagacaactgatttccatcgggttatctacccccatgcgtccacaaacttccttagaatgagtggtgaatgctactttgcatccgttttctccactcggatacgggactccaatcacctttaactccactttctcccatatatcatccaacaacaacacaaatttcttcctcctaagaacgttgtggatgtcaagggctctctggtttttgtttttctcgtcccaattcttcccaacaaggcctagtttttccccgatgcttttttgaatcttatgtactgttgcgtttttagacaccacgacccatatcacgacatcaaatccaccacctagtttagaaaacttattgttgatctgcgtgagaagggtggttttgcctactccacccataccatacagacccacaatccaaactttatcttccattagacagttccataccttgtcgagcatcgaatcctgaccaacaattgtggattgaataggcaactcttcaacctcagctataggagctgcctcagtcactatatcaaatactccttgagaactaagaccctcaacctccctcaataagacaataacccttttcccataaagatagctcattttcacatttttagagcaaaatccacagagacacaacctttgtatctcagcgttacaagtgctaagcaaatcattgaattggttttcgatggtttggatacgtgtaagccatacctgaacttgagcaagccttctacgatgcccagtaaactcttctctatttatccttccttgcacgtcatctcgcttagcgttgagcactcccatggctttctgcagggaagccagattctcagataggttttggatataactcccactgacacataaccactgtgaaaactgattcacttctcgatcacatgacaacgagaccgagacacaaccgcccatatctcaaaataaggagagcgagagaaatattcacagataatactttggaactgataagatcttttaccttccgaatgggaaagtatatggcactgtatgcatagtaaaaaattatctaggacttgtcaatgtgtagtgtaaagacgcagacttttatgcaattctaagatgtcattgtattgactaatcctaaaatagagaacaaccataaatgaaattaatcgtcatagaattgcaatcagatacggcagttagtaaactcacaagcaacatttccattttttctacgagaaatatagatatagcacttttattcgtagagacaattcatcaaacaagtggtgtgcacattggaattgatcatagtatgtaactcaacactagcgaaccaaacgctagaccaactgaaacataaacacaaacacaaacaaccatctttgcaacctcaaaacaacaaacccaatcctatagaattgtaaaaagatgattacttgtctaagagaatgaccacgctccagaatccagtctcctcatgaatgaatctctttaatgagaaatcttaactttgtgttcctatgtatgcatttgctctgttctcgtcaaaacaagtgacaacaaagaaagatctgtttattttgccctgttttcatgctctgtttttgtatccgtgtcatattaagcaatgttgttactactaatgtttaatggaatattttcttttagaaatggaattgataataataataatatatattctgtgaaaagaaagaaaaaaaatagatttagtgggtccgtgtaacacagcaaacaagtcaagtcgtcttcagaaagttacaagtgcacactgacgtcatggatgatgagtgcacaatcatgcaaatgggaaatttgcttttttcgctaatgaaagtctcatcgcattatttacatacctttataaaatcattccaaacattattgttatacattccttttaagactataactctactttttcacattctgaaacacagcaaccacaagacacacttacaattacataacatatatatatatatatatatatacccaaccatcattttcgcataacaaaactcccacgtcaattatcattaggttttgagcatcggcaaaagttcttgataacttgacatgaatttgacgaaatcatcgtatgcttctacgatgagatgatcatcgtcccaattatctctatatgtagaggattgtgcatatattctcttgaaaccgatgtaaaacatttgttctctccatttctctatccggggatattcacattgatccgcaagccaattgtcgtattcaaactgcaacaacaattcaaccaaaaatttgtttagtctcaacctttttttttttttatgataacatgttttgtaatgtaatgttgtgctacgaaatatgtgtacctgagagtcatctggcatcaaatgtgtatatcttttgggaattcccgaggcttctagcttatcgtagaatgccttagtgtcttccatcatctcgtcttgcgatgggagagatactcggccggacaagaccgctgcgacccacttgctttgaagctcaaacatcggaaagggagtgatctaagaaaccaagttaaaccaatgagatctttttttttttttttttttttgtgtgcacctcaaccaaacaatgagatcatatgcaataaaagcagcaaatgtattcacagaagccagatcataaacattataaagattattaacctgccatggtaagccgatgaacgaaaggctgggggcaagagctggaggaaaaacatgcttatacaacggtccaacacgattatcgtcaacagtcacctcacctttcgtgtcaagaaacgggaagtaatacttgtacctgatgaagatattaacaagataaaaacaagtcagtgaaaacgttttcaaatttcctatgttctgtgttctgatgtttaatctcttttagagatttgagccgatatgtatcttacccggtacaatgcatgatggtatccgcgtaaattgtctttccattctcgaaaaccaccgaaccgtcttcgcgggcaatttgaatctacaatgaacgttgtaacctatattatatcattcaaccgtcttatagatggagtaactgaattatcaaacaaccaacatcattcattggccggttagttagtgtaccgttgagtgaagccatagattctcgtaaccggtaagcttctcgtaagtatccggtgaagttgatctagatgatacgtggacttctttcgcgacctgcgctatatctctgcatatatcaactccactcgcagagcttccgatcactatcaccacctacaaattacacaacaaaaaggaaacgatccaagagttaaaagtgaagagaaacgtggatatatatgagatcacgtacaagattcactctagtgatgggattcttctgcaagtacctgatctttgaattggtcaggaacacggtaattgtggctgtgaatctgcttgcctggccatgaatctatgcctgaaaaaaaaaaaaatattattcccaaatgaaaacctaaatattgatattgtttgacgaataatccatccctcaagaaaactctgtttttaattgaattcttactattttaaactaattttctttatgtgaaatttttttaaacctatcatattacgacaaaattctttttaattgaacatataaaatacacaaactcaagacacaagtaaggttttgcttattaccagtgataagagcatgacgaggctcggtatagtgtccgttacaaaccacaacggcgtcgtatatctcgtcgacaacaccatcggagcttctcgattcaaccctccacttccctctctcctccccctctgccgccacctgctccgccttaacaacctccgtctcgaacctaaccatttcctcgatatcgaattctttagcaaagtctcgcaggtaagcaagaacctcagtatgagccggatgtcttctcggatcccttgacccgtcgtgtggtcgggtcgcaaaagggaagtcggtgaagcccatgcattctcgagggatgttggtacgtagggatctgtagaggcttgagtggacgacgggtcgggtcgggtcgaggctaagcgggtctggttcgacttgagaggtgtaagcccacacgcctccgatttggctcccgcgctctaagacgactactgagtggccttcacgacgtagctcacgagcagctacgagtccagcggctccggctccgattactgccacgtggcgagaggtggttggatcaggatgactcgttgccatgttaggttatagtgaagttttgtgatctaatgaagaaagatgaagagattgtaaatttgtaatgttaacgaagagagaattgaggtgatggtgtgtttcgattataacgatgtgtatattatatacgaggaaaaaggtaactctaacgatgacgtgtcacttcagtgtggacaattcttccgtaatctcgtaggaatattaaactcaattaagtaggtagcataccttcaggcttgagagtcatgtttagttgtttttatcagagaatataaagaacttaatgaattttgtatcactctaaaagtgactataaaacttgtagttacataaaaaaattagaatctatcactgatctaccagaatttgaactaaaactgattatcaaatttgaagatattcagataaaattttgcaattacattttatgggatttgttacaaaaaaaacatgatatagagctttaaatcatttgatcaagtggatgtgcttccacaatttttaatgaaaaatgattgaattaacattaattaagctttaatgattcattgtaattaactttcctttatatgtatcttttttagtttttgaagaagactggttacttcttttaaagtgcagcccaatgtatctatcacccaacagtgtccaggatcatgtgtactattcaacatggtataccaaaaaagaaactttttctgttataatatgtgtaggaataaatatatttatgtagattggcatcataaaatattcctatcagtattcacatcatataaactaatatcgttgcatatatatgcacaaatatctaattttcttaccaagaataatatttatttataaattagaaaatatattcaacaatttgtttatcccagactatgagtaatatcccaaatttagaaaacaaaaattgtttctaaagtttgcacagcttcttttttttaaaaacctttccaatcaatgatttagctaactattgtttgatctgggggaacattttttttttctttctgaaagggctaatatatgaacattttaatgtatagacacatcggttatctctcttttgtaatatatgcctaatagaagagatcaagagaaaagataagacatttttaatttttatgtcccataacatattctttatagcaaaaatataaaagtaattgaaaagtaaactaaaatattattcgaatagttttgtgaaatcagtttatttatataatataagtagtacttaaaaggtctgttttcagattataaatagtaagttttatatacttacatctcaaaatattgaaagtgagctttcttttacgatttaaattaagtttgatcatgtatatttggttttagttcaaaaataaaatacataaaattaagtttactgtttgagtatatatattataaaattagtaaaaagctatgaggagacggcaaatatgaaatgactacgtcattgttctttgaaaattatggacgccaaatcggaaaaatatccatcaagttgcaaacaaaccctttaccaaagtagtttgaaaaatggaaacgacgtctctattttatcttcttcatttgctttatggacacttttgccttttggacaaaacactacaaccgtagattatatatttatatcaaacctcttggaacttcacaaagactaatctaccaattaggttttcgcttaggtatggtcgaattgttgtacatatatattcttttttttttttttttttaaatctaaagattagatgttttatatattttcatatatatttttaaaaatatactacttaatttgtaattttaatgtgtttttgtagttgtttatgcaacaatttgttttttggtatgtcttttttttttcttttgtgcaaaacttttttttggtatgtcttaaaacgaacatatttcgttttctcagaccaaaatgcaatttaagcgacaattaaagtgaggaatttgtagccgatgatgtgagagggagttgcagcgtcagtgtgaagaagacaaattatctggttccaaactagcataattgtagcttggaagtggaaaattttcgaggtttggatcatagttaaaggtccttgttcgttagtaaccaaaatagcatgatcgaaaaagaggatgtggatcataattagaggtccttgttcgttagtaacatttttcacagtctttgcaaagccaccctcgtattatttattctgtaaaatgaacccccatatttgtttataatacaatttcctcccctaattagttatagaattggaacgcatgcagtacattatgaaacacgagaagaatcattgagagagaccaaactatagtaaatgagaagattgaactcagttctgtgatgaagtgattattcgtccctcctcaattattataatgtaggattgagagcatatctcttgaatataatattatttgttctctcaaatgttctattgggcagttcaatggtgagccagtagcaccgttcgacgatctaatcaaaatatttagaaatgttgtggaaaatattgaaaagcagccctttttgacgagacaaaagaagaattattgaagccacttataacaaagttactaaagaaaatttaaaagaggataagtgcttgctttattgattgataatgcacgtcgtatagttgaacttttgccaagagcctgctcaatttttagagtagtcggggttagtcactattttcagttctagaagtcgatgttcgaaaaatcagatgctcattaaaagcaaaagaggacgtctttgttttatgtgtgtatggtttgtctacaaggaataccttaagcatttttaagaaataaatctaattatttttacacaatatctttcttttcttctaactcataataagttcttccttgtttagtgttgttactaaactttttctatttttctagaatgaaaataataataattatgtataccataaatatattatttttatcaccttttctttaataatagtcgttgtcaaaatttgtttacttatttcaagttcacagaaaatgctacaaaaaaacataacgtggagaaaaccatgaacaagaataatgatggatataatatggaaaagacaaagtatgatggataagtctttatctattggaaatcatatattatatttatgtgaaaatatatgacatgtagttaactaaaaaatatcacaatatagtttaaaattatgttaaatcttacttaataatatagtatatattaagttattgaaatctgactatatgaaaatcaaagtaaatttctttctgaatttatttaaatacaattaattactaaagatgttctcatataataaaagagataagacatgctatgtcatatgttggagaagtttatccaagtttattagttatgatttaaatacatattatatttttagattgtatataatattttccatttttttgtaactttagttttcccacctcttattatatattgtattatgttgctagctagttaaatcaaaagaccaaaatggcgtgtgtgaaatttccgtgggaattgatggaagagatactctatcgtgttccatctctatctctttcccgattcaaaactgtttccaaagaatggaacacacttctcaacgataagacgttcatcaagaaacacttggctctcgtccgtcctcaattccgtttatggaccaattccaaggtttattcggttgatgtcagtctaaacgatgatccaaatatagagctgcgtgaattgcccttagatattccttatgtaattgatcataggactacaaactttcttccttgcaatgacttattgttttgtgcctcatggtggagcaataaagctgttgtttggaacccgtcgttgagacaaactagattgattaaatcgggggaagaacatttccggtttggtggcataggatatgatagtggtagacccggaaaaggttaccatatatttgggcatagtcatagtcggctaagtgttaatggaaacacctctaagtttattaaaagattttatatcaccaagtttgaaagtaatgcgtggaaatgtattgatgatgtttcccttggagagaattccataggaggagattcattagataataataatgtatctttgaatggaaatttgtattggactactaatagctatgatactgatgaatatctcatccaaagtttcgatttttccaaagagatattcaaaatcttttgcgttctaccaaggaagaaggattcttctgatattccagtcctctcagtttttaggggagatcgactttcggtattacataaatttaaaggaacaaataacatggagatttgggtgacaaagaacaagattaatgagagtgtaaaagctgtggtgtggatgatgttcatgacagtttcaatacctatatataaggactctaagccaagttactttatcaatgatatctacgaaaagagactcgtcatgtgttgcagtgacgaaaatggaaaggcttgcgtttatattgtgaaggaccaagcaaggaaaaagattcaactaggttttcatgttagtgagtttagtcattgtttctatgatcccagcttgattcctattccttcagagacttcaggacaaaaaataagcaatagttagaaattcttattctttctgtgatatattggcttgcatgtaattttgttttgtgtggtttgtgagtttagacattgtccctgtgtggctatgctcctagtttgatctcaattcctccgaataataagaagaagaaagagttaaaagtttattttttattatataaaaattatattttggcttcgtttgtgtgttgttatatatattataatttatgagcaatctgacttaattttaatttaatatctaagtccattacctccagatataattttcaaagatttcataaatgtaaatgattaaaactaaaaaatatatttgaagacaaaaaaaatgattaaaactaaaatttaatttacttgtcacaaaataagagatacatctcctgaatatgtttcagcaatatataacacaacaccaaataagaggatttacataaatttatgacagagtcaaataaagtcaacggcggaaaaagtcaaataaagtcaacgaaatcgtgtcaagcttgacgaaagaaagtacggcaaagaagaggaaagaggcacgtgccgagtatattggagtgggcccaaattactcacataaaatgggcctacataatcccacgcaataataccacaacaatttcacttatcttttttgttatctgtaatttttttttgatatttgtttttgtaaatttcaccttacatctttcatatatttaactgacaaaacaattataagatgatattagtcaacagattttttataattactgtttaacttgttgactaatatactatgtgtaagtggtgttattcataagcatcatcatcaagactcaagaggaaatttatcgattcaaattgcgtgtatcaagctgtaatcactacatgtattatcatctttgatagctaaataatctgaaaatctgacgggccactggtattagtgttcggtgtagtagttaatgggcatgggtggagtcaaaaatttgaacccaatgtaggttcaaggttgggaaagaaatgttaaagttcttgcaatctctcttaagttttcacccttttatagttaatctactttatgcaacttttttttcactgcggcaacaaagggtaaagattgttcgtttttctttactttatgaatcacttacacgtatttctaactaacctctttgaaatagatacttttacattgtataatttgtagagaaattaaatttccattaaatctgagatcatcttatagtctttgactctttttatctataacttccttttacatttttggttatccggccacatttttcaacatattttcaaacgtcgggttaggtacattacacatggtagaaggaatattttcctttctttataaacccattaaacttattgcttactccttctacaaatagatatcttcgaaattcaattattgcaatgtagttttcctttatttatttttaattaaaacatctaattaactcttaatattttcagatacatttgtaaaaagactaacaacctaatgtttctttttccttttgtcattagctctaagttagtaacgcggttttcaaccacaattttcaaatgtcaaagattctttctgtttaaatggcaagcttagaatttaatttctcccacttactcattactcggccattccaaaaatagaactatatatacttccaaacgcagcgtatatgtttttttttcaaaagtcacacgacttagagcatttagcgatcgacgctgagagaaagtagcaatgaattgacggtggatgaaattcttggactttctttacggtttaaatttttgattaattatataattataaaacaagcaaagactttcaataaccataaaagataaacaagcttgctggatgaaacagctagcgacacaccatatgaaaccctaacaataggtagactggacataccgactatagaaaaaccctgataacaccgaccatgcatggtccaaacagatttttattattctagtttaaatacgacgtaattaagcagcatcatttagtcttcttcttgattaattaaccttggcggccttggtgcttagtaacggtgatccagagtacgccattgacaacccaaatcttagcatgcttcgaatcgtaaaccgctgggaacttgacgaagccgatgtatgtgcgtacgggtagggagtggttgttctggtctacttcttctgtttgaaaccctacgtgggttttctccaagctgtaactgctgggtgctactgaacaacccggaacatctatcattgcaacgcacgagtcctccttaaaaaaccaccggactggtcctttacctccaccgtattcttttatctccagtttgtagtttcctgttgttgtggaaaaaaagaacagaaattaatgaaacaaagataggttaattccgggttaaaagaggagggagacaagcaacattttgataaagaaaatgtaccatcaccggcggcggaggtggcttccctcgaggaggatccactcattgtcgaattcagatgtctttggaatgttttgagtttaagactgagttgattgattgatgctaatggcgatgatctagttgctatttatagccggaagaagatatttttgtgacttaatcgtgactagttaggctcaaaacaatatgggctaaagtgggccagctcgataggcccaatgacgaacgtctcacttatcctaattcttttgtaattttcccaaatccaatgactattatactccccaaatttgacacgcggccagtcaaattcttacatatgattttttttttcttttgtatcatcctttatatgagttttggatgtattaagtaaattaaaagtatttaactttatgaaagctatatattatgaaatctatgacatggagctaaataatataaactaaaatatatgcaaaaattaagctagattttttatttcttaatttcgttaaaacttagccttatatatatagttagatatattatatatatgtgaaaacattaaagtagattatttcaattttacattaactgctacaactattgtataaagatgtaagacatattatgtcatatctggggaatgtaatctaagtttaaactcatattatgattttagattattttatttaattcctcttttagtaaaaaaaatctctcctttttcttgttttttttttccttagttaacttttattaatattatatattgcattatgttgttagcttcatggtaacaccgaagaccaaatgatgcatgtaatccttccatgggaattggtagaagagatactctatcgtgttccgcctctatctctaacccgattcaaaatcgtttgcaaacaatggaacacacttttcaaaagcaaatcgttcgtcaacaaccacttggttcgtgtccgtcctcagttcctcttatggaccgattccaagatgtattcagtaagcgtcaatctcaacgatgatcaaaagatagatatgcgtgagctacccttagatattccttatttgaataattttatgcgtacctactttactccttgtgacggcttattgttttgtgactcgtggtcatggagaaagaaagctgcgatttggaacccgtggttgagacaaactaaatggatagagtactctaaggaaaaaactttcacgtttcgtggcataggatacgatagtggtagacctgacaaaggtcacaagataattgggtcaagtatttataataagcgaaaactcattgaagatccattataccgaagtgttgaaatctacacgttcgaaactaatgggtggaagagtatgaataccttttctgaagaaggagagatccgcccattaagtgatgtgtctttgaatggaaatttatattgggttgttagcaatggcgagacacatgagtgttttatcgaaagtttcgatttttcgaaagagatatataaatgtttttgcactctaccgtggaattataattctttccatgttccagtcctctcaacttttaggaaagatcgactttcagtgttaaaaagaaagagaatggccgaaacaaataatattgagatttgggtgacaaaaaacaagattaatgacgatggggagcctgtagcgtggataaagttcatgacagtttcaatagctatttctagtaactcttctccaagtttcttcatcgataatgtctaccaaaagagttttatcatgtgttgtgaggatgaaaataacaagctttgcgtttatattgtgaggggcaatgcgttgacgaagattcaaattgtaggtgttgatgctaaaaattatattaatcattgttcctatgttcccagtttgatcccagttccttgagagaattcagattcaataactagaattttaatatatatttttttttgttttcgtgtgtttttttcttaccagttatattatttcatttaaaattatgttcattcaataacattttggttaaattaataatatatgtttcaaaaaaaaaaatgtgtaaagaggcatattatctttgaaccaaaaagataaaatgttttacaagttacttctatgtgacatgagaagtaaaaaaaaggcttattcgaggtgcagtattcatttggataagaaattgcttctactataattctatgatagatagaacaagtaaatcttattccaaatgcactgctggtctaataagtaggtggcatttctctaaatcgttgaatcgatcgatcatgtttaaacatacaaatgtttacaactttttcttaatgagtccaccagcactcaacaacttaacaattacacttcccaattttcagattttaactttcccttgtcacatttcaatcatcttcccgaattgataaactaagaagaacaatcttggttcggtttcaatttggcgaactcgcggtacacttcttcgatgagttgatcatcgtcccatcgatcgcgatagctgtcgccaccaaagaaaactttcttgatggcgacattgtataatcgctctctccaacgttctatggacgtgcaaccacactgttttgcgatccagttgaagtaatcactttgagagatcacaactgcatcctccggtttaaacgtcccgagcattggattccctcgaggatcggttagaaaatgtgtatatctcttaggaatccctaaatcttcaagcttagagtagaaagctacagcctcttccatcatcttatcctctgctggaagcttaactcgacccgacaaaaccgaagcaacccacttgctctggatttcaaacataaagaactggagcccctggattattagaacaaagatcaaaccaagtaatgagcccaacaacaaaaatcaaagtcgttatttgagtatccggagatttcagacattacaatatcaaggcatatcaaaaaaaatatataccaccataaaattcaataatgttgccggattaagtagttttgcattttgaaataataacttgatctttgatttttgcgaattggagattcaatagcacattctaattctctttttttttttacttcatgtatatataccaattaatattaaccatgtatttcaagattatcctaacattcttaatctcttaaaactgccatatgtatctaacatgtcgtaatactaaccatgaaaggtaaaccaataaaggagatcccaggcgcaagtgcgggtgggaaaacatgtttgtagagaggtccaacacggttatcctcgacagtcacataaccactggttttaagaaacgggaaatgatacttgtaaccagtgcaatgaactatagcatcagcaaaaaccactttcccgtttcggaataccacggaaccatcctcgcgggcgcgatatatctacaaacatatcaagagacatttaagaaatcaaatgaacatattcatattcttagttgtctttatatttcattttactaccgtagggtgaatccgtaggttgtcgtaacagccatatgaatcggatgcaaccattttagacgagatatggacttcttttgcaatggttgctatgtctgtactaatgtcgtttccactagcttgacttcctataactatcaccacctacaaaacatgtcaaacaacaatcaatgtagataacttaaaagaatctattagtataattaagagctaagattatgaagaagataataaattttgcaaatacctcatctttgaatggatctggaattcgataattgtggctatggatctgctttcctggccatgactctatccctaaaacactaaaaccaagatacttaagagactaatcaaccattaattaatcacacttttaagtaaccaaaatattacttaccaggaatatgagcaagacgaggctcagtgaagtgaccattgcaaaccacgaccgcgtcgaagatttcttcgccggagacaccatttgagctcttaaactgaactctccatttacggttattctccggcgacggctccacacacaaaacctctgtctcaaatcggatcatatcttcgatcttgaactctttggcgaaatcttgaaggtacatcaagacttccctatgatcggggtaccgtctcgggtcgccgtcactggatcgggtaacgaatggaaagtcactgtaacccatacactctcgtggtagattggtgcggagggactggtagatgctcgagtgtacgatggttcgatccgggtcaacgctaaccgagtctgaatcgactcgatcagtgtacacccagagtccaccaacatgtttctcacgctcgaaaccgatgacggtgtgaccttcacgacgaagctctcgaaccgccacgaggccggcggctcctagtccgatcacggccacgtgacgagcacgtgaggtgattacgctggtcatagtgtcaagtcaattaatgtcaaactatcagtttccttaaaaagatgtgcatatatgcttgatataattaaacagaccctatattatggaatatttatacattccaccccataataatgttttataaaaatttgaacccacaaatctccaaaaagacacaaatcagagaagttatgtttacttttgtgtaaccagaatttgtttatcttagttgtttgttctaataacatgttgatgcggaaactgaaattttgaagagcttttaaaagtcattaattaagaaaataataaaaaaggagattgagacagagagacgtgggtgcagacagaagagaaggaaaggtgtcgtgccatcaactaagtttctataaatagattgaagagacaaaaaggattaataaccaatcaaaaatcccgttattgtagacgagaaaaggattatataacaagaagacaataagaaaaaagcaaccaagaacacgaagaaagagaaattcaaggtacgtatacatttgtctccttgcgtttcatctaatttcttccaattgcaatcttcacggttttgttatgtaaaaatacatcttgtggttgttagtttataggattagatataaaatgttgattgtaaatgacgatcacgtgaggattatgatgtttctcatctatgattcgtgttttcttatgcatagagaatgtttgtgtatgcaggttggttctgaaaaaaaaaagatagtagaaaatggtgaacattagagtacaaaaagctccggaatctccgaggacgatggaggtgggagaaatagacacaagagcaccgttccaatcggtgaaagctgcggtgagcttgttcggagaagttgcagtctcaaagcaaagaagtactccaaggcgatctcgactctcctctgaggtaagtaatccaataccaacaacatggatcattaaagtctgatcaagaaatggttctatgattctatcatggttttagatgaccagaatatgtctaggtaacagattgtgttgtgtgcaaaactaaaaatatttgtttatgttatgtttcagagcgtttgcgacaaggaaacacagctaatgctggtccacaaggaattcatgaagatcaagcaaaagcttgacaacgctgagagcacaagatctcgtgctctagacgatctctcaaaggcgaagaagacaatggaggatcttagcaacaaacttgagactgtcaacaagtctaagcaatcagctattgacaccaaagaaactgtccaacagcgggaagaacagcttgagcatgataagtgtcatggctctcctcctcatcaccatgaacttgacgtcgctagagaacaatatatctccaccaccgttgaacttgatgctgcaaaacagcagctcaacaaaattagacagagctttgattccgctatggatttcaaagccacggccttaaaccaggctgcagaagctcaacgtgcactccaagtcaactccgccaaagttaacgagctttctaaggagatttcggatatgaaagatgcgattcatcagctcaagctagcggctgctcagaatctgcaggagcacgctaatattgttaaggaaaaagacgatttacgagaatgttatagaactgctgttgaagaggcagagaagaaactgctagtgttgaggaaagaatatgagcctgagctctcaagaactcttgaagccaagctgttagagacaacttcagagattgaggttttacgggaagagatgaagaaagctcatgaatcagagatgaacacggttaagatcattacaaatgagcttaatgaagcaacgatgaggctacaagaagctgctgatgacgaatgctctctccgaagtttggtgaattctctcaggatggaactagaagacttgagaagagaacgcgaagagctgcagcagaaagaagcagagagattagagattgaggaaacaaaaaagttggaagctctcaagcaagagagcttgaaactggagcaaatgaaaacagaagctattgaagcaagaaacgaagctgcaaatatgaataggaagatagagagtctgaagaaagaaacagaggccgcgatgatagctgctgaggaagctgaaaagagactagagcttgttataagagaagtggaggaggcgaaatccgctgaagagaaagtccgcgaagagatgaagatgatatctcagaagcaagagagcaagaaacaagatgaagaatcatctggttcaaagataaaaatcacaattcaagagtttgaatctttgaaacgaggagcaggggaaacagaggctgcaatcgaaaagaagttggcaactatagcagctgagcttgaagagatcaacaaacgaagagccgaagcggataataagttagaagcgaacctgaaagcgatagaggagatgaagcaagcaacggaattggctcagaagtcagcagaatctgcagaagctgcaaagagaatggtggaaagtgagttgcagagatggcgtcaacaagaaaatgtacaacttgcttagtgatgatttcattttgtataaaaccttgtttttttttccaaacattcaaagataaaaaaaaagacaatgaaaccttgacggcttttatttaacacaacaacaaagaacaatacaacaacacacagacaggtcaatcatttgttcaaggaattattcatgatcttcaagattccaataactgagaaggaagactactaatcagcttctgtctcaagaaatcctcataagcctcaactatgagatgatcatcgtcccacttatcacggaaagtgtctgattgtgtagcaagtctgtagtatccgccatttatttcctgatatctccattgttcaccgggcggtgcaccaatttgctctgctatccaattaaggtaatcaacctgacctccaccaagtcgatgtgtgtatctcttaggttgcccgaaagcctcacgctttgcatagtaggcggtaacgtcttccatcattttctcttctgaaggaagtgtgacccggccagacaaagctgcagccacccacttgctttggagctcaaacataaagaattgcagtgtctgatatcatatataaaaatatgattagacgatgaaaaaatccgaaaaagccaaccaaagtaaagattgaatgagagacttaaccatccagggtaaaccgatgaaggaaagcccgggagcaagcgcaggcggaaagacatgttcgtaaagcggtccaacacagttatcctcaacagtaatatagccattggtgttgagaaatgggaagtgatatttgtaaccagtgcaatgcacaatggtatcagcttgtacaaccttaccgttctgaaaaacaatcgtcccatcttcgtgtacactttctatctgcaaaaattgaatcagtgaccatctagtatgaccaaaatctctcaatttgttaattgttatttaccatagagtgaagccatagattgtttgacccgggaagttttgagtatgtcttagatggattcgatctagacgcgatatggacttctttagccactcccgttatgtccctgctgatatcagctccactcgcaaaatttcctatcactaccaccaccttccataaatttttcagaccaacaatgtcagataactgaatctatctaatatttctatagatttcaaactcaacaaaataacatacttgaattactcataccatccaatatacctaaacacccatcccatacagaataaagtactaatatagaatgataactagtgaaataaaagatctcctcgtgagtacagaatgaaaatgaaaaaataagcactttttcatagttggcgaataagaaaaagcaactttttgtttccatcgtcaaaaacgcacattttaagtatcagtaaaagggtatggacaaaagataaagattaaaaaactaaaatttagtaaactgttcacatattctgcaagaacgtacctggtctttgaattgatcaggaacacggtaattgtggctatgaatctgcttccctggccatgaatctatacctaaaataacaagttttctcatcaatcaaaacatattcacttcaaaatcattcaatctaaaaaaacatctgaaattgaagtaccaggaacatgagcaactctaggttctgtataatgtccattacaaacaacaacagcatcaaagatctcatctttggagatcccatctgaatttttggattgaaccctccatttcttatcttcaggctcgacaagaactacttcggtcttaaatcgaaccatctccacaagtttgaattctctagcgaagtcttcaaggtaagcaagaacttctctgtgactagggtaccttctcgagtctcttgattcgtcatcttcaggtcgaggcacgaaggggaagtctctgtaacccatgcactctcgtgggagattggttcggagagaatcatagacgcttgaatggacgatggttcggtttggatcgaggctaagcgggtctggttcgctgttaggtgtgtatacccagagacctccgacttttgagtcacgttcgaaaacgacgacggtgtgattctcgcggcggagctctcttgcagctacgagtccggcggctccggctccgatcactgccacgttgagtgagttgactcgggttcgtgctggtgccatcttttttgtgtgatgatgatgctctgttctcaaaattgggtttatataggaacgtcttcggttcggattaaccggttcggtctaaaaaaaatcaattttttagtcttaattaagaaatgaaattaaaacccaactaaaaacgagtgttagcaatttaatgacatggagatacgcaacaaagagaacaaaaaagaacagaaaatgaaacattaacgtgttgcaacaattatgctgtaattgactaaatcgagatcttatttgagtgttcatatattcttttttgataaagaatatttattttaaataaagtagtgctaatatattctccaaatacataaaggatattacataagtcaaactttgccaatcacccttagattggaattggaaccaaccgaagacattttcattttattttttggactgcaaaaaagttttttcaacctttattcatttcaacatgggaatatcaactcttggatcttcgaagtgcactttctttggaaagattggtttatgtagaccaaactttgctcggtttgaatttagcaaaatctcggtacgcttcttgtataatttgatcatcatcatcccattcatcacgaaaattgtcatcatcttttttgatggctatgttatactgttcctctctccaacgttcgatggacgagcaaccacattgttccgcaatccagttgaaatactcactttgtgagatcaaaactgcttcatgtggcttaagcttttcgaacattggagtccattgcggatcagttagaaaatgagtaaatctcttgggaatacccaaagatttaagctttgcatagaaagctataacatcttccatcatttgctcctccgagggaagtttaacccgacccgataaaactgaagcgacccacctgctttggatttcaaacataaagaattgcaatgcctggatcaagaacaaagttcaaaccaagtaatgagtccaatgagaaatcaaagtctattgagtattatgaaatttcaaagattacgtacaagatcaattcgaatcaaagaaataataccatcataatcagtcgtatatatataaaatctactaaccatggaaggtaaaccgataaaggagaggccaggagcaagcgccggtggaaacacatgcttgtataatggtccaacacggttatcttcgacgttcacataaccctttgtttcaagaaatgggaagcaatacttgtagccggtgcaatgtactatggcatccgcaaatatcagtttcccgtcttggaaaacaaccgaaccatcctcatacactcggtcaatctataacatatcagggtggttggggaggaagaaatcaagtaatcatatattaaaattaaatggtgtttttgttattttctctgtttttatgttttcattatttacttaccgtcggatgaaaatgtagattgctataaatcgaactttcctttgcgtatgcatcagatttagctgcaatatggacttcttttgctaggattgctatgtccctactaatatcacttccactggattgatatcctatcactatcaccacctacacatctcaaacaataacattgttaatcttaacctaatctatactataacaaaacatttaaaaaactgaaaagacgatatagtcaaagtaatttgtggacttctgtaaattacttgacctttgaatggatctgaaacacgataattgtggctatggatttgctttcctggccatgactctattcctgaaacaaaagaaattacaaaacattctcgcccttaacattcacacattgggatttcaaaatgagttattaactccgattacctctgattaatagtgaattagctagtggaataagactttttcttatagttaaaataacatgtaaaatatgtcaaccaaagcatattaaattctttacctaatttaattaaaacagaaatataaataatcgtttacactatcttcgaaaaacatttgtttttacaacttagaaatgaagaaaaagaacatgttattcttgaattatctcaagaagttgatcaacagaatatatataagtttttttttttgataatatagttaccacttacatgattatgcatttaacaatgattttatttttggatttatttttttctatttaaaactcatttggacacctctacacaattaagaaactaattacattttaactgcaaactaattacactttaaattacttaccaggaatatgagcaagacgaggctcagtgaagtgaccattgcaaatgacgactgcgtcgaatatatcttcgccggagacaccacttgagctcctaaattgaactctccatttacaactattctccgccgtcggctccacacgaaaaacctccgtctcgaatcggatcatctcttcgatcttgaactctttggcgaagtcttgaagatacctcatgacttctctgtgatccgggtaccgtctcgggtccctggactcatcatcgggacgggtcacgaacgggaagtcactgtaacccatacactctcgtggaagattggtgcggagggattggtagacgctcgagtggacgacggttcgatcagggtcgatgcttagtaagtctggctcaacgtttggagtgcaaacccaaagtcctcctacttgtttctgacgctcaaagatggtgacggtgtgaccttcacgacgaagctctcgagccgcaacaagcccggcggctccggctccgatcacggccacgttacgtgagctgattgaattaggcggtggtgtcatagtatcagtcaaagtatttgtttcctcgaagagtgtgtatgacgatcactataaatataagtaaatggtcttgaaattggaccgtttataaaagttttccaaatttcatacgtatgggggattacaagttcgatagtgtaacttctttctcacacgtgtacaagtatacacgtgtccatgaccgtatacttctcaactttatatcatcaaatcatgtaaatttcatttgtgaaagttattcactactctatttctatatccacttaaaaaataaatcaacactctctaattatttaggtcaattgaagaggaggattagtaaagagaaaacaaaatgtggaaaaccaagaaaagtacaattttttgtaatacttcgagaacaaaaaaatccagaaaccaagacagtagtgttccattttatacatgaaagaaaaaaattctatccccgtacaccgaacgcttatagcttcgagaatagagccatctcataacttaggcaagtacaataaaaattgttttaaaaacattattactacaaattagcaattttagagatgtgctaataagttaaggtagatagataacaataaatatgtgtgggggaatgctgcaattaagagaaaaagatgggggaaaaagctggaaactgggctacaaagccttctacttgtcccaacactatgtttggtcctcttctttctccaacccacacagatctgaccacaatctcccactacatgacacagctgacacaacaacaaactctctttttttttctatcataattaattctctatgatggtcagttgtgactaaatgactaaacaacccaaattcgatcataattaggggtaaaaaggaaaaaagtgaggaatcctaaaactcacacctaaaaatcttttgtcaaattagtaataataataaatttgtttttttcttataaagttaaaatattataaatcacagaaaaagatagctgatgttgcacattaaccactcagagaccattttctctctctgtattttctgagatttgagagagtctcctctctcttctctctctatatcgctcctcatgatccgattttttatataatttataaaaaatttatgtgataattacagatacacgttatttgtgtgtatattgatagagacaataaccattggaatctgaccatggatctcttttcttcttgagatatttttcatttctttctcctgttctcgtctcccagatctgttcgtcaatcttaccattggaaagcttcaagcttcctttttttctctatctgggtaattccttaatttacagtaaaatatttatagattgttattctttttatagttttttttatgtaaagtcgaagtagtactatgttttatgttcgtcatgaagttgatgcttttacttttcctcttatagttcttctgttgaattcaggatttaggaatatgtttatatatctatcatcaaaatgtgaatatatgtgcgattgtttctttttatggaatcatcttctgaataattttacttatttgcatgcttttagagttttatttataagcagaagcctgaagatttttgtgttttggatattatcaatgtacactaggtttaattttcatctaatggcttttagaatcaaaccattacagaggaaacataatattgattcttttttttaagatcaatatggatcatttgatagtttatccaattatgagcattgatgttgttttactttcatgggggttttgatagtgggagggtttagcagaggtttttagtatcaaacctatcataggaacagatcaccgagaattttgtgtccaattatgattatatcattgttctttgtttcaaacatttaagtttcagaatgacctgtttatatgctcttgtagccaatttccttgtgttacatagaatctgtcaggggatgtttttgccttgagtaaactcttattcatgaactgatattagaatgttcatgttgatccttttttatacagtttgtttttttggtattgatcatctcattttgttatttgtatttgcgttgttggcatttgatagggacgggaccgttgtataaaagagttagaccagacgacggcacaatgtatttcttcggtttgtccaaagaagaagtgttgtcacagaaacatgttgtatcatataaagagacttctaagcagaacccaatcaatatggtcactctgtttggcagacaggtagagattattcagattctagtttgtttcaagttttgacctttttgatgtgttgttagattgatcacaagatttttcgtttcaggtgtatcaggtaaaaagtgagagctcacctaagcttctgaagaaagatatcgatcttaggcttcctgcagatcactacgcttatactaactttcatgagacacttggttctgagaaattttacagcaatggtagttcccgagataccgtagagatgagatttcatccggggcacgaagctaataatgtgaaggaagtatcagccacaagttggactggcaagagaaatccaagaattgttattgatcttgaagaacctcctcccacatgggtctcccatagagagactacagagcatgctcaggcttctgttagctatgttactgtgagaaatcctgacacaaaaccgtcgttctttgatcggatcagctcaaacattctgatggatgtagaccaatcactcgttgaggatgatagtgataagacaactagtaaggagtcaagtttactggatcttaatagcacaccggttgatgagtctgtttccgagcctcgttactctctcttacaagatctgaactgtgcatacatcgaggaggagacagaaacgagctacgagaagagtggaatagatgatggttctacaccgctttgctctcctcaatgccaaaatgtccatgaaaaagacggcacagcatctccagcttcggatacttcttgctgcaccactgaaaacaactcgaggattgagtcaagaagaagttcttctcctcgagcactgcagccttcttgccgtacccggcttgagtttaccaacacagaagacttactggaggagaatggatgttgtaacgaggaggatgattcgtctgaagtgattcaaatggcagctgagtcattagtccacatatcggagatatcgtatcaaaaccaagacttgcaatcaaagcttgtgttaagaaccaacagctcatctgaagatcaagattttccagataaaccggagatgggtaaagcgaaaccgggatgttcctacgattcatatgagcgacacacgttaggaataagcgaaaccaacactgaagaagacttctgtgtgtcatcaatggctctagatgaacttaataacatcacaagagataataacaaagagattggactcaagctgagaagagggagaagaatgaagaacttccaaaaagagatactcccgagcttaacgtcgctttctagacatgagatccgggaagacatgaacatcttggaagcagttttgagatcaagagagtacaagaagatgcagggaaagacgaaagatgtcaaattcaaagcaaacccaagaaacaaacgttcaccaccacaaagatgcgttggtaaaagaaggcgaaaaaccgaatgatatcgataccttgccggtttctgattctttcatacatttgcttcatcatgtaatcttgtaacagtctttgttttcgatttatttgttttaacttatgacattgattatgataagaggaaaggctagtgagacgattataatcattttctcaaattgttacttaagcctatcatttcttaacagtacatttagaaattgtcgtaatagatcgttagaatttaactacaatcttcaactccatgtaaattagtagtcccggtttgatttgttcaaagacaagtttttctagtcaacagtgttctgctttagaattctttggttatcttcatgaatgttttgggtcataaacggtttaagcccaaacccaagaccaacacttaacaatagatgatgaaagtttaaataggcttatatgtttatctatctcggcccacgtttaagccccaaggccaatgagatagcaacccaatcaacttattttatctaattaagttcatatcaagaaaattttcattatataaaaatgcaagcccataattgttacaataacacagatattatatataaaaatgtggaaataaatattcatttgaggcttgagtaagcaaaatatacattcagaaatgttcggatttctgagtgtatatttatatggatttatagaataccaacttatacaacttaaaaagtatattcattaaattaacgctttaaaatttactcccgatttttaagggttgttgaatcgtcgatgtcaccagtgaccctatgatagttcgatctccgatggtgaagtcaaagaagttgtggtcgtcaatgtcactagtgaccctatgatagttcgatcaccgatggtgaagttaaaaaaagttgtggtctttttgtgaccagtagacaaaaagaagaaagacaaaccaatgaaaagatactctgctaaaaagaaaacgttaattctccccctttcatttcttttctaagtcaaataaagacacataaaactaaagttgctaaactagaattctttaaaccaaaagttcattactaatcgttgtgattcgctcatgtagttcccagatccaaaaagtctcatttcatcattattgctgttccaccaatcattacagtaaatcatattcatatgtttacttctcaagatatttctaattttgttctttaatcaatattttcaccactaattttgttctttacttgtcgcgaatgtagtggagtatatgcaaattacagtatattatattgctggcaatcaatttatatataatgtgtgtttgggccaaccaatattagtaaaatatatatgactactctttaatatgtgtgtgtatacatatattcagaatgaaaagagagataaaaatagaaggctttctagtataatttcctacaaatattaactaaataaaaattctaaaatgaaaaatagttgaactaattatgctacaaattattaaattcaggtacctattcctctgtcccacagctccaatacgataaattaagagagttgttgaaaaaatatcacaagcatatatatggttagactagtattaagtttttagttcatgaatcgatggatttgattaattaatgtccatatgcaggattaatggatttaattgatctatctagcatccgtgccagaagggatcaatctatataaactcacagattttaaatctacatgattgggtgcgagatatttgagaaattattattttgtagctgaaaactagataagaattgggagacaacagtacgacaaagaaacgtgcacagaacattccttagtagtagtattttatactcgtaagtgcaaaacaaatcaatctccctatatttaacttattttctagagagatttgcaaaagtatcatttttttactacctttttgcaataatacttttttatattgttcatttttgaaaatatcctttcttttgaacaaaatgaccaaattaccctcatctaataagaacatgtaactggaaacttcaagttttccgccaaatttatttttcccgccaaaaaaaaaattcccgccaaaattttttctcgtaaattttttttcccagccaaaaaaatgcttttaaaaatccttgtaaattttttagaaaaccttgtaaagttttttaaaagctttggtagttgctaaaaactcttgtaaatcattttaaaacctcttaaaatctttataaaatctttaaaaacatagataaatactttaaaaccccctttttaaacctttgtaaatcattttaaaactttttacaatagttttacaagatttacaatcgttttttaaacataaataagtggcattgaatgatttacaagggattttaaaaacttataaaagggtaaaacatgatttacaatcgttttaaagcataagtaagtggcatagaatgatttacaagggatttaaaaagggttagcatggtttacaatcgttttttagcataagtaaatagcattaaatgatttataagggattttaaaaacttataaaagggtaaaacatgatttacaatcgtttttaaagcataagtaagtggcatagaatgatttacaaggatttttaaaaagggttagcatggtttacaatgtttttttaagtataagtaagtggtattggaatgatttacaagagattttaaaagcttataaaagggtaaaacatgatttacaatcgttttaaaagcataagtaagtggcatagaatgatttacaagagattttaaaagtgtttgtatggtttacaatcgttttatagcataagtaagtgacattaaatgatttacaagagatttaaaaaggggttaacatgatttataatcgtttttaaagcataagtaagtgttaacgaatgatttacaagggatttttaaaaaggtttgcatagtttacaatcgtttttaaaagataaataagtagtatacaatgatttataaggattttaaaagcttataaaagggtaaaacatgatttacaagagtttttaaagagttttaaaaaaaattacaaggattttaaacatttgtaaatctttttaaaactcttataaagtctttacaagcattgtttaactcttagaaaaagaattgtaagtatttaaaacatttacaactctttttgaactattttaaaactcttgtgaacctttacaaaaggttttaaaaagatttacaagagtttttaaagggttttcttataatttcttttaaaatcttttaaaaactcttgtacatattttaaaaccctttaaaaatctcttgtaaatcttttaaaacacttttaaaccctttaaaaaaattttaaaaactcttgtaagtcttttaaagccctttaaaattccttgtaaatattttaaaaaccttttaaaatctcttgtaaatcttttaatcccttttaaaatctcttgtaaatcttttaaaatattttaaaacccttttaaaattccttgtaaacctatttcccgccaaaaaaaaaaaaatacgggaaaattgttttcgaaattttttttggcgggaaattttttttcgaaattttttggcgagaaaatttttccgaaattttttggcgggaaacttttttcgaaaatttttggcaggaaaattttggcgagaaattttattttggaatattttaggcgaaaaatattaatatttcattttgttaacctaaatcaatttacaaataggggtaaaatggtcattaaaaattgaaataggatataaatgaaaatggtaaatagaaaagggtagaattgaaaaggggtagtatgaaaagggcattagaaaaaaaaattctattctactaataattggaacaaatggaaaaaaaaattggaacaactgcatgaggggtttaactttgtccggaatataaacaagggaatttaatgaaaaaaaccctcaactttggccagatccatttttaaaccctaaactatgtttttagtaaaacaaaccctgaactaaaacctgttaataaacttaaccccacagtaattaaatattaatgggatattaatttctaaaaaaaaaaacaacgagacatttgtatttagcgcaaaaaccacatgatgttctttaaaactgttttgaatttattacaaaaaaacgttctaaatgattttgaattgcttaattagtttggattttagaagctgaaagaaagacacaacaacttaaaataatctaaagagtcatgcttaaataaatccaaccaacataactatcgaacctgttgcaacacaacaatatttgtcacaaaaaaaaacaatcgtttcagagggacaagatattctaaagtaaagacttgtcaagcattaactttgaagagaagattgtattggctgagtgatagggttctcttcatccattgttttctgttttttccttggtcgtccttgaggtttcttgggtggttttggcactgctttacgcttgcatgaacgtttgttgtgtccgacttgttgacagttgctgcaagtctaaatatgcaaagattaaattaaataatttgaaaaagaagatcttgtgaaacataattcattgttttctattttaccatttgaactttttcacgtgtataaggaactttttgaggtggacgatcttcagttggatcacggattctgtcattgttctttggtcgatttttggaaattaatatcccattaatatttaattactgtagggttaagtttattaacaggttttagttcagggtttgttttactaaaaacatagttcagggtttaaaaatggatctggccaaaattgagggtttttttcattaaattccctataaacaattcgatagtaattcatcgaaattatagctaataattggtatttatctgattgaaaaataattgaaaaaaaaaactggattgttgatcagtttagactttagactgatgattctttatccaattagctacatagttgaaagatataaaagtatatatccaaaaaataaaagtaacaagtgtaaacaaataaaagtaatattcatcatttgtcatatttaatttgtattcatcatgattatatatgttttggacttaatcatgcagctccttgataattcaaattaatcacttgaccagtagtcatcgagagacaattgagccagtaaattcacagagctcggtcataattcaattatagttttaaagacaactttttttgtttaccaatattacaaaagaaaggtgtgatagtccactaggcactagctagtggcctagacgcctagttctggtccaaattattcacatattcgaaaacaaacgataccaaaacaagtgagaaaacaaacgttgaatggtatgataatttactgggaaaaaatgaaaaatggaaattgaagacaaaaagacgttaattgcgtcaaatcttaagaaatgttacaatttctgcttttatacagaacctgatgggaaaactttaacttttatcccttatcggtcggtccattatttgtcgactcggaaacaagaggtaattaagaaaagcatcataaaatatacaaacaaaactcaaaatcaaattcaaacatatcaacatagacatgcataatgttcatcatcatgatcatgatcatgaattcatgatcaatgacccattggaatactcggctcatcatccaactcaatccccacctcagctagtcttttttccttgtaaacgtaccacttggagaaaactaggaaaatgaggaagttcaaggcaacaagtacggccacaagccagtagaaattgtaaagacggcccttgttgagatcatcggcaatccatggatgagctttcccggtgaatttctcgacgattgtcacgagaaccgagctgaagaaaaagcctaatgccaatgtgctcaacaatagacccgtgctcatccctttcatacctttagggcactctctcaagaagaaatctaactgtcctgtgtagattaacgcttcgccgataccgacaataagatattgtgggatgagtagataaaaccctagaggaagcgttttgactgttggaccatgagcgtgtgcagttctaagacgtttgagctcgaccaaagcagccacagccatagccattgatccgaagaaaagccccaaaccgatccgttgaagcggtcttagaccatgggggtagttgaatagctttttgcatagacgaatggcgacgcggtcatagacggcggtggttaggaggaggccaccgacgtagaagactgccatcgatgctggagggatctcgaagctcccgatggaacggtccaatgtctcggattgtgcgactgataatgtcgttaattgagcgtggacggtccagaagaggatgcatgttgcccaaattggtaacattcgcacgatttgtttcacttcctcaacatctgttagtgttgagagtgtccacttgttgaatacattcgaggtaactcccgcttcctgatcccttattgctgccttatctaatgaactgtggcatcaaaaatgatataaggaataattagaatataatagtaaattatgtaaaatggagataaaatattttacatatattggattaaagataagtatctgatttttcaaaccaaagatcttttgtgtgtttcttagaaaattatgaagtgtccctatttattgaaatttcatatcaataatacattgtttctttttttggaatatagcttacgcattgaatatttgaatcaacatgttgtggagatagttacgtggaatcttttcaagatgatatatccttcacacacatgcatgacaaatacgtaattgcttttaaaatagtgtaggcaaaaaaaagttaagagtttgaatttatggaaaagtgtaaaaggttttttctttagttttcaactaccttttagagagacccaaacgaaagagaaatttaatgaagcaccgagcacgcaaagcacgtgtcgtgcatgtgacgctagggttcttaattatgcctaactttgggtctgtcccggtgaaggtgtaaagtagtggaggtgctacgacacgatatttgatcgttttcactacagacaaaacacctgcctccctaccctaacttctcgtctcttcttctttattagttttatttccgagaaagggattccaatatctagagatgctaaatagattttccataaattatctggtataaagaaaaattgattcctttggattcttttatttctatgtaggtatgcatagggattgatggataaaagatactgtacttaagttagcaaaaataaaagataccgtacttaaagggggaaaactcacgagtcaggggaatataaatatagatatatgtgtgtcagtgtatgtgtatttaaagttataaggcattagaatcataatcataattataatactataataaagataaaatagcaaattggtgtatttaattttccgcaatgatgaagatactctttctgtaaaaaccaaatattctacgagtgggtgtgaaattttttataggcaaaaagtaaagatggagaattttaccccacttgatatcacttgcatatacttattcatttgtttatctgaattactttatctttccgactaattccgagagactacttttattttcctacctattctatgaaccgaacttaacgtgttatctaacaaagatatacacatgcacacacacataggattttaaggaaaaaatatacaatataaaatgccaaagtagggactttgaacccaaaaatccaaaaatgttgtaattagctgtataattcgtatcctggaccagtttcgctgtatggtcgagtaataatattatgaaaataatttattttccccgtaacaaaagacaaagaaagatattcaacaccttttaattaatttataatggctgtcaaaaaaaaatgatttctaatgccaagtaggcatataatgagaaatatttacggtcccactataattaaaggacacgagcatttcgagttatttctcacccacacaaccccacttttaatttcacatttttaaagtctactgatactatcacatttaattaagggaaccagtacctcaattatttcaattaacccttaaatggaaaagaaaaagaaaaattttaaaacttttatcttaaaatttaaatcattgtaagttttgaggatcgtacgtggaaagcaaatgatgagttaattaaaagaatcgtaccggaattgttcagtgtgtggcagcttttgtttacccttcatcgaaccttccgccgcaataatatcatccacatcgtagagataggacggatctgccggcagctcgagcttcctattcctccacgccgccacgataaccgcagcaacctgcgtcatcgggctaccgatcaacttcttgaaacggtagcggtttgttccggccaagaaaacgctgagtgcaagcacgatcgcaaacgcgcaaattccatagccccatttgcgtccaacatcgtcttgtacgtagacaaggaccgtcacagctaaaagagagccaacgttgatacaaaagaagaaacggttgaagaaatatgtcattttcgatcgttcttttggttcggtctcatcgaattggtccgacccgaaacccgagacactagccttcacgcctcccgttcctagagcggtgaggtataaggctaagtataggaccgtcagttgtattccacttgcttgttcgcagtgagacgacgttgttggattgcatcttggtggtcgaagtcccggtatgattgttgatagagttaagattgaaacaccctgatagcatcatagttcataacacggatattatttttcggaaaactataacaaaaataacgacttatgctgtttactatttcgatttgtttattgactagacaatatttttattttcttcgttttcttgggtataagttttggtaaggagaaagggacttttgaggtccttaccgtggcttggattgcggcgaatatagcaatcgttaggtacctatacaaaacaaaatgaatgaactcaaattaatattttaaaaagaatctgaatgattttagttaagtaaatataaatatatttatagacaaacctgccgagaaaggtatcggcgatgaagccaccgaggagacagagcatgaaagaagttccgaggaaattggtaacggtgttagccgcagttgcattgcctaaatgcatagttcccgtcaaatacgtcaccagattaactccgatacctaacgtcgtcagcctctccacggcctcaataccttcacacaataaaattttgttaatgataaagttggatacatcgagaatacataaaagaataagaatgatagccataagaaacttataacttagtaaatgccattaaaaagtttcaattcttgtcttcagcatgtatattgttggtagcttttctctagaacttttattatgtgattatacttacaaagaatcatggcggcgctggcccagccgccggtttttgagcgatcggcgggacggccttggaagtcccaagcatcaagaaggatatcatcagatttagtttcaggaagagacatcttgaagatggattaatgatctctctcttttttttgcagtttttgggggtgtttgttcttatgtaaaaggctgttttgtttgagagctcttggtttcttttgtggtcttaaatgtgttcgttgatacatctatttatactgggaaactagccaagttaaaaaagtttttattgttttattttgattttttattcataaaactaaaatattgaagaaaaaagtgacacatgtgtgactctgatgagtgttgtttgattggggagagaataattaataataataactactactgtaactgtagtatatatttgtagaaagagaaaattgagagagagagaaagagaccatacctaaattttaccacttcctctacctttggaactgtgggcttgaacttttaagttgaagtcatcggtcattttgtcagtgattcaatggcattagccattaaaagcaccagttttagccaccacctgttttacatttgttctatttcttggaaaattattttacttccatgaaagataatacagtatgttttttacgtctgtactatatatggaaaataattcaaaataattgatttctgtgttacaaacgcattttcatcaatattgttcatttgagattttgtagtattgtcgaggcatatctatttcgttttttgagtttgcccaaaagaaaaaaaaaatctatttcgttttttgtttgctcaatatcaactttacttctaggcccattcagttgttctgcagcacagccatatcacaaaaatttattgataatcgactcatattaatttgagagtcatgttttctttcacatgtaattatcaaattataattttattgcatatagtttgaggaaactattaaattatatgaaatttcaatcaaaacatctttatagaagtcaataaaagtccttttaggtatttgctttttgtttgtcaacaatctaggtctttgttacaaaattgaaaccaaagatttgtagatgttggtatgattacgtaccaattttttcttcttttgtgttaatgggaaagtctaccttgagatttaatggctcaaaatgaatgcttcttagacgccactaaaatgaatcatgctgcaatatgattattaccctactttccatttatttaacgtatagtgaaataaaataaataaagagcatggtcacaggactttcatgaactatatatataattggaagtctcgcaacttcaatggttctctttctctctggagaaaacatatataggagtataaagaagaagaacaaaggtcattttcattttatagagccaacagaaaaataaaaataatttattccaacaatttgtaagagatggttagttagttttattaataagtctcaaagtctatgtaaaatatccaatataaaaaacgagtcaattttcaagaaaagcaagaaattgtatgttacagaagtaaaacatacatttgaatcagttttttatttatttattaagtaattgatgaatttctatcctcaattagttaattttcgaaatttataaaatttattgtatactatgtgtcatgatccatctctttccgagttattgatatgcagatcgatgaaattttgaacccatcaataaacactttcttcgttgctagtttcatattgctaaatttactataatatccccaacaatcgattattttgtacacatccaaagattgtggaagagcgagaacaaaaaagtcacaatgaagagtcccatccaaaaagaaaaagagaacgagtggtgaacccaaatatattatcttctattgaaattaaattaataaacacatcctccgaaaaggaataagaaaataaattaatggaaacttataaaaataaaccctaacttcaaaattggaaaataaaaatgaaaatggatggatcaaatgttttgggcggagctggcttttgcttataggtatatctcagggcccagatttttggcacgtgatagttggtaggaccacgtgagattctccctcagcgttgactcggtcatttcaagaggatgaatcttaatcgacattagcagttagcacgaacaaggaaactaccttttgcttcaattttaatttttgagttttacattcaaaatgaagatttacagtttataacaaacgtataattcattaacgaataatcttctgacaaaccatcagagtaaaaaaaaaaaaaaggcctttacaataagcgttaaatcctttagtagaaaaaatgatgatagcgcatgtaaaccatttttaatattgttaggatagatcagaatagtttcaattcagataaggtatcgatcaaagttttttactaaactatatgtatatcctcaattttaatttcattaactggttagtaccttattttgttagcttgatagataaaattaaataaagttgtagggtctaaatgtgtaacattgacaaaacttaatgatttattactaattatatgatattaatattccagcaggtgacgaaggaagaaaaaaaatacagattcaattttttaaaaggattgattgaatcatgtagaagaagggtatcgaattaaataattgggtatggaatccttctgagtatcccaaaggccatagttgaccaaacacaggaatgacaacttgttcaataatacaatcttaaataatattgtaaatattagtatgttctttgaaattgtatccttcttattataaaagggattatgttagaattatcggttacggcgtcttgatttcgtcactaataatgaaactaattaacaatgtgtttaggagaaatagatggctaacttggatgagaaagaagacgtccacttgtcacaaaaaggtgaaacagattattgttttaatttgcttaattgacgtcaaatttgaattttgtttaatgcatcccactccctcgtatccgcgtataaatcatagtttttcccttttagaaaattaaactaagcattaagaaaatgtaacttaagtaaaagtaaaatttaaacacaaagtaaatcaggaaaaaaaaacgattgatttgaaagtttgaaccaacaacctccccattaaatcattgtagacacttgcatgtacaaacgaaattcataatagtttcaaggggtagttgtgatagtgattttaaccaagttggtgtacggatgataagagactgactccacagttaaaatttagaactctgcaaaactattgcatccctcttatttgatttttcataagtttacaaggctgtttacaaacttttaaatgtctttaaagtgaaaatggatagaccctaaaccgttagactctctgattacttttcaatattaatacgtgttacatgcctttgctaaacacaagtaaattgacatatgtttttttttacatatacatgtcattttctttttgacatatgttattgaaatcataaataagtatataagtatattggtataatatgatcatctctacgagataccaaactttacaaacactaacctatgtttcgtctgtactgtaatatttttgatcaaagttgtttctttttcaaaaagagtagaatcatttcaaactcaaaactcatgatatatttaaacgaaattcatctaactaggtaacataatcacatttcataagtatggactaacacaactgtggttttcagatcacgaagatagaattagcttcgaactcaaatttaacaatattaaacgatactcatctggttaacttaaccgtagttgagttatttaataacttgggtgtctctagtcggaaaagaaataattagatgaccaatgggcggcacaagctctctctcctgataaaaaagtcaaatcctaaataactaaataattgaaataattgtttttgacttacggggacaaaaccatattatcacgttttattacgaggacaggacatatgagaactagatgtgtatataccaaaagaaggtgatatctcgggtagcttttgcggaatcatgaccggatcctgggtacaagttttactaacagcggaaaaaaccattaatacttattatgatccattatttattggttatttttttaatatgaatattacgaatttagatatccatgcattttccagaatcgaaataagattttgataatcatttttaacgataatcgaactcatgttctcctaaataccttacatataatatgtggaagtgaattcgaatgatgacattttatcgattatgctacataaatagagactttttttttttgttaacctaatgagattttaaaacaatgtttatgtacatagtaacatatatttattagtgtacgttttaaaaaaaagttaaaacaattactgaaagacaatttattagaaaaagacttacgaatagataatgcgaagaggggaatcgaaaatgaaagacaccttacatcactgcaaaagaaaatgatattgttaagtacgtcctgatatttggaaatgaaccaaacatctaaatatatggtctttttggtgttctcaaaagacatcatttgtatatacctaattttaattaagcaaagacaacttacttagagtcgtttgtcctgtctaaacgttcacaatgtcctaaaacgaaaacacaagttcgcagtttgtttacttttgaaaaataaactataataaatcttgttcgattaatgtgtatacaagatgtcgatattcaacagctagcgtttcagtttaaattatttgattcctatctgagcagctgaactgtatactagcatttttttttggcataaaaatgtaaaaaaaagcagtttaactgtgagaaatctgttggaagtattgatcttattgaataaagcttaagaacttattaacctttatgattgtttagtaatgacgacatgatcatattaaaggatatatattaaaaacttggtagtaccactccgaatggttgacttaataataaataataatattgctgccaaaaacacaacaaaataatattctgattatttattccattctttatgatgaagctgatgtaattattctgtacaccaaatgggaatttgaatctcctgttttagtataaggtaaagtaatgccgacctattttattagttgattgctaatataatgaggaagctaaagctaagttattcaagttgtaaaacggtaacaatatgccccagtcttttattaatgtcatataaaatttcaaaattatttcaaaaaatcgccgttcataaaaacgtgttaacatatatataaaattagaaatatcggtcaaacctaaagtagaacataaaattattcggattaaaacaatgttttaagtaatacttcttatgatttgttttcttgatttttttaaaaattgtagttgaaaaaggttaattaaactgaaagatgttgcatgttcataaattgtattatctaatatatggagtgactaaatgcttcattcaagggttgcttacaaaaaggtaagcaaataacgccttaactggtatagaagattctctatcattatccagatatcaccaggcaggaaacaacttattatgtggccaacacattctatcaaatgagcttcttttaaactttatattatttaatcctaaaaggttggatctcaccctcttcaaaacttatcattgctcatgttgtgaatatgcattgcttttcctcttttttttccccctgagaatctcagctttatagtaaaactagtagcatttcctcatttttcaaggattttccagacgtacacatatcttccaagaagatgaaactcacgattagcattaatgattacatatatattgaaaaacagatgatatctctaattaacagaattaataagactaacagtagattataactttcgttgtcaaatatttttgaaactgaaattcataaaggttcagaaattagatgggagaatgcctatgctcgattttatatattctcaagaatacctacttcagaaagggaaaatatacctatgcttttttgcatgccgttaatttactaaagtgttgcgaataattagctttttcgtatgtataaatagtttaatatcttaaaatgttaagatttttatatttgttacttacaattgatgcgttagatcgatgtaacctagcccacgtcaaaaagggagatataatctataacctataagttcctatagctggatttcatgtcgactaggttgcaatgaagtttgcacgtcttggatacttagaaacaaatatataaatgtgctaaaagttatgctagaaacttattacaagattccatcgatcatattgcctcgtcttggttctagtatttgcatacacacaaacctgtatgcatatacataaaaattaaaaactagaaaaatcacccttgacaaatcactcgcggatataaaataaaatgtttaccttgcaattggattgaaagacgtccatttgtaaacaaaacaattattatgactttccattgtaaaaatttgtagataattatagctttttttgtggagtagttttcagtttactaaaatgcaaattcttgtacgtacatcatgggtattccagcgacataccatactctgaggaattccgtcatgcctattagattatttatttaaatatctatgttcgaccataacaagtggtagataagttatttgtaagatgcaatttatctgttttaagataactgtgacatttcaaaaatttaaattttgtcatttcaatttatattattgaaacgtttatatatatattagaattatgttaaatatattattaattaaatttgtagtttatagattttacaaaatttagacggtctcacttaaaatgatattgtatgtgttactaaaatactgacatttaaatatgtgtataaaacttgaatgcatacttatataaatgaagtaaaaataataataattatggtgtagataaatgagaaaatctaggatttttctggtcattataaaatagaattcaaaagaatgtggtggattgtattattttttccatggtaaagtgtatttttaatgagatgtattaactaactagtaaaagcagcaagtagacttgttgaacccaaaacaatggcaattatagttttgctaaggtttttcaagataggcatctaagtagtgaactaaactcatttcctggaaactaagatatatttttctgtccaacaattactttcgttcgatcttttgtttacatttagttacatttacattgttttgctttcaaaattacaatatgcatgttaatactttataacataaaataaaagttgtaaacctaaagcaagtggctgcatggtgaattccttttacgtttttaattttattgttttatagaacataaaaatgctgtgtttgtttaaaataagtttttaccttttagtcttaccagatcgaagatttacactaataataaattttcactcgagaaaaatataagaacactattcaaacatttttcaaactataagcattattcaaacactaaacattcggcaactattctcattcatattataacgttgaaattgatcacaagttatgagtcaaaatttcatacccaagttttcgcgtctcgcatctctcaatttgcgcttcgaggagttacccaagagacactagctagaagctctcattacatcgacatttcaacgttataacattaattaataagtttctacaattacataaatatttcaatgccgttgaattattagattttccgcttcacaatgacgctcaagaaaataaatgtcgtcaatgaaacatgtatgaacttgataataattacttatagtattaaagaaaaattaatgttggaattcatatttaggatattctattgcagtttcttaatctttaatgtgaaaacgtaaaatctcgatcgagttttcgcatcttatatttgataataatttgccgaacgctctttactaatgggctacacaatatattagttgttaaagtgtttgttaatgggttcaatatttgatgggccaaatctgtctagttcttatggtaattgcagtttgaatatttgtttgatcatttgaaacggggttcgatccactaaaattatgatccatcaggcacataataggccgatataccagttttaccttcagatacaaaatttttggtccactgcttggttagttcttgtaaggtagtagtacgatcgaactatactctctagatcttggatttatgaatatacaattttgaaaatgttgaatttgcaacttgcattatcagtttatcataaccagcatcatcttagctttttttttgtatttttgacaatcacatcatcttagccttttaaaagacatcttatttatgttttctcaccttgacaaaaaaataaaataaaaaaaattatgttttctcaaagaattttatttatagaacaaggggtaaatatccagccatgcacgtatatgtacaaattactttcattttcttttacttctttaggtggtggcatgcgcagattggtcgtgtcacgggttcccattttcctattttaatgtcaaattacaataattttaaagctccattatataagttttttaaaagattgttaatataaaaagtatgtctggtcctgctttggcagtatttttttgtcagggtctctactgatccttttaaccccactcaaaagaacttggagtggaacaccctacacagagaccagcacaagtggcctaaaatatttgtccaaaggtgaacgtgtaattagatataataagctataaattcaaactaattataaaatctacaaataccagatattaaccgcaaagaatataagtaaatcggaacagttaagggtcttgaccaacatgattttatacttttaggtcagaaccaagatgattaaatcttttaattcttgtatattttacgccaggatctgatgggttaattcctaaccctaaccccatatatcagcaagacagcaaccctacgtacatgagagtatttgatgtatattttaactatatgttacaagttggaatctacattattatctggtaatctagctaatacacgttttctaaatttacttttttataaaccgagatatttgacttgaaatccatttctttcctcgaaatttaatataattggatgatctttgctatttaaaatatctacaataacatattttagataaatcatggaaaaacatcaaaaattgttatcggatcattatattgtcattgtatgtgtttttagtggtaatacccttaagacttgtcaactaaacgcatgaaacagaaaaaaacttaccccaacaaaagtaggaaccaatagattgtcagacatggctaaaacaagaatacatgcggatgagttagacgagaaccgaccaaacaaagagaagcataacatacgaaaaaaataaaactacttgatagattcatccatatacaacttatcaggcgcaaatgcaatcagagggaagctttttgccgcaagtattgatgagcaaactcaacgagatgggaaggtcgatgttaatcccgagaatgttagctttaatggtggtgcaaagacatacggcagcatcaagatcgacaagcccttgaagaactgagcagcaaagcgtgtcggatgggtttccaatgacagttccgactgcaacgtctagtattttggcgcaaactccaagttttatggcgtctcttgagcaactaggcgttgtaggattgctgatagggttaaggttaggaattggggtaggtggaaagcaagtgttgcagccactaacatgcgcaaaaaacatgagattaaaagatatgaagagagctgtggaaaaattctgttggattccattgatctctagttaaaccctaataaaggttgcttaatgtgactagaggtaaggatatgattagcattggggctaagtgtgaaagccagttagggctcccgttctccggtgaaccacaagactcgcatatgtcaccaagttgataattttcttctagggatcatatgaattacaaccttcagagttttttttgtaaaacgtcattaattaggcaaagaccgcttgatgataaacaatatttttcgttaccttttttgttatataaaaataaaccgataattttatagatccattacccgaataaaacataatttaatatcatttgccatccaatggatcacaagatgaaccaatgggcgatttagaattcttatgtaatcccgtgaagtgaataataataagaattgtttttaaagaagaataataataagaaatactttgttttcttatgaacaataacaaaaatcatgtgtgggggtggaaagccaagttgcaattgttttatactacagtttgatttgtgattcgtaatcagtgtgtatgactcaactggttcaactaagatccttaatctttttccgggtttgattgttcgattgttaaaattttaacttaacagggcctattccgccttattcggctcctagttgttcttttaaaatcttattatgcttcttcatcacatcaagcatgttatgttataattaatttctatatataaaaagattattatgggtaagtagttaccaattttgggtataggatagatcatgcatgtgaagtctatggattggtatttgattttaatgcttatgattgcactcgcctgattatagaattcaaggcattacatgcccaatagtatagtaaacttaggctagccaatgagaattagttttatgagcttaactagtgaacggttaatacagtttctcactaattacttaattagtacttcctccgttcatttttgtttgattgtttagaaaaacacacatattaagaaaacatattaaatgttgattataaatgtattatttttagtgttttacagttttctataactctaaactaggggtgtcaaaatgggtcaaaattcatggtcaactcaactcaactcaatccatgaaccctaatgagttaaaatttttgactcaaatgagttgatgggtcaaatgagttgatgagtcaattggtttgatgagtaaaatgagttgggttgtaatggttaatggttttaatggtttacccaattaacccaataagttttgtaaaattgaattaaaccaactaaaatctctaaaccaatgtcaatttaagtttaaccaacacatctaaaccaatttaataaaattaatatttttccaaatttcttaaatatacaatcgatgaaattgagaaaaagtaaactcgtaatttttccaccaaaaaacataaacccgtgattttcccgccaaaaaagtaaacccgtgattttcctgcaaaaaacgtaaacccaagattttctcgccaaaaacgtaaacccaagattttcccgccaaaaatgtaaatcctgtgattttcccgccaaaaacgtaaacccgtgattttcccgccaaaaacgtaaattcgtaattttcccgccaaaaacgttaactcgtaattttcccgccaaaaaacaaaaaaccgtgattttcccgccaaaaacgtaaatccgtgattttcccgccaaaaacgtaaatccgtgatttttccgccaaaaacgtaaacccgagattttcccgccaaaaacgtaaacccatgattttctcgtcaaaaacgtaaatccgtaaaaagtggaatccgtaaatatcctaagtttgatgataatgaatcattattaatttattatttttataataataattaattaaattattatttaaatgggttaacccatattaaatgagttataggtagacccaacctatttaacaaaatgagttgggtcaacccataactcatttaaccttaaactcatttgattatgagttgagttgggttacccattttgacatccctactctaaaccaatgagaattaactatttttcttgaaaattacaattcaccaatactaaccaataaatattacatagaaaacttaaaaaatcaatcttttagaaacaaattttttttataaacaatcaaacaaaaaggaacagagggagttattacgaagattatcaataggattttagtagctttaggtgattttatttatttgacagtaataaatattgaggagctctatataatctcataattaatgatcatgtttaggaaaatcagttgcttactttctttcttttttctgtcaaatcatttgcttactttattgcattgatttcattgtaagctggtgatctatggttgattgattgattgcaagttacttttttctagttcccataattctattttacattttagttgcttctttggtataattctattttacatttggcgtgtttctttccattggttgttattatcatgtatatgcttattcaaaaagaaattaccttagtcttaactcttaacttaatagttcaattttcgcatttttagtgtgtagcaatttgttcttttaataaatactacatctacatgccatataaaggttattgggttaaaactcggtaccatcaatggtaggataatcttttatcaacatatcttttgatagtgatggcatactacgttttaattaatacgtatttatgatcaaatttgatatcaagtcatctatattgtgtacaaagatcttaatatatacacatttcgaatcattcagtgacagctagacgaatgtaagtagatgaagatttctttggtatatgtgtctgcagtgaggcgcttcgttgtactctcatgatcaatcttatcttgttttacatttgtttgtgaagggcacaagagaaccagcattgtcactcgctatcacatggtttctatggcaaccatgcattataaaatatctttgcagattgcggatatgactgaagttttaacttgtttttatcactggcctgttttgttccatgcaccatcaacttaaccatgtctaacaatattggtagatgcctattagtcattacgcatatacgcatctgtcaatatttgtattgatattttttctgaatattatacgttttagaatgtacgtaaatttatatttagaggtgactttaacagcagcaaaaaaatgtacattttcctcataaaatcaaacatatcatttttagatggtagagtgtttacattttcatatatattattctatcatttttttgtcaattacattataagctgggaccgagtttttaaggtgtaataaggcattatcgtctcgctatgtatatgtaaaacattattaatctatagtaatttttttacttaaatttaattctgaactcactgaaaatcataagaggaaatagtgccaaggaactcaattaatatttcttggatttagctatgggaaattgtttcttttatatgtgggaggcagagctagttttaggatgtggtcaatatgcactgagtagaaaaataaattcaaaacattgagaaaataaatagtggtttatgtgcatatatatttgaaccttaaaaaaatgcatgataaaacgtgtccaacccataataactctaatacaaatggtcatatagaaaatgtgtagcaatatcataggatataggtgaagaaaaacaaatctatgctaatttatatgactaatcaacattttttgtatgtattaaggtataaatgtacatcgtatttttctaaggacatgatattattaaatacatagttacgaaattgtgagtgtattaaggtataaatttacatcatattttttcctgattttggttacgcgcagtaccactatctatagtctaatactacactgtgtttttttctttttcctttttggtggcaaagtcactctatactgtgttgatcatctcacacgtaggttgtgcttatattagacttaaggttctttggtgtaaatatttgaaagaaattaaaaattagtgtacatacgattcattgaagaacattcaccaaagacttcattttaaaaattagaaagtctaattaagaacttataaatcgcaaattttctgtatctatataacttatacaactgtgacatgaaaatcaaacttattataaagctagcagtcgtaactcataacaaaaaaaagaacatatgcatctagctagttatttgcacaaaacaataataataataataataataataataataataataataataataataataataataataataataataataataataataataataataataataataataataataataataataataataataataataataataataataataataataataataataataataatacatacatacatacatacatctatactagttgaggatcgatcctgtttcgcgtagattacaacgacaacgagtttatcccaaaactataagcaaatatgacatcacagttataatacatttcgtatcttcatataaacaaatggacaatgtgtaaacttccatgtacataatttcaaggtccctaatttcaatcattcaatcttttttattatatattactgtaatcaataaaattatgataatggtagtcaatcatttatacttattgttataaaaaaatcccatcatatatcttatggatcggacgctcttgggcttttcttgaaaccactataaaacctatctcaattctttcattttctccacacccaattcactcacaacctagctagctagtaaacagtattttctatataccaaaaatggcttcaagttccatagctcttttcttggctctcaatcttctctttttcacaacaatctccgcctgtggtagctgtactccgtgcggcggaggttgcccctctcccaagccaaagccaactcctaaaccaaccccaagccctagctctggctcgagcaagtgccctaaagacaccctcaagctcggtgtctgcgctaatgtgctcaacggcctcctggacttgacccttggcaagccaccggtcgagccatgctgcagcctcatccaaggactcgctgatgttgaggcagccgtttgtctctgcaccgctcttaaggctaacattcttggaatcaacttgaacctcccaatatctttaagtctactccttaatgtttgcagcaaacaacttcctcctggcttccaatgctaaaaaccatattgatatataatttaaatacacttatgtgtgtattaatttatcttcttgttttaaagagacagggtgattctctatactcttatattgtgtctttatatatcttgatctgtggtttcttctactctgcttgctctggtgttcattggggtgatccgtaagattcctgaagtttacagtttcattatttcctattatatatactcttaccattgggggtattgttgtattggtttgtattatgattctatgaattaataagaatttaacttttatgttatggattcattattatacggaatattgtgttttatggtttatatatatagactgtatcttctacagttctacccaaatattttggttcatatttgttgtatacaagcactaattcatttcaagagaagtctacccattacacttttatcttatcgtagattgttaggaaaaatgtatatcagtataggagagtatgtttttaaccagttgtattaatcatccaaaaatatctagttgaataaatttctaaaatttatggcacaacatgtaagactataaaaaactattcaataagaaataaaaagctatttactaaagcattatggtgaatcaagaaaatcttgggttacagctgctgtaggaaatggtgaatcaagaaaatcttaaatttcaaatctgaaaaatatagatcaaacataaaattcataagaacatacacttatacgtgcatgagatattaaattcaagtttcaaacaaaaaaaagaagaagatattataagttcgtcagaataaaatagaaataatcagttctcggatttatcatgtcagattctttgatatatgcaatggaataagttttactcttagtgcatggatctttcacgaataatcatatacataaaactaattacaagaaaaatatcaaaaagtttttgaacatatgtcttttctggtaaaatatatatcactggtaaaatatcacgctacgtacagactgtacaaacaaacaaacaattttaaaattctttttagtatcaatgatagaaaagattatagttatcaatttgggggttttgctcccccccccccccccacacccaccaaaaaaaaatgttatctatttgggggaatatgtagggtattaattagtatctaatcctaaattttctttgcaatttgtaattaatcaactaaatttacttgaaaattaaattttgcattaaaaaaagcgagttatatattttgggccacaaatgcaaggaaagatcttatagtagacaactgtctcaaactgagctctcgggcctgacgtctcgatcaatcttttaaaacgttgcgtccttattactattgtcttcatgcaaaggcataaactgcatgactgcattacacatttaattatatagttaccaatatatatattatgttgatatggatgcccaaacatcattatacaaacaaattaaatgccgtcaaatacttatacaaacaagtatattttgacctgtggggaggagaaaatctactgtgtatacaaacagatgtgtttttacagcggggaagggattaattttcttgttctgatctttagctaatagaaggaaaaaaacataagttaattaccatagattggttgataatccataaatatttatatgaaagatggttttaagttcaaaacgctttaggattgatgatgagtatttgtttttacccggtccgaggacaaaaatgaagtttaaaaagaaaaaccattggctgataacgtatttagacatttcagcaaaccccatttttgaaaaaacatttgacatatattataatatctagcgtttgaaaaagcaagatgaaatgtttattagccgggactagttatatcaccaatatatacatatttttacgtaatttagtctaattttctttccgacgtaattaagtctaattcttgagtttatcatagaataattttcagcgtacatgcaaatgatgataaaacagaccttaaattttttggtgatttatatcgataaactttaaacactcttatcgaatgaaaatatggctacaaagaaacaaaacaaaaacatacatatataagatctaaatgtaacaaacgattatttccagtgaataaagaatctagtgaaggatatattgaagagtaagttattaagatctcttttggtcgtcacatgggactaggaaggaagtggagaacaaactaaatgtgtgtttttgttttgtttcgtcttttcgggatagtagtagtcaccacttcgataaagttgaaagattccagaccaatatggtctcaaaccacatgcatttcgaaggaaaaaattcattatacatatatagttgggcattggctgcgatattattacatatatataaactaattatagcaacttaaaatccgatcttctctaaggtacgtaaaacattatccaatactagatatatatataacggatttttttcttggtcggacgatggctataacggattttgttcatatatatcaaggcaaaaacgtaaaaatatcaaagaaaataaaatcaatataaattactaagtctcaaaatatagacgatatacgcaacgttaaagtttcgaattttagctggcaattggccgtcattagatatttagatgaataaatacacatataaatgtcataatcaatcaatgaggaatgttctgtgacaatgccatagatactgtaacactcaagatctcatattctaacagatgttttagtttctcattaattggttattagtcgattaacacatagttttataatattgtatatgttatttcactacctatgtgaaatgttaatacgtttcctctatgatggctatttcattctataatgaatccaatcttactctaggatttatgtctctatgataaatcatatttgagtaaaattgttgaataaaatgaataattgactaacaaaattttataataatgagaaaaaagtatttgaaaaaccatggccttttagctattatttatataattaatggattgacctatatatatctttaatatagaatgttagattcttccatgatctcactagtactaccacaagacataccactagagtaaaaaattgtttacaggatcaacctgaattttaataccatttaaggttcacatgcttctctcacttaaatatatatctggattttaatctatatcattcatgcattatctaagatctcatctccttttcattgtgattttattttcatttatgcctattaatccattctttaacaaaaacaattatcatcttaacataaactaaaagaagaaggaaaaccaacagaaaaaagggtacaattagtttatcatttttgatacaagtaatactactaaaatctcatcgttatatgaggtaatcaacagattagagatgctagtagtaaatatagattcattcacgatcattctctcggtcatttaaaacaaaagaacttaattacactttgtgagtttgtgtcatcacagtttgctgtcacaatgtattgcgtgtcatttcagagttggatggtccctaagaagcaattatacattcggtggatgcatattgagcccgtgaactctctttgttttcttcttgctattagttcaatgaatatctcctaaattatttataacgtgtgagtaagcaagaaacagtagaagcaatctcaatcttttgattttgaatcatgaacttcaagtatatataatgggctaaaatccaaaaacaaactagtggatatcgtcggagcatggatatcttttgcaatgtacgttttcgttcaagttttgcaataaacagatttgggacgttaagtattgacttgtgatatgataaaccttattgatatgttttgttataattatttttggtttgcgaagatatgataattttgtagacgcaggcaacaccgttgataaactacgtacgtaaacgtctttttctgcttataaaataggtttctcacatctattattacaaacgaaatggtgtaagatcggggtcaccatataaatttaatttttatgtattacttgaataagatcatattaacattaatatacatcatatattaagatttacatagaaaattccaaccggtttttaactaatttgcaataaatcttatttataattatataataaaatcttatttatttatactttaaaaataaaataaaataataaagaaataatttttactaaaatctattgcaaattccttttttttatcacatacataattgataattcataattgtgatgtaataagaaatcatgaaaatgccaagatgggcttgggtcatatagcattgtagcctactgatctcgcagaccgactaaagtaggcccaaaaatataaacccaagacccaagcccactaagtgaattcgataaacgatatcatcacatctattgtctatttgacatccacagaacgcattataagacttttgagtctttgactcgttctactgtctgcagccttttgtaaaatatgccgctttataatgcttcaactaaaagagcaactttgtcgacgtctgtaatggctaatagttgcgtgaagaagaattcaccaccaaagaagaaaatactacaatttttacatgctcgacgctctaacccgagtagattgtagattaaaagcccacaatcttggtcaatcaacaaaaaaaggtaactgtggtaagtaactttgtttgattcaaatttcaaaaccaagaatattaggttttttgcactcaagattgcatcattgacggattgacctctttaaatttctcttaattactcctctttgatgaaatgatcaaaatatttatattcattgattagattctctcgtcttattgttaacgtttacagttaatatgaaaagttccaaataaatgtacgatcttatagtatctcttaagaaaactttcatctgtacttatttttttgaaaaactgaataatgttatgttgtatatttagaaaaagggatgtaattttttatttttttgcatgtagacataaacggttttaatcttccatgttctcggtttaagtttgtactttgttgctacgaccaagcatgtaaacaatgtagcaaccattaaaagatccaaacatctgatttcatcataacaaacccaacaaacatagaaaatacttatgaaatgttgataaaataaaataaacagaaaacgatatgagaccaaaaaaggtcatatatagcttcttccttcctctttactcctcggccttctcaacggcgacttcctcagcagccgcaacctcagtctgtttctcctcaaccacctctgtcttcttctcctcctccacaaccgccggagtttcggtcacttcctcagctttcttctcctcctcctcaactaccggagtttccgtgatcacttctgtcttctcgtctttctcctctgttttcttctcggtttcttcatctttcttctctgcctcttccacaaccacttcttcgtttgtttctacaattggtgcttcggatttttgttctgtcacggcggggacggattcttccggctgttgggtcacctctgtctccaccactgtctcctccactgtctttgttggtacctcaacgttctctactgctactggagtgacttgttcaacctgtaagcgaaaacacattattaaacggaaaaattgcataccgttccatctcacttgatagaatcatacatgataaatattgtaaagattttgataactaatcatttccggataatattaacagcgaaaatgaattatagatatagatttataatgtgacgaacaacaaaattaagagaatacctcaacggtggccatttcgaaatgaaaaagctaaagaggaaaaatatatagacaataaggagaggagaaaaatagtgtatgtgatgttttgatgagtgaagagatttgatcaagaggaggggtatttatagtagaagcaaatggtttacaataaaaaaattgttttactaaatataaattaaaaaaaaaattaatttctataaagaaccatgatgatgagtattgcacatgaaagaaccttttttgcttatataaaaaaataatgtacaattttacacctcatgccacatagatttagaacatcaccacttaaccattacttgtaaaaaatagatttatcaattttcaactaggaaattaaattatattttacatataaataaaaaaatgaaatgcaatagaagttttttgagaagctt

SEQ ID NO: 1116 - DNA, 118374 bp, Arabidopsis thaliana
gaattctattttgagttgactgtatgagtatgtatgagtgtaaaagtcagccattttgcagaaacaaatatgcacatcgacgacgaccctcatgatttcatagttggccagctcaagccgtgtgtcaaattattacaagttacatttattatattttcgtttatatatgctttagagaatgtaagatgtaaatggaaatgggagatatgattgcattttggtttatatgtcttcttcggaacaataatacgaaattatagtagtaatcataagataaagaaattaatgaacaaaaatttaaaaagactcatattaaaataaagagggtaacaaaagataatgaaaataactctctagatctaagcatgatgtgtctatatacaccgacatttttttcttttaattaagtgtattgaaaataaattaaataagccatgattttgattttgcagtttcgattttgattttgattttatttaaaatgctatatatgagcctggtaacaggaatggtcgatgcagtttatttcaatctcaagagcttacatgtgaaatacacaactcaatagctttcactatttcttgaacgaaattgacgaacaagtaacaaaaagaaaaatcgaaccggagaagaaatcgttggtctaccaataaccggagtctccacgacagtacaaaaccgacaccgtttcttagtaattttattcttaagatacaatataattttatactcgtatccaaacagtccacacacaaccccaaaacaaaagtaagaaaacttgtagacaaaagtaaacaaaagtaaacaaaagtacgataacaaaactctatactcgtagacaaacttcaccgaacgtatttagctaaagaaaacttgacctcaagattttcttgtcttctttaatccaggtgcttgtaactatgattccatattactaaaaacatgcatgtctccttagcaaagaaaatcacaagtaagaaatgtatcataatgatgaaaaatgctatgagactggtaacaagaaatgggtgatgaaaacaaattcaatctcaagcaacagttctcacttagaagtgagatcagttcaggagctttcactatttcttaaatgaactgaagaacaagtgaatacaaaaacaaaatcgaaccggagaaatgaaactctaaacaatggaaccggtgaataaatcgtgggtctgctgataaccgggatttccacgacaacacaaaacgacatcgttttataagattctttattattaaacgtaacgaggataattataaacccggacaaatatccactaacaaattctatcctcatatccaaacagtccctcaatttctcaaaaccccaaacaagtgttcttttcttatagagagtagtctcccaagaagctgcagagacttgcaaaaatctcagattcaaacaatggcagaagaagctaaagctaaaggaaacgctgctttctcttccggtgacttcaccacggctataaaccacttcaccgaagccatagctcttgctccaaccaatcacgtcctcttctcaaaccgttccgctgctcacgcgtcgcttcatcaatacgccgaagctctctccgatgcgaaagagacgattaaactcaaaccgtattggcctaaaggttatagccgtctcggtgctgctcatttagggttaaaccagtttgagttagccgtcactgcttataagaaaggtttagatgtcgatccgactaacgaggcgttgaaatctggattggctgatgcggaggcgtctgttgctaggtcacgagctgcaccgaatccgtttggtgatgcttttcaaggaccggagatgtggacgaagcttacgtctgatccttcgactagaggctttttgcagcagccggattttgttaacatgatgcaggagattcagaagaatcctagcagtcttaatttgtatttgaaggatcagagagtgatgcaatctcttggagttttattgaatgttaagtttaggccaccgccgcctcagggagatgaggctgaggttcctgagtctgatatgggtcagagttctagtaatgagcctgaggttgagaagaagagagaaccggagcctgaaccggaaccggaggtgacagaggagaaggagaagaaagagaggaaggagaaagctaaaaaggagaaagagcttgggaatgctgcgtataaaaagaaggactttgaaactgctattcagcattattctactgctattgagattgatgatgaagacatctcgtacctcacaaatcgtgctgctgtttatcttgagatgggaaaggtatgattttcatatgtgtaatgctcttttgttttgtccctttatttgctgataggctagaagcctagaatgatgatttgcttgttatgtgctacaatggtgattagtttttaatgtcattgtgttttgattcagtacaatgagtgcattgaggattgtaacaaggctgtggaaaggggtagagagcttaggtcagattacaagatggtagctagagctttgactagaaaagggactgctttgactaagatggccaaatgctcgaaagactatgaacctgccattgaagctttccagaaggctcttacagagcaccgtaaccctgatacgttgaagagacttaacgatgcggaaagagcaaagaaagagtgggaacagaagcaatatttcgatcctaagctaggggatgaagagcgtgaaaaaggtgattgctttagcaattagtctctttttttttttttgtgtgtgtgtgtgtgtgtgtgtgtgggaaaagaaagcttatagaaccctgaaaacaagaatgaattagcgtttttactgctgctgttgtggtgtatttaatacaggtaacgatttcttcaaggagcagaagtatcctgaggccataaaacattacaccgaagcaatcaaaaggaacccaaatgaccataaagtaagggcacttcatcatatttatatgttcttaaggtcttctacaatgattttctattccgactgtttgagcaactcgtactttttttgcacctatgttaggcatatagcaaccgagctgctagttacactaagctaggtgcaatgcctgaaggactaaaggatgcagaaaagtgtattgagctcgatccaaccttctctaaaggatacagcagaaaagctgcagtccaattcttcctcaaagagtacgacaatgcgatggaaacataccaagcgggtctcgagcatgatcctagtaatcaggaacttcttgacggtgttaaaaggtatatacacagatacacagagattattaacttttctatctattgccatgaatttgtttaatgtggttcaaatctattctgcagatgtgtacaacaaatcaacaaggctaatcgcggagaccttactcctgaggaattgaaagagagacaggttagttacattctgatgattctcatgttttctccccccatttgtgattgaaagaaaacccgggaagctaacttggatttctccttttcttttgtgtaggcaaagggaatgcaagacccagaaatccagaacatcctcacagatcctgtaatgagacaggtaaataaacaaactctgtcgtaaattgtgattgtatgagtatgatgcaatttttgtttgaatcgagtttcttattaccaatgttactctgttgtgagatgtctagatagatctaactatgtttttacgtgttggttcgagtttgcatgtgataatacctcttaacattctaaaacctttcttccaaacaggtactgtctgatcttcaagagaatccaagcgcagcacagaagcacatgcaaaatccaatggttatgaacaagattcaaaagcttattagcgctgggatcgtccagatgaaataaactcagaagagttgaaacatcgaatatccgttttggcagattcattttttctcttatatctttgcaatctgcaacaattctagatttgtgaccggctgatttcccatgtttactgacgttgtgttccgaacaaattgcaatcatattttcttctgatataacatttactgcgatccttaaagttatgttgctttacatctctataccatttggagcataagagagcaaatggctaaatacacaacgactttgtcattcacaaaatttgaatcatttcattgcttcagctctacaaattgctaccgcacataactaacttgccattcaggtccaaagaacttgaaaaaaggtaagaaacggagtcttgtggcttcgttgtcccattcaaccctttcaagccattcttcctcttggtacttaatgacaagttcttcatcccttatggcaatttcagaatccaatggaagctttctcagctcaggacacttcgttatgtgaattgtcttcagacatggaaaagacagaggttgccagtagatgctcctcaacatcgctagattgtgtaggcgtagactctctagtttctggaaaggaatgataccactcatagtcatagctttctcttggtttattattccttctactagttccgagtccagaacctcgagactagtgaggttaggagcgaacaacaaccacgtcaaatccttcagaccatcacagctacttatatgcacagtggagaggttatggaggaattgagttttgggacttctgttcgatgataatgataaagttttcctctctatctttatctcacacattccacacttccttatgatgactttattgagattatccatatctggcaaagtcaatactccggatgattcttcctgaactcctctaagtactaagatttgaagacatttcaccaacctgggagcatttaacaacttctccactaccaagcttgacttgatacttatgtttagaacttctaaatgttctaatagctgcaactcctccactaagctcatgtctagcgacattttagactgtaaaagttgcaatttcctcaaacttgatatatttgatatccctgaaatactcttaagtctcttcatgtaatccaatctcaaatatctgagctttttcaactcttgtagaccgacaggtagccgcttaatgtatgtccacgacaagtcaagataacgcaaggagactaactttgatatttggttaggcaatttccggagacttgaattccctgatagatccaaaacaactagcattgggatacaccggaagaattcatccgagatatgtagcaatgaatcatttttctgaaggaacagagttgtaagttccaggcattcgggactgccagataaaatttcaatctcattttccatcagcgacatccttctcacagaactccagttcttgactttcggtacctcacgtaatccaacaccgacttgcacaatacatctttctttatgttccccaagatcagatgcaatccatagagccatctcccgaaccacatcatgcattttaacttgttctttattgatagcttcctccaacaacaaacatgctcggacaaggataccaatgatctcataaccttggcttaatgctctttctctactttcattttcatctatgaatccctcacatatccaatagtctatcaacctctctttttccatacgataatcttcaggaaacagagagcaatataggaaacatggtttcacctgctccttgtttaaattatcatagctatactttagaataggaagaatttgttccataccagggaattctgcagcatatgagctcaaaacgtcaattgcgttacgccattcttgtaccatccttttgcatgccatggtctcgccaatgacattaagtgccaatggtaggccacaacattttccagcaacttttcttgcaagttcaggaatgtctggatggcctttcaatgtgttttctccaactttcatttggaacaattcccaggcttcgttgggttctaggcaactgacttccatcgggtcatcaacccgcatacgcccacaaacatctctagaacgagtggtgaatactactttgcatccattttgtctgcttggataagggactccaagcacttctaaattcactttctcccatatatcatccaacaacaacacaaatttttgtttcccaaggacattgtatatgtcaagggctctctggttttcatttacattatcccactcttcgcctccaaggtctagtctcttcccgatgtctccttgaatcctatggatatctggactcttagacaccaccacccatatcacaaccccaaacccgctacatttttcagaaaacttgttgttgattcgtgtgagaagggtggttttgcctactccacccatgccataaagacccacaatctcgtctccgtcttctgtgagacgggtccataccctttcgagcattgtttcctgacctacgattgtaggttgaataggcatctcttcaatcctagctattggagtggctaaagtcacagtatcaaaatctccttgagaactaagactctcaatctccttcaacatcaggacaacccttttcccataaagatagctcattttcacatttttagagcaaaatccaaagagacacaacctttgaagctcagcgtcattagtggtaagcagttcattgaatttattctcgacggtcgagacattcgtaagccatccttggacttgagaaagcctttcacgacgccttgtgaactcttctatatctacccttcttttcacatcatctcgctttttcttcagcacttccatgtctttcttcatagccactacattcttggagagctcgcaaatataacccacgttgatgcataaaccttgagagatttgattcacaacttcatcacaagagaacgagagtgttaaacaagctcccattgctggagatggaaagaagagagaaaagagagatctagagagcaaaacaagaaaccaaattgagtgagtgacaattattcaaaatgatgaaaagaagagatagggaataaatgattactatatcgaatttaaagatgtatagaatagaatttcaaccacacaaagggaatcaatgattactgtatgcattattgaaaatatttatacttttccacgattatgacatttcccactactctaataatattgtagaactttcaaatgcaaaaaaaaatcggatacatttaagagaaagcacaaaagatgaagtcttgtagatatttgctaaacacttacaacttgatggatttttggttccttttccctacgaatattgcaaaatatccacagattatctatactaactgcatgatcagatgcattcgagctacaaattacctcaacctccatggcaactccatttgtgctcctatatcaacttcactttggaaattcccaagcagcacaagaacctgataaaacatctcctttcacatgaatacatgcaaataagtctgatgtagaatttgaaattttggtctttgaattgagtacctgatctaacggaactgaaacacgatagttatggctatgcatctgctatcctgaccaagaaccaaaccatgaattccatcttatggtgagtatattgcttaacctccgctagaaacaactcaaaccttacattcaagcaatccaacataaaaatccaataacatttcacacacgaaattacacgataaacttcctataacaagtttgagaaatgagaggaaaagaagattcagttgtttgatgcacagggagatgaaggtcatacaaatacaatctaaagaacactccaaaacataacaaaacaagagagtggtagaggaagtagaaagttcttgcaaaaagagtagaaaaaggaaaggaatgataatgaggcagcataacaacatgaccgttgagaccatacaagttttatcagaaatttattcacacctgctttcatttatcgattacacaaaaccaacttgcatgacggtaagaaacggagtcttgtggctttgtcctcccactcgaccctttccttccattcttcatctccatattgtatgacaagttcttcacccgccacaatgcaactttgagaatccaatggaagctttgtcagctttcgacacttattttgtacattgatctgattcagacatggaaaaggcaaaggattccaatatatgctcttcagttcaggtaaatcccacaagtgcagatattctagtttccgaaaaggaacaatatcagctgtggaagctttctcttggcttattatttcttctatttggcgtgagttccaaacattgagatgagtgaggttaggagcaaacaacaaccacgtcaaatccttaagaccattgcaaccagttatcaaaactttggatagatttggaaagcatgggcttgtcagacttgtgttcctttctataattatatcccgcattccacatccccctatgaagacttcccggagatcacctatagatggcaaagtcaatattctgactgattcttcgtcgaggtatttaacagataccttttgaagacatctcaccaacctgtgagagcataacagttgttccaatgctgaacttgatatgatctctatggttagaacttctaaattctccaaacgttccagctcctccagtaagcttatagttagccacattcttaaatttagtagcctcaccgtcttcagattcgacaaatgatcaatccctgaaacactctcaaggcacaacattgactctagattcagatgcatcagctttttcaactttaataaaccaactggcaatctccctatgctcgaatatgacaagtcaagatatcgtaatgaaaccaactctgatatttgatccggtaacccactgagattgacattccatgatagatccaaaacaactagccttggcatagacctgaagaattccccggagatatttaccagatggcggttatcctgcaggaacaaagttgtaagtttaggacactcaggactgccatgtatctctttaatcctgttattcaccagtgacatcctactcacaactttccaatccttgacctttggtatttcgtttaacctaaaaccggctcgaacaatacaattatctttatgcttccttaggtcagatgctatccacagggccatctcacgtaccacatcatgcattttcacatatgacttattgttgaactttcctccctccaccaacaaagaggcacaaacaagagtaccgagtatctcatagccttcacccaccgctccttttttattttcatctccatcaatgaatccctcgcatatccaataatctatcagcctctctttttctattaaatcatcttcgggaaacagagagcaatataggaaacaagttttaacactctcactttccagattatcatagctgtacttcaaaataggaagaatcctctcctttacagcaccaaaatttgcagcatatgttgttgagacatctactgcacgatcccattcttgcgttgtcttcttacatgccattgtctctccaatgacgtttagcgctagcggcaaaccacaacatgcttgagcaacttttcttgcgatttcgggaatgtcagggtggctgcttaatgtgatatctccaacttttttcttgaacaaatcccacgcatcatctgcacctaaacaccggacttccatcggatcatgaactcccatgctcgcacaaacactttgacagcgagtggtgaatgctattttgcatccgttttcacttgttggattcgggattccaatctcagttagttccaccctcttccatatgtcatccaaaagcaacacaaatctctttttgcttagaaaattgagtatatcgactgccttttggttttcacttttctggttccattccacgcctataaatcctattttttcgccaatctctttttgtatcttgtggatttgtagatcaccagataccacaacccaaatgacaatttcaacgccatcatcggtgtcacaaaacctattgttgatctgagtgagaagggttgtttttcctactccacccatgccatagagacccataatcttagttccatcatccatgaggtggtcccatgccttttctaaaattgtttcctgaccaacaatcgttggttgtagaggcctttcctcccccacagctctcgtagctggatgagccacctcttcaaaaatccctttagattttaagtcttcaactatattcaacatcaagaagacccttcttccatagtcatagctcaatcttaagtttctcgagccaacaccacaacaacacaacctttgaagttcaacagttctactactatctagatcattgaattgggattcgatagtcttgactctcttaagccataccttgatttgatgaagcctttgtagacctccttcttctgctgtctgcaccttacgtagcagatcatctctcaatgccttgagatcttccatggcttcctccaaagaagtgagattctcctttatattttgaatataataaagttttctgcaaaagcatctacctagatggttcaacaattgatcgcatgatacttggacagagacacaaccacccatcttgcacttgacacacaaagacagattcacaaatgcaacgaggaagcttaatcttgaactgaaatttagtcaattggatgtgaaaagattatgtggaagaaaagaaatttgctggaaaaaattgtttgaatgggtcaaagtcttctttttgtatcgtcattatgcatggtagcatcacatttatatgtaatatagcaaatttaaagaatactacagtagcaatgtcactttcatttctactatataatatggggaagttgcctacgaaaaaaatcttcatttcatttttacgcctaataaaactccgtccttttcaaaggcatataaacaaacaagtttattcgtaaaatcataccattaacaaaaaacacctagctctgttaatcacacaaaactcaccatagcagattagttaactttgtcttaaaaaattactggaactggctcagccaccacaaaagcatcaagataacccttcacctataatgctaactctttcttaaaatgatctagagcaaaaacgacagctagacaacttctaaactggagtttcttacatgaatacatagaacataaggtcgatgcagaatctttgaaatgagtacctgaactaatggctttggaacacgagagtcatggctttcccaaccaagaactgaagcatgaaacccaaccgtatggtggcttaagaacagcaagattgatctccctctgcacaaaacacgcattcaagcaatgcaacatgtaatccaaaaacatttcagactaatgagtagtcttcagattaagtaagtaactgaaagtctagcgactagccttacaaagcagaggctttattagttttggactccagtagtaacccatcagagatggactcaggattaggtgtatgtatggtatgggcggagtaggaaaaatcttactcaaatcttgcgcatctcaacacttgcaaacaccaaaaccttacaaatccaacatctattccacaaaattcattgttgatctgctagaaaggtgagattttgcctacttcgaccatacatacatacagaggcgtaatcccgaatccatctttgatgagaatatgactcccctttggcgcataatcattgacaaaacttgatgctcaaatgatactgagacagagaaacaaacacgcatcactgcactaatagagataaagagattcacagactaacaacacagcataagctaatttgagttaagtaaatcattagaatagagaaccagatcttgaatcattagaacaaaaaataacaaatttgattaaagtttcagtcttttcttcactaaaccctatcaagtttcgacaacacacacaatcgatccaaaagaaggttaactttaatcaaaaattaagctattgaatagccaaatgagaaaaaaaaaaaaaacggaagaacctctgcgagaagaatctatgtaatggtccgttgtccgtttgtcgagctcagctcagacatgatcttccacgcggtgccgccatctctttgggcccataaagaaaaagggcctgtcagagaacccatttcaacagatagcccatttcttcttcacaaaagaatatagcccatatagcacattttggcatattctctcactccaaataaaattgcactttgcgtttgcggtctagcaataacaacaaatattcaggcatttaagaaaactactagaagagatagaaaaacagaacaatatgtatattgggttcatgggggctcctcaacacagactacgtcaacaggttagatgcgaacaaagattcgaataataggaccaaatacatcatacactagtcgagaaatagtttttttttgctaaactgcaaatatcatataaatgaaaagatagatttacatgggtttgaaccttgaaaattgatttggcaaaaagttttaaaacaagcaagcaatatagatcagtctgggttgagcccattttagtgcaaccaaagagtcataagccgcctgaaacgcttcttcagtcttcttgcagtaatggaatttttaatctctctgtcaatggtcttgaatatcaccgatggaagaatatactcatgattgtgatgcaaattatttctctgtttccaaatggcatagataacagattgagcaatgagcttacgtagagttgttggcggtgaacgcttgttcttttgaagagtccatgccatgaggtcgttccacacaacaaagttgatgggagggagctccaatctcacactaacagtataccagatataacacgcatattcgcaagtcaaaaacaagtggtctctgtcctcaatgtccaagaagcaagcctagctttagtgggaaggcgatcaagatttgttgcccacatatgaagcgacatgtttgggaattgcacctttaaaccacactgtgcttgcccagctaaccacatccgaccttggtctgagaattcccacgtcttagctgaggagaacccattgcataacttgtcctccaccacccaatcatacgcatccaactcgtcagagtcagtaggcaacgctatagtagagaggtagataagaaggtcacacgccaaaccagttctaggagccgctagagtccaaccaactgagttatataaatcagctaccttagcattcaaaggggctctcaactacaggggccatctgttccaatgaacttgattaggggaccaaaaggagtccagttatcaaaccagaaactagcagtctttccatctccaatcttacacctgacaaagttttctgctaaacaacgcaaccttaagagacacttccagttccaagagtctgaaggtttttcaggttggttccaaaagctagtagatttgctacagttgtgatacttagagaaatagttagctttatctctggttgattaagatcaaacattctaagaaagcatatccaaaaagcttttcttcaatctaccatccgataacatatcgataaccatctttatagtggaagcatcaactgagaacccgcacctcttcagttcttcaataagtttaactgatttggttgcatcaccatctccaagatgtgccctgatgagtatgttgtatgtccaaccatctggcgcatgcccatcctcttccatttttctaaacaacagttccgcttcagacaatgggcctttcttacacagtcccccaatcattatattgtatgttttgacaccgggcttcactcctttgagggggaggctacagaataaatcccaagcatcatccaccttactagcattgcacatcccgtgaatgatgatgttatagataccaatatcaagctccatcttactcttctctattttttcaaatatttccaacgctttttctgattccccattgtcacacaacccatccagcaaaattttgtaggtcacaatattaggaggaactttacgagaaaccatctcttggaagagttctttggcaacattaagttttcccaattcacaaaatccttggataagagtgttataagtaactgtatctgcaaccactcctctcaaagacattttgcggaagagttccaaaccatcgtcaattcgattagccttacaatatccatttatgaggatattaaacgtcctgatattaggatcgcatcctttgctaaccatcagatccaccatctggttggccttatctaggtggttctccttgcaaaacccatctatcaaagaagtgtatgtgatagtatcaggagctatgcctcgatgtatcatctccttgtgcagttcttcggcctctcgaagctttccctctttcacaaaactatcaatcaaaacactgaatgtgacaacgttggggttgattttcctcttgatcatatccctcaataacttggcaccatcatcccatctaccagcattacaaaagccgccaatgagaatgttgtaggtaataatatttgttgtgatccctttcatttccatttcattgaaaaggttgaatgcattgtcgaggctcccgtgtttgcaaagaccatcaatgatgatactgtatttgactgcatcgagcttgatatttctttcttccatctttctgagcaactccatggcaagggcagtttggccggacttacacattacatttaaaaccggtccgtaggtaactgcattgggttgacagccatattccaccattttatctatcaaaagcattgcttcagcctctttaccgctgagacaaagtccattgaccagagtgttaatagttatgagatcgggtttatgtcccatttcaaccattcgatcaactaattccagagcttcggaaactctaccctcgagacataatccgttgattaaagttgaaaatgtgatagtgttaggctcatacccaagtttaatgatcttccccatagcagaaaaagccaaacagagtttacgacatcgacaaaagcaattaatcataatactcagagtgtagaggttatgcgcgattccctttaattccatttgcttgcagagagctaacacaagatcatactgtttcgttttggcaatggcactaaacaatctactgaaatctataacagtgggaagaggacgagagtgaatcatgtctcggaacagatcaatagcatcatctgccttaatatcgacaagcccacttctcaatctctctctataagacagatttctatcgctgaaagcagagaagccgcgttcgcagcaaaaagatagctcatttgggcaattaatcaaagcaattctcagagtacctgtctccaggagacgaggctgaacaaatttcgaaacttgagaactcaatctccgtatcatcaacttcaccatctcaagctgaatcgttccttttcaaactctcactctcactctgtgtgtaaattgcaaaccctacaaaacagccatggcacacgacggacggagcttagagacaaaagaaacaacacccgaaacgtaccaaataaaccggttcaattcaaattatgccggaattggttttttttgtatcttactataaaatacggaaagatttttatcttttaagttgctcggtggaatgcatcaatggcctttggcaccctcctacgttttgatctagcgatccaaatactgccacgtctcaatttacttgcaaatagggagagtccagtaactcgggattagagagagcttgtttttattcactcgtgtttttgtttaatcggtctaaaccggacattgtatgttaacagattcatagtgtagtgaaccgaacattttgggtatcattctaatgcgtatatttatatgctcttttcttttcaccactacaatacttcttatcatttacatgtggtattcattaacggaaatattattttgagagctttgatcttcacacaaatcatgtattagtaagaagtaacaggaacatatagagaatgcatgtatctaatcaaactttgaaacttgcatcagattgaaatttcattttcgcataaccatctacacaagaaaactataccataacaagaaccaaaaccgagtcaaaaactaccgtttcgagaacatgaactacaatgtcagtgccataagctttttcaaaactttgttctgatgagccatcataagctttattaccttaaaccatgttatctaggtacaacatgccgccctgaaagacaaacaacatccaacagcaacataacaacacgatattgaacagcacaagcttgagagcaacaaaagatctttaaatcatttcgcaatctttttactttccacttcacataccaacaaaacacagtccttgtcacagatcgtgccaggataaggttatgaaacaagaagatagtatctcattcaagaagactactataacatgaagaacattaaaccaagtcttaaacaaacaaaaaggcttattaaaagaattcaatgctagatatcgaaatcaaacatttcaagatcgaaagagcgaaaagttaccacattgggaatcaatgagattccttgaccccaatccaacgaattacaaaggcataaaagacaaaccttgacattcttagagattagataagataagaggaatcacacagacaacatttccattaaaaatgaaaacaaacatgaagaagacaaagttagtaagcaaattccacaatgataaaacaaaccctagctaggattcgctcgaaatcaaacaaacaagtgaaaaaaacacaaagaatctcttcttaaaaatttcaactttcaaaacataaaagattagatctcacttagcaaccatccttgctatgaaatcttcataccggatctttccatcggatccaacatccacctccttgatccactcatcgaactcattaggctccagcttctctccgatactggtcagaatatgcctcagatccgccacagcaacgaacccggtaccttccttatcgagcactttgaatgcgtcacggagctggcgatcgaaaggttccgtcttcagatgtttcgccatgagatcgaggaatctgttgaaatcaaacggtgaagagagattctcggatgcgattatggatttcagctgggcttgggtcgggtttccgccgagagatcgcatgaggatcccgagctctgacggtgcgattttgccgtcgccatcggtgtcgaagagcatgaaggcttccttcatcgacgagacctgatcgtcgctcagaccatctttccccatttttcgattcttccgggttttcaggtcagattccgggtcagatgtttctctcttttgcttcttctctgtacaacgaaatttaggatcagagagtcgcgtttgtaacttttaacgagagaggtgttgatatggcgtcgttttatctaatattcaaggcccaactatttctggcccatttatctcttgaaatcttaaaagatgaacaaagtctaaccaatcatattagtggaaatttaaagtttaggatcttatttttgaaatgaatgtctttcgcctataaagttttgatatgtttgctagttacaaattaaaaaaaagaatcaaatattagtaggataatttgagtgggtttgcattttaatatttgtattggcaaatgaaattgcttaaaatgattccactatacaacaaatcattaagtttgagaaagtgggataaaaagaataaacatgacctaatatttctttaagccacaaccgatagagtcgttttcaaagtgacataggaattataaaaaggtttgatttgtcccacataattggatctatggggtacaaagacaattgtttaaatgcattggtcactatcaatgtatatagcaaatgatatcatcatgtgatttaaaaggtaaccttccacttggatgatttttcacatgtttgagttcttctatactttatatctttcttttgggtttgctttgaaatatgattcacttgtttgaaatttatgccattatctatgactatctccattatccctagatggaaaaaaaagtatccagacactccttatcaacgatcaatgagacattatctattatatccacttggttttagttatcacatgatactaaagtcattgaaattgggtctgaatagtgttttttattgtaccaactaaatgaaaattttctaaacttaactactattaacgaataaacagttgataaatcgttttagactaattatagtttaaatctcgttagcctacacacgtcaaattcgtctggaatagtgtcaaagtcgactatctagaaaccttatctttaaaaaacagaaagaaagaacaaaacatagtaaatcttttagaaaatttacctatcactctcacatattacacattttcaaaatctaacctttacaccacaaaaatttaggataatagtactctaattacctccgttaattcataacaagtgcattctctatgtccattttctgattttaaagcaacaatttctaaacaaaggagctaaatcggggggtacttgattaaagttgatagtattggggctaaacctaaaaactagacaaatatacaagggccatatcgatacaaaacgaaacgagacttttcttaatgtctacgttctctataaaagcaaactttaagctaaaacccaaacaagaagcagaacacaagaaacgtgagaaactttgagaagaccaagaagaagaagcagaagaagaagaaaatgaaattggtttggtctccggaaacagcatcaaaggcttatatagacaccgttaaatcggtaagttttttttttattttccggtgagttgtgaaggaataataacacacgcttcttctctccagttctcgaaaactcagatcttaattttgttaaagattcatggtttgttcttgtaacgatttttttcttttcttttttgttcagtgtgagaatcttgaaacgccggacgcggcggagctaatagcggcgatggcggcgggatggaacgtgaagctgatcgtggaaacttggtcagaaggagacgcaatagcttcaagtattggtttaaacgtagcaagcaaacacgcaaacgctaaacacatatgtatagtacaaaactcaagatcagaatctgcttatctccaagctattcaagaatcttcatctcccttgaactttccagagactatcgtcgctgaagaacccggaaaagcgatgaagaagctacaaggagtcgacttcttggtcgtggattggcggaacaaagaatttgcagcggctgcgttgaaaaacgctgcgtttggaaacagaggagctgttgtggtttgtagaaacgggtattcgagcttgagaagggttttaagagaccggaaagttgttagaacggtgactcttccggtcaccggaggtattgagatagctcatgttgcggctaggaactcagggaagagtggtaacaataagagaagatggatcacacatgttgatcagagatcaggagaggaacatgtgtttagtatctagaaagtcagagacaaatagtcataagtgtttattggatcttgtatttgttgtgtttgtacataagatgattccatcagatgcaattgttattgaagaaaacatgcttgtcttataaatgtgatctttgtgttgcaaaactactatctctgctcgtctctcattgcaattcacttgcttctatttgtctaccatgttgggaagcatgaagaacactacagagtgatgggcttaaaaacagttgtttatgagttcttgagcccattacattagtgctctccgtgacttgtaatcatatccttgactttatctacaaggaaagtaattggggttcccacataaatgcttaagaaaatgacctaaagtgatttggtgggtatgttcgttgccgacgaggttatcataacaatcgaggagaaaaaatttccaactcgggccaatttataataagtggattagcttatcttctttatacatcatgttagatccatttccacttcaaataggagaacggaaacatcacatcatcatgcaaaaataccactacaaagtgggaataatctatcagatcaatcatgaatctaaaatcatatgcttctaacttcaaatttgattagcagttacaagattatttatgttgtttatataatatgctgatttcaccaccccctacatataatgtgagatagtgtaacgtaaaacataccccaaccagaatttcagattgatttcgaaaacagaccttccaacaaaatcataatgaagaaaattctatctacatgttaccgagaaacacacgtcgaatcatggattttctgccattttccaacttgaggttttcgatatcgataatgtcacgagaaatcaaagggataagagatagaaaacaagctcaacattcttggttaatatccggttagggtaacatagtggtttgtttcccggtttcatttgtctagattttgatttccggttaagagataaacattgctttcgtttagtcctatttcgtgggttcagcttctatgttctaaacactagtcaatcaacccaaaagcccaactacataaaattactactggatggtttttggtgttattcaaatgtaaacacaaaaagttaataaacaacacaaaagtgaagaaacaaaattttggttgatgactgaaaaaagtgagaagtacgtttagaaaaatacaaacatgggctatgaaaaacagatgacgcttgcgttttgtcgtgaaccgaagttccctgcggtgttgggctgtccggtttctgagcggtctgaccattatgcgatcattaacattatctcaattttaagaaaataataataaaaatggccaaaatattgataaagattgaagaaaaataggagaaataaatgagaaaggaggtgagaaggcgtcacgtgcacatgatccaaccggtgaacagagacatgtcacgcaaagtcagccatttttcagagcccaaaaccaaaaacccattcaaatattcatgagctttaggacgatcttaccctctcgttatcccattttattactatcacatgccccttgttttctcactttttgtgtgtgtagatggcttttttttcctaattaaaattcaaaagataattaaactcagatcatgtaatggatatatccattgttgaatctttaattttgatcatcattctcggtaaactatgagttgaaaactttttttaaagaaatgagagcaaattgttcaaatgtcttgtatttaatgaaagtccaattatgttgtggtagcattatgtttgtgctttgttgtcagtggctcagtgttataaattcatgtttttagtaccttcatttttgccactacatagttatggcaatgtaaatttctttaactacttttatctcgcatgaatctttggtaaaaaaacttttttttatcgaatagttatagttatacactatcaccttagaatgctgaacactacattaatcaagatgccttttccaccttcctttctcaattctcatgcttatgaattcatttcaaaaccacaatcacatgaattatagaatgagaattcaagttggggagctgaaagagaagacagacccaatgaataaggcacaccaatctaacaagtccataggccaaaagatgtttttgtttggtaatgtgggtcaaccaatatcataaatgaggtagctggatttgcatttgttgctgctcttctcaaaatttaatgtgacaattccccctactggatatttattactaagcaacaaataataaatacaaaagttcatatatctcatttttagcgatttgatgtctacgttttactacgttactcacgagctctcatgaattctggaactgcatatctttattgtgtgtatttatgaaaacaatcatacaaggatgacaatcgtaaaagtgatgaaaatttgtacaacttacggcagagtaaaaatcgcaaaagctgttaaattagtatggtaagaaaacgatgaattttaatggaaaataaaaaattatcagttgaaaagtcatgaaaaactggtataagtaattgttttttttttcatttcttaaatcttatttactgtcgcaaacatatttactctctaaattaatcaattatgtactgttttctttactcataccaaccagaactctaacctaacaaaattatcacatttcaaatgtatgtgatctcattttaaaaatcaaaatccctttataggtcatcattgccaaatttgacgctaaatattaggtatcacaattttgattattgaaataattttctgtcgtttccactataagctggttttttgcggttgcgactattataagctaatgtatgttgggatatgaatggtagcagaattagaatacaaaccaaaacttcaagcatcaaatctatatgcaacccaatatgcatttattgaaagcaattttttggtacactttagataaaaaggaaaaaaattgaaaaataaattaagtgctaatagaaatctcttcttcttcttattttctgacatgagattgtcgttacacccataactatacacctacgtgtacgtatagctttgtttgtattttgtataattccaagtatattcaccaagacatggatatcaaaatcaaattaccggatgagtaaactcatgatttagatcttcatgtaaaatccaatattatccgcaagacaaaaagagtggttttattgcgtaaaaaaaacttaggagggttttaaaaaaaaagtctatacgtatagtatatgattgttttattacataattctctttaagagctcatataatttacatacaaaatttgtgggtctatctaacatgtaaaatatgtatagcttttagcaaacttctctgattgtttcagaagaaatgatcacaagctgacgagatgaacaaaagtgatggtgagaaaacagaaaaagagaaactcgataaaacacctctttaacatctatatcgaaggaaattataatcattgccgtagtcatatacacacacgaacacgtaaatcaagatatttgagtaacaaaattgaaagtattggccaaaaaaacatgaaaagtgccactagaattagtgctgggaaaaaggcagagctaacaagtacaataatttcgaaaaaatgaaatgaatgaaaagaaattacgccaatgaaacaaaacaaaaaatgctgaatgatcaaactatagttactatgaaatttatctgttttttatcttctaataattaatcaaaaatcgaatgtcttgaatataattattccaatctataaattaacatatatgaaatttcaaattcaagtattttttcttccattttaaatgaagtctatctttttatttgaagtaactaactggttatttatatattgatttgtaactaatttgtctcggcaataaaagttggattctttgaagttttttttttttttttatcgaaaccatgtgtcaagtgtagtgctaatataaagttttgacggttttctaacacatgcaagttttacacagataaattttctatgtcaagcttatacgaaacatatactattgttttcaaatgaatatactgttgaataataggtgatttttgttggaaacagataatagaaatattttttgtatggtatatataatattgaaacgatagtgtctattagagcaacgacaacaaaacatgtctataagagcatagtcttcattttggttttgatcttgaactaagatggaaacaaattttaatatttgaccaaagtttaccggcataaaaccaaaataaaaataatcatcactattctctttttttttttcttttttacaaattgacttgataataatttatgttatcatatgatatatgtgtatacataaaattaaagttaaatattaaagcaaaccagaaaaaaagagagcaaagaaggaagaacaaaaaaaaatggctccttcgtcttcatcttctccttccaaatctcctgttccatctcttcaccaatcccttcacttcactcctgtaagtcaaaactctaatccctcttctttgttccccgtggaagaagacagcacatacctcaatttagtttttgttttgtctttgctctgtcacaaaatcaaaaacttttctttctgtctttcaaaaatagtggaattgataggttatagctcgaaatcttcttgtttttgcttaaaaatgaaggaacagtggcaaaaggagcatgttctgttaccttttcctctaaagttttctcctttgatctcaatgattccattagaatctcatattcatgtcacttgaagattcttccaaatccaaaggttttgtttttctctcaatttagcataattttcatttctctctctgttttttcagattctagaatgtgaagaagacgacctccaagaagaaagatacaaaaacagagcaacaccaagcagcgacggtggttcttccgccacaccaaaccaccagcaccaccgccgtaccaacagcaacaacaaccaccagcacactctaacacctctccaccacaacggcaaaccccaaaccagaaaacgacatgacgacaacgacgaagacgatggtggtgccgtatcctgcaacaagtgtcgacctcaccactctcaccgtgacaaattctccgtcgtacctctcgaaagccacaacaacccttctttcatctctagccccaatctcataatcaaatccatcttccaatctctcacacggagaagccccaaaccttcctctgcaacggcggcgcttccaccgcgctcttcctcatcctccgccgcagatgcttctagagaagaacagtggcggttagctgtggcggagctttctcataaactgattcaagccacgaagaagaaagaagacgcggttatagaagcttctaggttgaaatcatccatggcagagctagagaagaaactcaataaactcgagatttactgtcacaatctcaaatcaggtctcgacgaatgcagcaacaaaaaacagagtgttccgattcgaaaagacggattcaacgacaggatcattcagcagtttctcgtctctgtgtcggaatctcgttcttcgatcagagctttaagtagatctctcgcctcgcagctacgaaccgtcggtggcaaagtttacgagagactctctcttcttcttcaacctttcgatgtaaagatcaactcttttgccaaaaaccctaaaagtctgatcttttacctcgaagcgattctgagcagagccttcttcgaggatttcgaagctcctgggtttcagaaaaacgggtcgacccggattttgaatccaattgatcgttgtgaatccaattacgcttcgtttaacgtcttgatggagctgacgtgggatgaggtgttgagcagaggaacgaagcatttctcggaggagtttagccgtttctgtgaccggaagatgagtgacgtcgtttcgatgcttagctggaaccgtgcctggcctgaaccgcttttacaggtaagcaaatgttaaaccaaccaaacggttaataatggtttatttcaaaactacttggattgaaccggtttttatggcaggctttctttggtgcgtcaaagagtgtttggttggttcatcttttggctaattcagtgaacccggggttgcaaatctttcgtgtggagaaagatgaccggtttgatccgatttacatggaggaaaccggtggggaacggtttaagagtctggttagagctatggttcagcccgggttttatgtctatgggagtgtggttaagtgcaaggtggtttgcaagcaatgcggcagcgatgaggaagaactagaagaccatacggtcaaagaatgtaataaaaacgacaagagtttaataagcatttgtagcccattaggaggttaattacgttcatttaaggtttaaaatattggtgggtttttgtcttgtcttgtgaggttgtaattaaaaaaatcaatggcttttgcaagtgaatattttaaaactgtttaattaatgacttttgcaaagaaatatctaagaattagttgttgttgttgttgttgtcaaagtgattcatgaaagagtcgttctaaagtaaaatattggcattttctcgttggtttcgttatctttgatttgattacatttacgcgcgtattagtagtaacaaaatgggccgtttctcaggcccaatatatagaatttgctaatcaaaatccgagccttctctgaaaaagcccatttttgttcgttcttccttgtttcttcgattttccgtgactgattctgttttgcgaaaaggattgaaacaacgatgtgtaagatacattgataatttcagctctggaaatagaggtgctgcttctactgagtaagtttttatagttttccagactaaaacccacataagtttgatatgaactgagaaagagattgtaatgaaaaaccttgaatgtttccagatgacccatgaactggaaaaaaaaaatccttttcgcaaaacagaattggcttctcaaaacacatttataggttcatagttagttcttatgttggatgttcatgtcaggtctgagaatttacctccttaagcacaggttgttcctttataaatgagctccatttcggcataatgaagtgaaccctttagttttgtttgtgtagactctaatgagaggagtcactgagactgataagctagcaaacggaatcttccatgtataaacagcttgggaagacattttctaggaagctaacttctcttttctgaatttgaattctttcatttgcagcttgtttgcttagcggatctcgagtttgattatatcaacccttacgactctgcgtcgagaataaactcagtggttttaccggagttcattgttcaaggagttctatgcgtattctacctcctaacaggacactggttcatgacactcttatgtctcccctatctctactacaatttccatctgtaagtccaactaatctcaatcttttgctccaatcaaatgttgtggtattgatatcctttcggtttctccgttgttcagttactcgaagcgacaacacttagtagatgtcaccgagatcttcaatttgctaaactgggagaagaagaaacggctgttcaagcttgcttacattgtccttaacctctttctcactatcttctggtaacgagaaaagatatttcgaatcccattattgcttaaccataagtagatcaagagagctaaaacactttctgtctgcaactttttttcgtaggatgatttattcggcgctggatgattacgaggactgactaatgaagaagacatggtccatcttcttcggtttattgacactacgcttaaagatacagcgacatgctcgtggacatgaaaaaaagcaaggaaaagtgtttgctttgtgatgtttgtaagattagtggcaggaagatttgtgtatttatttatttcttagaaacatgttcagattaactgttttttttttatcttatgtcttgatcattatttgtacaagcaatcaagctcgtaaactactggttacagtaacaatgaaactgaatattttcaaatataagaagaaaaaaagttaattcatgtgaactttgacttttaaaagtgggaaaccctttagagtgatgtaataaacgagaacttaaaagatgattcgaaccttctgtttcagtttggtaattaggttatcttataaagctaatccttctctcacactgacaatcgtcgttatcaaggtgatttctttctctgcgtcaaacatcgcttaccctcttgattgattcctccaatcttcttcgtgtggtttcacaggtgtgtggttgatctctagacccaattgatgtggttccatcctatttttatttggtctgtaatcgtaaagtctttaagatttgggaatcgagtttatgttgtggtgtttaggtagcgaaaccccagttattaaatcgttgcatctagtaatttggggtcctttaattgaaacaaaggattaatctttcattcatctttgttcgttcattagcgaaatccgagccttctctgaaaaagcccatttttgttcgttcttccttgtttcttcgattttccgtgactgattctgttttgcgaaaaggattgaaatgagttcgatctctggattggtggaagatgaaatcagttcgtttttcgaatcgtctccacctctgaagaacaaggaagagatcgtagccaatcttaatcagttcattgagctgaattcttcgtgtcaaggtgagatcagaatttgtgtatatatgtaacattttgatttctgaatgacttaaagagggttttttctttcttttattttatcaggagggatgaggaggattgtatgtgtgacttcaggtggaactacagttccattggagcaacgatgtgtaagatacattgataatttcagctctggaaatagaggtgctgcttctactgagtaagtttttatagtttttgttttcaattactctttatagaactggtaaaaatatatattattgaatacaaactttggttttgatttggattgcaaaggaatttcgtcaaggctggatatgctgtgatatttctctataggaggtaacaatttgaatgttgttttgtatttctcagctgtgtgtagtttaaagatttagtgaaatgatgcttctttatatcggttctattatgtcatctttaggggaacttgtcaaccgtattgccggtatcttcctgatgatccattccttgaatgttttgagtttccagatgccaaaaacattcaaggtttttcattacaatctctttctcagttcatatcaaacttatgtgggttttagtctggtattgtaacaaattatgtgttttttgttcattttttttttccagttcatgggtcacattcaggagctgtgaagatggctgttatggaccagcaagctgtatgcttagaccaactgtgttttattttacggaaagctgattacttttatgtattttcgagtcttttgtgtagtaaccgtgcaaattaacattgcaggcagttgcagaaggtcgcttgcttaaactcccattctcaaccatatatgaatatctccaggttcttaaatcttacactagctacttcagtcatattgttttgtcttgacacataaaatgtaatcttaactgcctaagaaaccattagaatttatctcaatgcttgtgggatttctttaacagggctgcaactgagattatttttctttggaatacaaacagatgttgcggttgattgctacgatattgaaagatgtcggtccatgttcgatgttttatcttgctgctgctgtatctgacttctatgtgccatggttaagcatggcaagagtctcatcatatccctgtgattatggctacacaattcttgcgtctgaaaattgacttcttatatatttgtgaaaccagacagagcacaaaatagaatcaggatctggtcctttggacataagactagctcaagtccctaaaatgctttcaatcttgagatcaaattgggctccaaaggctttctgcatatcattcaaggtcagctctctccttctccattctctctctttattgtattagttgtccataatttgattattaaaatagaattatgtatccagcttgagacagactcaaagattttgctagagaaagctacaaaggctttacaaaaatacaaagtgcacgcagttgtagcaaatgaactattaacgcgtaaggaggaagttgtggttgtttcaagtagcggtaatgttgtggtgagacgtgatagcaataagccggaatctatcgtagaagataatctcattcgtctcctcgtagatcgacattcaacatacatcaaagaatctctcacttgatccccaaattcttctacgtcaagaaaagttccaagtgttcgatgtgggatacgtgtaattgtgtatgagtgatgacttggaccataaattactcaaataattttcacactttcttatgtttttgacatgttgggaatatatgaatcctagaaatcaaacattttcttgtacttaggaaaacttttcaacaaccaaatgaaactaacttgtctatttatcctcgaagagacctagtccacatcgaaggttcgaagcttggtttaccgattcaaaccaccggttcgggtcaacacggctttcgatagagataaatttaattttaattaaaaaaggtgtttggagagagacaaccaaaaaaaaaaaaaaaaaagagtttcttcatcggtcttcgtctcgtcgtttgattagttctctacatttgtttttgattagttcgcgattcatttctatcttgtctccggtcaatatttttcttcgatccgtcgatcggatattttgactggagatttaagaagtctgaaattgttagatcgcagctatgtcgtactctgactccgattcgtcgtctcatggtggcgagtacaagaatttccgacagattacgcgtgaacgtgagtgttctctatctgtatcgattctcatctgttttgactctcgttgatttggattgacttgtcgattttctggattctcgtgatcgatttctgattccggtttttgcggagcagccattttagttttgttgtttctgtttgattctgggtactacgttcgtgagaacgataatgtgtatttctctgcggtttattcgaaattgaatttgtgaggagttcaatggctaagacttgtcgcggaattgcattgggacagttgtttgatgtaatattggggaaatccgttgcttgttacactggtttggtttctaaggttggaataaagttttaagatgaggtttatgaataggtagtagagctaaaatgttgatacgttttaccaaatgttgccaggcacttaggaacagaaactgatacatgtttgaaatgctcacaatgaaagcatgtactgtgtatacatgtaaatgcagacatggttgtttaatgtttgagaagaggtttgtggattatgatcgtagtcagattgtagagagttatatgcagtttagctcttgtcatgcatctttgggtctaaaattaaacgaggctttcgctgctataattgcttattttctcttaagtctcattagttacatttcggtagtctatctgatctattggtatttggtagtctatctgatctgttacatttctttaattcccaggactcttgtatgagatgcttagatctgcaaagacagggagctcaaaatccacctggaaggtatgttttccttgtacttcactgtggactggccagataatgtttttccgctttaaggttgatacccatttttcggctaaatatttcctttttcgtattttaggtactaatcatggacaaacttactgtcaagataatgtcgtacgcctgcaaaatggctgatatcacacaagaaggagtttcatgtgagaatgaagtatttttgtacaaattctagttccatatgatactttatttgggaataacttaattgtcgtaagatattatttctctgtagtggttgaagacatatttagacgaagacaaccacttccttcaatggatgcaatatacttcatccagccaactaaagagaagtaatttatcttcgattttcctttgacttccaaaatgtgacatttgttcctctcatataatgtttgattctgtttcatcagtgtcatcatgttcttgtcagacatgtctgggaaatcacccttgtacaagaagtaaggacatgaccccctcttagttatcaactctatcctaacgacaatctctttatgaaactgattttcttctttattcctctgcatctgtgaagggcattcgttttcttcagttcaccggtttccaaggaactggttggtcacatcaagaaagattcgagtgtattacctcggattggagcattgagagaggtgtatattgccaaaaaacttactttctagtgtatactgtgttgctatttaattttaacttattatttgattttcgttctacagatgaatttggagttttttgccattgatagccaggtatgatcgttctgaatatcctgtgtttgtgcattttagtcccgtttatattggtccacattatatggtttgaaatggagtgtagcctgcgtatcatgttgttagtcgatgtttcatgatgtgaaagaggggcaagagataatttatttatgacaacttgtacagggtttcataaccgatcatgagcgagctttagaggatctttttggtgatgaggaaacttctcgaaaaggcgatgcgtgcttgaatgtgatggcttctcgaattgctacagtctttgcttcgttgcgggtaccaatcattattctcacgattaacatgactatattatgcggatgactcttctgaatcattttggacgttacaggaattcccagcagtacgataccgagctgcaaagtcacttgatgcatcgacaatgacaactttgcgcgatttaattccaacaaagcttgcagctggaatctggaattgtctggcaaaacataagcagtcgattgaaaattttcctcaaactgaaacatgcgagctactcatccttgacagatccatagaccaggtttataacatttgtttacatttgatgcgcctaatatttgtttcgtttattaatcgcaattgcatacatctacttatggagctcatgcttcctcctctacaagtgttatatgattagcagcatttgcttgttttgaatgtctagattgcccctgttatacatgagtggacatatgatgctatgtgccatgatttactgaacatggaaggaaacaaatatgtacatgtggtaagttcaagtcttttccgtattagttattgtgattttgtggtggctctcttcctggatactccatgtgatgttcatttagtttttagattccaagcaaatcaggcggacaaccagagaagaaagatgtgctcttagaggaacatgatcctatttggctagagcttcgacatgcacatatagcagatgtgagtctgatgcctaggtatttatttctctttggtaacggaaaaaaaaaagttaaacttcttgacttgtgtttttcatcaggctagtgaaagattgcatgacaagatgaccaatttcttatcgaaaaacaaagctgctcagcttcagggtaagaggtgggtattactttttatttctgtagtaaatataacttgagagcatatattacccttctcctgaactggtggaaccagattttactgttggattagttcctcttgtcattcagtcattcagattgataatactcttacattactctacgttgatctatgtggtatactttatttggttagagaagtaggtcttctctccttttgatcaattttgtttgactcttttttcttagagatggagctgagctttctacaagagatttgcagaagatggttcaagcattgccacagtacagtgaacaaattgacaagctctctctccacgtagaggtagttccatacttgtacaattctctccttttcttttcttgttgcgtccacctccacttcaacttttggtagtgctactcacaattactctattaatatgcatcatttgattaacatttcacaggatttagtgtctgacgaattgtctgcacatgtccagagttattgcttctctggctttttctctgagcaccgaatttatataaactctttcttctttttgcagattgctagaaaactcaacgaccttatcagagagcaaggacttcgggagcttggacaacttgaacaagaccttgtttttggtgatgctggaatgaaggatgtgattaaatatttgagtactcaagaggtttgcatctagttaacagttgttgatttactgtaatacttcatgagatattgagctgatgagctttataattttttgaactactgtacaggaggcaagccgtgaaggtaagttacgcctgttgatgatcctcgcaacaatttaccctgaaaagtttgaaggtgaaaaaggtcaaaatctaatgaaggtacttggggttttagcgcttgtggatcttagtttggttctcatccaccccatctaagggtttagtattgcttgtgtttctagttggccaaactctcatctgatgacatgaccgctgtaaataatatgagcttacttggttcagccgtcgatgctaaaaagaataccccgggaggtttcactttgaaatttgaccttcacaaggtaatatcttctctctcaatcttcctttataatgttaaaaatgtacattttcttaacattgtctgttaacggctgcagaaaaaacgagctgtcaggaaagagcgccaagaggaagcagcatggcagttatctcgtttttaccccatgattgaggtaccaatcgcaattggccttgttgattttcctatttgcacaggacactacttttgactttgatgactttttttcatttctggtatttgccaggaactcatcgaaaaacttagcaaaggagaattgccaaaagaggatttcccatgtatgaacgacccaagcccaagtttccacggatcaacctcactttcatcagcagcaagtagtagtcaaggtcaagctgctcagtccatgagatcaagacgcacaccaacatgggctaaacctcgaggttcagatgatggatattcaaggtaaactgtttttaaacaatccaacaaagaatcagattggatcaatccagtatattgaataaaacccaaacataagttgactattattcgttgatcttgttaacttctttctgttagcaaagtgaaacctaaaagccagatgaaaccatgtgtcccattgttcatttgcagaatccaattcttgctcacatcatttcggaacattgaaaaataaacttcttaacttctttttttccttctttcagtgattcggtattgagacatgcgtcaagcgatttcaggaagatgggacagcgaatatttgtgttcatcgtcggtggagcgactagatcagaggtaagaagctatggaaaaaggctttcattgttggaaataaattcacatcatagaatcatgatatatgtgctgatctcttttcctggtatctttgatttccagttaaaagtatgccacaaactatccacaaaactcaaaagagaagtaatcctcggttccacgagcctggacgatcctccacagttcataacggtaagcctcacaaatacttctcattccgagatttggcaaactatggagtatgaatcacccactaaatcaaagtaatcttttactttcttcttgtgtcccacagaaattgaagcttttgactgcaaatgatgatttatctttagacgatctccaaatatgagaatccagatctcaaatcaaatccctgtctttgttctcttttgtctctcaaactaatttgtaaccaagtgaacaaaaaatcgtcagattatgagatcatgattgtaagtgtacccaaattgtttgtccgataaatatgtaaagcaactcataaagttgacttctagatctttggctattttcttgttacattcgattgtgtaaattacctaaacccttctttgctttttcagaatcttctcttatataagtttttcaattagatttttttgaatctgaatacgttgaatataaaaatgcccaacacagggcaaagtagtctaacaagtaacaataccaaggcattcaaagttaacctaaacaatagttatcttgggatcaacagagtctctggtgagctgttcttcagctttcctcttcttctttgttactgacaccaaactcttgacataagagatgtaactatccacattgaatttccgtttgcaacccgcgtagttcatgtaccgtatcttcccaaaaaccggcctctctttccatccctaaaacccgtcaaagcacgaatcgataaatcaaaattcaatcacacgcacaacattcaccaatctattctactatcacttctagtcaagtaagaggagaaaatgaaagaacctgatcatgaacgccacatatagaccacatgcacccaacatatccactcgggtcacgaccatcaatctcatactacaaaatatcaaaaactttaagcaacaaaaaggaaattcatggtagatacagaaattaagttggaagaaaaccttgttatttagatagatggatattgagagagcctcttcaggtcccttggtccattctagaatcttctttgcccaatacattctgcatgtaatgttgataaacgtcagtttttaccatagttgctattatatagcacagtcaaaatccagataaatgatttcacttgccgcatgaaaccgtgcattttcccttgataaaccatctctaactgtgaagcattccatagctgccaagattcaacaactcaaaaaataacacttaaatgcaaatgctatgagaaaagagattggtggcttacaggatctgctgtcagtcccttctctaactgctccaacctacaatttcaataccgtttaacgtgcatatagaagcttggaagattttctttccaaaagaattaaggagtaatggctaaaacattacgagtaaatgtgttccctcttatctgaagcatgatccattagtgacttgcgtgcccactcccaagctcccttcaaagaatcataatgaggttgataatagcaaaaattgtcggagagttctcttcgcacaatcaattcttccaagaatgtgtctaccgcctttaatggacaaagacaaacaatgcaaataccaaactaagagagtgaccaacaggtaacaaacagagaaaactacacaagtatatacattcaaaagtatgataggcctatgaacctgaggggaagtactccggactttacgcgcctccaaggcacaacgctgagctgatacctgcccgaaatgtagataaggagagagaccagagagtgctttcggctttataggattattccggtcagttgaataattcttcaacctcttcgtcaaaaaaccatctttattccccatcaatacttcaatccctgcatcttctccaggcacacaccattcaatttcaggaacttctgcaccctccctatccacatatcacaatcaccatagaactcaaaactcaaataagcataaagaagcaggcgttattaaacacattaaacagcaactaaccttacaactttatcaatgaggctatcccaatcaacaagcttcttatccatcatccccgtccatttcttcttcggcggctcaagtttaggaaactcaatgaggtaatcaggtagtagcttgttgatcttacccctaattgttctagcactgtactccaatttactcgaagcagcccacattggaactacattgtgagcatcaacttcatgtatcgctaatgaatcactcgttctcttgacaacctcatctttacaacgccggatttcccgtaaaggagagaaatcagtaaccagatgtgaagctccacattctgtgaggaaattagggattgtctcctttgcatctccctgaatcgtaaagttcatcttgagataagtaaagaacataactttacagctaattttcaataaacctacgaaattcaaaggtttattcaatgtctaaattagcttcatctaccatttcaattcctcatataacaaagagcgtaaaaaccctaacttttcctctatgattgctctaatttaaaatgggtttggtgtgagatcgagctatggactcacctgtaagagaaaaaacggaatttggagagaatcgatttggtggtgaagctgacgcaaaccctttaacataaaccctaattgcctcgcttttgcgtccagaaattgatcgaacagattgaaaacgacggccaccggcgcgttggttctgtttgccagatcaacggcgtggattaacgcccagttatctttcaaccgttgatctctgaacatccagtaaacgacgggacccaccgtttgatccaacggttgccatgagcctttctttaggatccggatccgacccggttgaactgagactgtcgacgccattacgaaggaggagagacggatttttccgatttcactaatgtgcgccggttatgcgacggcggaggaggataatttgcgcaggggatgctcaagcgacaaagcgcgcgatgtcttcgaaaaatggagggaaggcaataatacactgtttgagtttgtggtttgaattgatctacgtggatggtttacattatcaacacgtgtcagactgtgattgcttaattttcttgtctctcgcgaattctttcttagcagttagcatattaatacatttgattgaagtttaaagaaaacttaatatttgtgtaatgtgtatagatgttcgggaaaaatgttatttaatacctgaactttcaaaaaatggtcaaattaaccgtgaatttttgaaatgaccgttttatacttcaataaatagttgatttctaatttaacctataaattatcgttgattcggccaaatcgactcaccgttaacacttcttaacagctctcctaacagcgtaactaacaattgttttcgtccttaaaccaacgacaacggctgttaggccatgttttgtaatggctgttaggagcgctattaagaaatgttaacggtgagttgatttggtcgggtcgacgataaattataggttaaattagaagtcaacgataaattataggttaaattaaaagtcaattttttgttgaggtataaaacgaccatttcaagagttcacggttaatttggccattttttgaaaattcaggtattaaataacatttttcgatgttctatacttcttctatatttgattccatgatttctgtatgcattatggtccaaaatgtcctaacagatttcttgtaattatgtattttgaattggtaagaagataaacgtgtaagtcctttaacgaatcaaatttatatgatgatgccgattcatgatgcaaaaaaaaagatgaatggattgacctatatagccatggttcatcatttcctttaaataaaagaaacctagagcaaattattccttcacatgctcgatcgtgcttatctagggtttactcatataaatatctccaatgcataattagaaacatacattctcttcaagcatataaattttgaacatataatatatatattccatttcatatcatgaggaatgataatcactctttccaaataatatattttagtccctaataatttaatttaattcactattatgaataactcatcatatgaacatatgaacggaagtgatcataattagtatttcaatatcatgaatattacctcactggattttttgtttataaaaaaaaacttagtggcaattgattaaacaaataaattttcaaacgactagcgtgagcgtatgaacaatatgtatttggtagttacaaattcaccgcaacatttgtaaaagcaagaacaaagacgcacataaatttccaccaaactaaacaattttaatcacaatagcatatttaactgctatgaataagtgacaaatacaagattgtacaattcatgttttttttgtgaattgtaatgatgaataagcaatccaatgaatgtggaaaccaataagcatacctaccatatcttattttcggattcgattcagtagtaaagtttcatttgacctcagctataccaaattttcattatttaaatgacataaaagctataagtgtgtaacataaatgactagattgacctagccagtggatttttcaactcatgaaactcaggagtttccggtcttttacttcctcggtctagtgagtaattaagaactaattaactaacacagttgagttaattaattttcagagccctaatgagtaatgacagccactcgtaaagtcgtatgtctagcactgcacagaatcattgtcttatatacctgaatttttatttatttagctttatagggagacaaaagctgatatctaattgaattaattataagattatacttgtatttgtttgacttgttcgtatatgttctttctcatctaccatgacagaaccaactaatggttctgttagtatgtcctaaaccagccattaatttaacttcaaaatcgtaatatggagaatgataacaacgatatagtaccaaaaatgaaacctttgccagtttactttacaatttaattttctttaaatacgtattcatttttcaaactatcacaaatgaaaaaagataacaacgatattacatgaaaatggaaattttttggtaggttatttggtgctcaataaaaattaacatgttggttaactctacggaataatccaagtttacttaacaatttcattttggttaaatacgtattcatttttcaaaatatcacataaaataggataacaacgatattacatgaaaatggaaaatttggtaggtaatttggtgctcaatacaaaattaacatgttggttaaaactctacggaataatccaactatataggtatgtcattctttgaacattattaacaaacaaggtcgaacactattagtattctttaatttctatagttttttttttaatattcgtattagtggttaaagacaattagttctcaaaaaccaatttaaaattaatcacgagatagttgcgctaagattatttatttcaatatgtgtagacaaaatacttatgtttcctaaagatggcttgctttaataattacaaatcaaaatgatgtttttagtgtcagcaatgtggttgttatcattcgttatgtcgtctggccaaagcttagtcttaattccaaacaataaaccaaaagtgattttcattttgattttataaaaatttctttaagagaagttaaatcatcctaatatgttataaacaataatagatgacgtcacttgtggggaactattgcatcataaactacgtagatctaccatcggttaaatacaagacggtttccccgcacgtgccagcagacacgaggaaatattcagaaatttgccattgccaaacgacgcagtttcatcgcaagttttttctttacccaggggagttatttatctgctgctcctccgacggcgtgtactctcgttgacagtttcacgtgtcactaatagactggagcgtatcagtagtagtaatgtggattactgaaatcaagtgtccaccgcacacgaatgtaatgatctctgagccactgatcttgccacgtggtaaattcatcagtagcgcaatcaactgccctaaatcatttttgtttcttgctttatactataccttattttacattttagtttttgtgtcgatgcatattttaagtttttaaccatcaaactagagagtctcttggggataaatgtacttaacaagttaacatacataactccatatgcttgtatataaatccattccaaatatttattaacgaaaaatgtaaatcattgcattttagttgtgaattaggtttctacgcaaattaaacatacatatacatacgttaaaattaaaaaaataatacctaatgccatatgctaagaagaatatgcactatagtatttgtttcttgaaaattactatatatctgtcaaagctgaaaaaaatatgtatgtataacaaatatcgtactgtcgagatttttttttttttggttaaaaggagagaaacataaactttagttttcttgaaacaacattaaagtttgtttactgactattgtgtagtagaaaaaaaaatatgttgttatctttcaaatcatttagattattcttcattttcttttctccttttagcttttttaaaccttttaacgcaaaaagaaaatcaaatacacattcatataattcgagagagatttggtgagaagtcagcattgccgacaggaaattctgcctcaccaccaaaatggtgaaaataccaaaccaataattacaacaactttatttaggttgtaattatatgagtacataattacactaccctcttatttccacgaaatatgaactcatattatttaatatattgacaaaaaaaaacttgtgtttctgtgtcttttaattttcattgaaatgatgatgtacatgcagtagtaataaaagtgaaagccgatgtattctaagattttcttataactattacctaatttaagttttgattttttaaagatcaactattcgaggaggtgggcgaagtgaatataatgcatgctagaaagttcaaagttttacaatgagaaaaaaaaaagtgtatataaaagaaaaaagtagtatactttgctatttgtggggtataaaatttaattattgatttctacttttagggttcccctcttgttcagcatagttacaaattaccactccaatgaaaatgattccttcttaaataatttaagtgaaaacctatatttccttcaatcagtaacctatatatagattcgactttattatttaacaatacataagtatgaaacttacttattaaatataacagtgttttagaatgtcgtacatatttgtttgtgtgtatgtgtgtgtatgagcatgtgtgtaaaaaagaagaagaggtacttgacttatctatttgtctgtaacttaaatggaaaaatagcatctaaataattgtatttctctttactatttcgaaataattgtttgttttctctttgctttcactgttcttacttaatttgtgtaatttcactttagctgtccggtcagtccatttatgaaatcttgccactagatttcaaaatttgtggtactattgataaagttatgatttacaagaatataaatcatgggttacagttttttaaataccccacaaagtacaataccatgggctcataaataaagaagaaatcttttaacctttccaactattcatagccgtaaaaaaatcatgggtaaatcacacatcttgctacaaaaagattaacaaggtttcatttataaacatcaaaaagggttcttcacatttacaatctcacaatttcaccttttacagctttaaaatgaacttgtatacaatagccaagaaaaacttgctttcatggtggggatccacatttttgttcttctaaaagacttaatagattgatatagatagataatctcataatcataatcatggttaaaattaaattgaaacccgttaatcaggttttgctcttcaataactcaagatatcaaaagtatatgcatctttagtctgtcattgccaacaacaaacgttatcatgaagaaagaacattaaactttcaaaagttaagtcattttctctcgaaaagtaaagatatgttttcaagtcatgattaagaatatgaatttccgatgaaaaaagcgagtgggatcattacactattgtaccaagagacgaagaagcaaaagctgtcattaattagagtttctaacttctaaccgatacatcgatgataaggacaagaaactgaaatagacacatatgttatatcgaaaaattatgatggtatattatatagactaaagaaatacaaatactctcaatcaccttctaaagaaaccaagtacaaattgaatattaatgatagtatgaatgagatactagtaaatcaaagaaatgaatttaaacaatcctaaagaaatgccaaattctaatgaaaaactaaggtgaaatcaaattgatcaaaaaagagattcaaatgtcacactgaggacgtatcgacaagaacatcgtttagcatatggtcgtcaccattagccatagcgagaagctctgcatccctatcctcctcgtttgagaaatctctcctttcgaatttcgagttagcggatatgaagatcagcttttgagctcgatcaacggctgcatgtgaccgcccgttcgagtttacccatttcaaaagagaggagttgcatttgaaccctccagtcgtagcgtggaggaaaatgagccttactgcaacttttcctagtgacctgaactcgctaagatacgtctcccaaacaagtctactgctttgaggattcgctatcctcatctttccggaaaccggatcacgctctttcatttggaccgcccttgcatacataggatcaagcccttcggttctccatttcattagttccatcaacgcaatgtgtgcctcatctctagacacaagccttgttatcaacttatctacatctttctcttgctctggcgacaaacatttgaacggaggaagatactttccgctactatctcttatcaagtaaagagggtcaagtataaaagccgcagcccaagccggatgataactcttcttgaatcttctctcaacgactttctccacatgtccttcccctacattaaacttagaatcccaatctttaaccttagctcttagctcatcccatagaggtaagcattgccctacaagcagcttctcttcctctattctccgagccatctctttaacaagcttgatcaaagcatgaaccgcttctacctcgttccaaaacccttcgtcaccaaccatctctctaacctccctagccatatgatcctccattaaaacaaccttgcaagcatcatcatgtactaccaactgaattgctctagcggaactcaacacatcttcaagaagattaaacaacggctcgtagaaacaaaccttgttactaccactactactactactacaacttctacgttcatcgtcgtaatagcaatgtaaaggcaacctaagcattatcgattcgccatgttcctgcaactgatacttacagtgagcgttacgtatctgcgcggtgttattgatgaacttagctagtctcacacagttttgtgaaacggatttgaataaaggaagctcttttacgaaatctttgatcaaactgttgagtccctgaaactgacaagaaagattcaccatccattgatgttgactctccagattcctcagtgctttggtcttaaacttatcagagactatcccaacacatctctgaggtgaatttccacaaatacccttcaccgtctccaacaagacctcctctgcgtagttagacggcacagctccgttcacaagtaccgctcttctgtacaaactcgtcccgtttggtaaattcacaatcaaattcacaagactctcgccggactctcctggtttccaaccgtccgatgagatttggaagaacattgcgtctctgattctcgattcagcctctgctctggcttcctcgtgcttcaagtccaatctcgtggtggcgaaatctctcttggagatgattggtaaaccaacttgtgttaaaaaagctcgaaactttggatgctcaagacccgagagagaaacagagccgcaggactcgaagacccaatcagagagagaatctaaagctgactctatctgcgatctggtaagagactgagtctgcgacggtttaggactcttaagcttcttcacactgtcttcaagcatagctaaaggacccaagtcatcttttccaccggagagcatcaaatgctgcggcggcggaggagttgaataatgcaactctccgccgcagaatctagaaggatcaacaacggttatcggcgtgacgtgataagagcctccgatgggaggagggttaagccgagaaggaatcgcggtggtgacagcgccggaggagttacgtttccggtgatgagtttgaggagaggaagaggaagaggtaggagaaggagtgatggtggaaatgggagtaacagagttgaaattaggacacgtgccgcgtttgagatgctcagaggcagtgcgtgaaggattagaggcggagaaaacggcgtcgcataaagaacaacgaagcttcacggctttagggagaccagtgtcggtgttgcgtacgaggattggttcaagatgagtccaataccacgcgcctttacctttcactgcttttgttctcaccgtcattaaaccttcgtatctcttgtttaatgcttttgctgttagctcgtctgttgttaacccatccatcgccggaggagcaggagctggaggaggaggaggtggtggtggtggtgtctgttgagtcgccgtgtgagcgttagtcgtcgccatcaagaaagaaaaaaagtttctaaatcggaaatttcgaggctcttgctaaaagggttttaagcgagagttggattttacgtgtgacattcttcagcagtaggatttcgccggaagacgacgatctttaacgtcgctgccattttccggcgatcagaagaaatgaaatttttactcacttctttagttttttttctttctagtgagctcttgttcttgactgtgaatggttttttcgaagaaagagacagagcggagaagaagaggagagaaatatggaagaaagagagagagttacagaggaggttgaagcacacgcgcatggaggtgaaagaagagagtcccacgtcgtacgagaacacaaacgttacattggctcgtagtctatctcgctttctcatcattggagcgttttagtcacgcgctttaagttggttttgggggattgtttttgttatgtgtgttttttttctttcaacttttgtttctttttttctttcgaaaatctcttttcttgtctcctactttaatatttaaaagaaaaaaaaattggaactatttgggaccttaatttaatgcattttatttagattttttctcttcttaatctttataaatgtttttcttgtgctatacagtttcaaccaccaatggtaatgtactttcgtaacttcagttgaacggataaaaaaacaaaattgggatcttgagaattttgaaggctctaagttttggtaaaaaaagaattattaacataggctgagtttttaaaaaaatctaaatgattaattcggtttatagaatccttattgtgaatttagttagagattatgtgaacgttgaagacactttttgaacattttttttggatttgattacaaaaatgaaaaaaatgggtgagtgggatttccatttgtgtcctattgtctacgtgggatgagttcagaatttgggcataaaagggtagagtgagaatttaatttttgtttctagatagacaatgaaagacattaacgcagagactgtgttgtgttgaccattttctgttgactcataaagtacatttctttgtaaatatttttttttggtttgtgttgaaagttgtttatttttgactgcaaccttttacaacttccatttttttaccgacacttttggttcctactaattccaaccatttttttactttttgttaatctcaatagcaattttgctttcatttgctttgtatgaatgttcatgaatcatgtgtgtcttggccgtcgttagaagtttgaagtcatgattcatgaataacaacatcctttgtactcttcacaacttctacctctttttagttaaaagtaaaaacccaaaaaaacatgaacacacactaaataaaattatgactgaggaccaatatttacctaaataaaattactggccaatggacacatttagctaaataccaaccaatctgtagcagtccaacaaagtacacatgcttttcactcatagccaaaaacttagaattttactttagtatgtcgttgatctatgaataatttaatacaacctataaaaccatatcaatgcgaacaaactcatactaatgaatattaaaaacacattttcttgatcaactattccagctaattaaccacaacaaagactatttcttatgtgtcacacacacacatacacacacacacacataagtctttctatattttacccttgattttctactcttattccaatgcaaaaagtgtcttgaacttgaacttgtaaatctctcttagtaaaacgtataattaaagttataagtggaggttagtaggagtcaagttttaattggtcaatatctaatgtcataaaatccatgtcacaactgtctcccaccttctaatgtagaagtatcatgtatgcatgcttatatgtatgaatgatcaatgaattctaaagtctaatatacaaaatccacccataactgtatctatataataaaaaggcagaaaattaatttcttaccacataatttagagcagtcctatcttaaaaagatggatagtactatctataagaatgatcttgtctgttacataccaaccacccaaaaaccatggattatgccctctaattttattttttgataaacgacgtttgcaatatagtgatgagaactattaataacatcactttgtcatacgttttattaacttaaggtgtctacaatgtaaacaatgtaacaatatatcaaagtaacttcttacgttaatctccacttaaataaaataatgctgattttgtgaatgaaatttgaaaataaaatgtttagaattgatatatacttttttgcatgatacttttcatacgtggaatgagatttcaagattggtccctaaatgcatatattaactaaaaataagtaactgttgacagaaaataggtatgttataaatttgaatcttcattttccagttagtgaaaacgaagagccaatcctttcagttaaaaaaatactgatattgattattactgtatcaaacgtaaattgcttgatttacaatcttgtacgagaacttcttttcccaaccactccactatatcgtgttatacccgaaataaatatatatataccatgtaagaaataataatagttgaaataaaaataatgccaccttttacattgatagcgatagtaattatttgattattgaacttggatggatttagttactaacatagcttctttattttacaacttaattgaaccacactagagaggccagaatctataattagtgaggaaaatccgactaagctaaaccatattacaattccaaaatgctatccttcataatctcaatctcttaatccttgcaattataagttatggattcaccgttcttgagaaaagaaagaaagaaaaatacatggaaaagatgaagcttgtttttcttcgtactagaaaacagctggcttttctcaatcacatgattgaatggtttctggtaccatttttgtttttaatttttcatttttgatttccttaaaactatacaataagacaatgacctaaaaaaaattatacacgactcaacaaaaattacacggctctcgtgcccaaacccaaactgtttactatttaattgggctaaatctatagaggcccaatggcttataaatcatagattcataatactgaaatattaaaccggcgtaaatggtacgtacttcgggaaataacgaattcgattttaaccggaaactgaaccggaagctgagtctcgtgcctgccttctctaggcttctttgtttccgatcagaatctcgagctcaactgtcaaaactagccgaccactaagtcgttgtcctaactttctctctgttcctcatcgaacattattgggaggagagagagagagagagaagaccaagaaacaacgaggatagatccgaggaaattgtcggaaccaaaaggaggaagatgggagatatctggacatggcttatttccttcttcttcctcatcgctcttgtcggaatcatcgtctatcaggtgcgattcccaatttctaggataaataaacccaaagttcttaacttttctatcggaatttgccaattttttcgcttacggttataatgataccatatttgtccattttgattcatttggagccttttttttgtttctgggtagtctgtgatttagctagaattagggttttatgttcttgtcacatgtttggaagaagtaaaggtgtaatttttgggaatgttatcatcaaaggagtaaattcaggaacatatatagtgcgtattggcttctcaaaacacttttataggttcatagttagttcttatgttggatgttcatgtcaggtctgaggatttacctccttaagcacaggttgttcttttataaatgagctccatttcggcataatgaagtgaaccctttagttttgtttgtgtagactctaatgagaggagtcactgagactgataagctagcaaacggaatcttccatgtataaacagcttgggaagacattttctaggaagctaacttctcttttctgaatttgaattctttcatttgcagcttgtttgcttagcggatctcgagtttgattacatcaacccttacgactctgcgtcgagaataaactcagtggttttaccggagttcattgttcaaggagttctatgcgtattctacctcctaacaggacactggttcatgacactcttatgtctcccctatctatactacaacttccatctgtaagtccaactaatctcaatcttttgctccaatcaaatgttgtggtattgatatcctttcggtttctccgttgttcagttactcgaagcgacaacacttagtagatgtcaccgagatcttcaatttgcttaactgggaaaagaagaaacggctgttcaagcttgcttacattgtccttaacctctttctcactatcttctggtaacgagaaagatatttcgaatcccattattgcttaaccataagtagatcaagagagctaaaacactttctgtttgcaactttttttcgtaggatgatttattcggcgctggatgattacgaggactgactaatgaagaagacatggtccatcttcttcggtttattgacactacgcttaaagatacagcgacatgcttgtggacatgaaaaaaagcaaggaaaagtgtttgctttgtgatgtttgtaagattagtggcaggaagatttgtgtatttatttctttcttagaaacatgttcagattaactgttttttttatgtcttgatcattatttgtacaagcaatcaagctcgtaaactactggttacagtaacaatgaaactgaataatttcaaatataagaagaaaaaaagttaattcatgtgaactttgacttttaaaagtgagaaacccttttgagtgatgtaataaacgataacttaaaagatgatccgaaccttctgtttcagttttgtaattaggttatcttataaagctaatccttctctcctttactgtgacaataatcgtcgttatcaaggtgatttctttctctgcctcaaacatcgcttaccctcttgattgattcctccaatcttcttcgtgtggtttcacaggtgtgtggttgatctctagaccaaattgatctggtttcatcctatttctatttggtctgtaatcgttaaagtcttaagatttgggaatcgagtttatgttgtggtgtttaggtagcgaaaccccagttatgtaatcgttgcatctagtaatttggggtccttgaattgaaacaaaggattaatctttcattcatctatgttctgagttatcgaggatgttcttgggtcatcttttgatgaaaattgagctcagattattcgtgttttgtattacaggttttacttatggttaatgcaatcaaaggagtgttcgtctcttggtacttcttaccgttgttacgattcctaagcaaatcttgatgaacacaattgaatcattcattgtttctttgtatcttttgtttgtttgcagcgatattccgatgacacaattcatagtgaacatgaacaattcgatgcctccgtctcagaaattcataattcatgtacttgatagtactcacttgttcgtgcaaccacatgtagagcagatgatccgcagcgccatttctgattttagagatcaaaactcttacgagaagcccacttcttagatcacatcacatcacacttgcttcttgtttttctttcatttgattcaaatgaataaaaacttcattgagatcgtgagattggttgatatggctcatgctttaatagagttaaagtgaactttgttgacaaataatctctctgtaccggtttagtatcagtcggttttctctggttgtgttgattactttgtcactcttttgttgaataaacacgtttgtttggttattgttcaattacttgtagtagataataaacagattaaagaattcggaagttccaaatttcattttactcatgaaggatgaaccaagtaaaatcagaaactaagttaaccacatacaatttgcacatgtgaaccaattcggttaagcaaaccaataaaccaatcttcttcaacaaattacccaatctgtatgtaagcttttccacttcttctagtcttaaaataaaacaaacaaaaaatctagtgttcggctctaacacgctcgacgaccatggcggtctcgtttaatacaacgcttcaccagccttctctgagtccgaggtaatcttcaatttatctaaatttacatacttttgtctctgttcacacatattcacttgcatctgattgctttgttatgtcctttttgcagctgtagcatcaagctttattctgggttaaagcctcaatctgcaagtttgttccttttcctcttaatatgtccgaaagttcatgtttttaatcgaattggtctgcgagatgtgagggaactgatttagttggtgttattgttgtcggaatttgttcaggctttttggcaagtgggtatcagaatttgaacaaggagttctatggaagagtttataagagtctgcaatctgggtaatgtgaattcttcttttgctgaaatgattcgagactttggtgtttttgcttggaggctcctcctcttgttcaattttgcttaaaatttagggcttttgctgctccaatctgagaatttacataacttatacttgatttgtaattgaaattcctgaaatgattgatgagatgtgaaaatcgagctaaagacttatagtgcataacaagtgaattacaattaggttggtttgctgatattagaacccgttagaacggtcatttgccgttaaatgtgatgcttcattagctttgtctttcacaactcagtgtggtttctgtgtgtttgcaggactgggaaagcgagcaggtcacgggtaaagatgatgccaataggaacaccgagagtaccctacagaaaccgagaagaagggacttggcaatgggttgatatatggaatgcccttgtacgtatattcgacttgtaaataatcttgtgtatacattttacatggtcactggaaagtttgtaacttcaatttttgttgcagtatcgagagcgtgtaatcttcattggacaaaacattgatgaagagtttagcaaccagatattagcaaccatgttgtaccttgatactcttgatgactcgaggaggatttatatgtacctaaatggtccgggtggtgatgtaagtttctctttcattctttattctttacatatttggttacatttcttcaaattttgaagctaaagatataaaggtttattctttttgtagcttactccaagtctagccatctatgatacaatgaagagcttgaaaagtccggttgggacacattgcgttgggcttgcttacaaccttgcaggttttcttcttgcggctggagaaaaggtgatttcttttcacatttgttgaatcatatatgtatcattctctatagttaaaatgactgtgtatacttggaaattgaactatgatgtttactttgctgtgtaaagggtcaccgatttgcgatgccattatcaagaatcgccctccagtcaccagctggtgcagcccgtggtcaggtaaataacctgcctttcgagtttgttctactaaaagctttcaaaattatgcaaattcattatttcaatggtcaaaattgtgtcaggctgatgatatccaaaatgaagcaaaagagctttcaaggataagagactacctcttcaatgaactagccaagaatacaggccagcctgcggaaagggttagttttgttttcacaattaccaaatccaatagtttttatttactgtttttgatcaaagttatagattctgagtgcatataatgatggtgattgatgacgatgatacaggtcttcaaagacttgagccgggtgaaaaggttcaatgcagaggaagcaatcgagtatggacttattgataagattgttagaccaccgcgcatcaaagaagacgctcctcgccaagacgaaagcgcagggctaggctagtctttttgtttgtttgttatgtcaaaagttttaatctttatgttattgtgattgttacctaataaaatcactgattattgtttttttattccaccgattatctgatttctacaaacattttaaactgctgtgtaagatgtaaaggaagtgacttccctggaaaattcaacatatagtcgccattacagaagctgaagcagaacaagacatgaactctttgcttatttttctgtctagtgggggaagtaacgcgtatgttgacttgggagtaatggtagtacaacgtaaaatggctcaatagtcaaattttatagcttataggcctttgtgccgatgttaataatgggcctctatagaaacataatgctatgtatagcctaaaaaagaggtcctaagaatcagaggcgttagttggtgctggactgggcttatacctgctactgcttgaatctgtaagaacgaaaacgaatttactgcaagattgtactgctttccacttccttcctggatgatgtttctctttctcatgcctcagtgatttaaatcttagtctcaaaaatttataagtagttgacgtgatagcataaaagctgtcggtaaaattgatgcataaaactaattaacaacttagacctaatacatgagaacgacaccaactatattattattgtagatagatggatcattggattaaacatttccaaaaaatattacttaaaaaatattcttgtagacttttacaggattggagatggacattgtatgattttttcaagattttgattttgaaaaatgacattaataatctatatttacactttctaccaccaactattgtgaatttaaaattttaacaaaattatataaaaaattgagcaacgtgggaaaaaagacaagagaccccaattactccatgaatgaatcaccccaccaaaagctttattggctacctacctatattgctttttcttgttggaaaattatgatggaaagttccaatattcaaagtctagaacatacgactatattttcttagtttccaacaaacgcattttcattaagatatagatcaaaaaggtcattatatgacaaacattcaacaacgagaagcaacaccgtctcataagtcataataagagatcatttgaaataatttcactcaattttctagtaaggtattggacatttggacttgcttaataacattcattgtcatacgaaatatggcgttggtccgttggtaagaatttatgaacatgtttcgcctcaaagtcatgggacatgtgttgaaaaatcattaccacatctttgttatttccataattggaatccaacctgtaaacaatataatattccactaagacaatacaagtcaaccactaagaatctaacaacacacaaaaacttaacaaaacaaatgtaataaaataattaatcttagaaacttttgtacaacctcttctttcatctaaaaccccacaataaaaaaaaagtaagcaatttctgaatttctaatcatccctctcctctttttctatatttacaataacatgacatgaccaaaccatcacctaacttaaaatttaacctatcaaaccacacgaatcaaaaggtttatcctttccaaggcaagcagacttcttaaacaaaatccgcgtgcctctcaaaggatgaatttcatcgaaccggtggttcggtcaacccaagatttgaaagatttaagaacatgatttgataagaccaaagttgaatagatttctccaaaccaaacttccaagtgaaaccaacactgctttggtttgttgttgttcttctccatctcccttcttatgatacattgttggcatctccttcactctcaaacactccaaaccgattttctccctaaccgattcaatcaatttgaagtccggttcgtctccatttgcatcagttacatagaatatgtttgtagccatgtcgctactcgttgatatctctgttcttgtaacattcagaccgttttctctgaatgtccgcgttacttccgctagtaaaccttgtttgtccggatgcctcagctctaatctcactccctgaagacaaaccaaaccaaaaaaatgtttagatttccgattaaacaacagaaaaatcaatcaatctcagtatagtgttattatacctctagtgctcttctttcaactgcagcctctaagcattgaatcactcgttgcctctctgcttccgaacttatcggtgatccatccttatgccggatatagaattcctgaacagtttaaccaaacaaaggaaagattctattagctcaaaatcacaaaaaaacatcaattcatcaaacgaatttacaagatcatttcaagaaacataccaagtgagcttggtcttcagctgtgttgatagtagcatgaaacacagcatattccatatcggttaacgtacaaaccacatcgaatagaagcttggtccggtcccgacaatgaacattaacgacagagtaacccctctcagcccaattctgaaccgtcacaaccaccattggagatctctcatgtttcttagatctcctctcgtagtctctatcttcaaacataagctgatgaagtctacgttcgatatgcatcatcgaatccacagtaacacaagtctttgcagcagagttaacatcgttatcgccattcaaaacgttctttaaccgtccttcgatctttgatatccggtgagaatcgagaatcggagctcctgagatacaatctttgagatagatcacagaagcaactctaccgttatgtgtccatagcttagcgtcaaccacatcacagttgagatcagagagaaccgcaaacatctcagatagtaaaccgattcggtctgttccggttaactccaaagctgttaaaccgtttacttcaatgttttctccatagtaaaccgtctcgatcgactgtgaaaatcagaaaagaaaaagattctatatttagaaactatgttcttgaattgaaacaaattcatgaatcttaaaattacctgttcaatgtatctcaagacgctctggtcattcaatttgtttccgtttaagtcagtgacatgaaaaactgcagtaattaagaaaacgaattaggaaacaaagttatataaatgtaattagaaagataattgaatttaaatatattattaccatccatgttccatgttccatcagaagaaatgtaagcttttttaatggagagattcaaatctgtgagaatttgtacagcttctaacaatatcccatttcttcttgaactatcaacctgtgaaagatcccaggaaaaatattaaatttttaaatcttttggctgaagctaattaaaattgaatatattaaaaactaaccttgacgattgtcgctgaagaacaaacaccattgtcgataacgaccctgtaataataatgtaggaaaatttgctttagatttttctcttttccgacaaaataaaattaaatatctacaataatgggatttatttatcaattaaatgttagagaagataagtcataataagaaaaattcaagttgatgaaaaataaggccaagcaaagaaatttggaaaaatcttctttgaggaagacagaaagtacaaacttttaaatattttatatatatattttggaaaaacaaaaagtaaatcaaacgatgaccaaaaaagaaaagaaaaaaatttcaaatttcaaaactcaattgtgaacatttgaaaatgattttttcccggactgataaaaatatattttccgggagaattttcccaccagaaaaaaaaacgagacaaaaagaaacctaaaatataagtttttcaattttaaagctctgttcttaaagaaaaattttgtaaaaaaaaaaacagagaagaagaagaaaacaaaccttggagtgttcatcctaataacaagcttttcatactcatccaaataacccttcatcgccatctctgatacaaactaatacgccgtcgttttcaacctctgtttcttcttcttcttcttctaaagaattccagcaaaattaacacatctaaaatctctcttcaccagcgtttctgtctaaatgaacggtgccgtttttattggtctgagaaactgttactttttttctctctctctctctctctagaatgatagacaaagcacgctttcacataatccttccatacactgagactccttatatttatatatataatggataaaaataaaatatttaaattaagttggtaatatatctctccaaattatatagaaaagaaaagtcacatggatcaccacgtctcacgcatgttactaattgctaaaagtctcctttagttggacttataatgtttcatcctcttttttttttttttttatctttaaaccttaaaaatgcttctataaccatcattcattccctctaaagttttaaacccaacaaaacactaatccatttatcttactactattaattcttaccaaatgaggatttttagtttttagtcagtcaatccaaatctttttatttatggtacttttatatattccattcatatacatatatacttctactttaacttatttggttccaaaacacagaataatcgaaatcgaaaccaaatcccaaaaaaaaaaggttaaattagctattaaatattcccggaattagttagaaatcccatcataagggaaaccaataaaaaaccaaccatccctccacgtgtcaatggatccctaactctggttgttcaactgtccagctaggacgccacctgttctagttcttcctttactttgcgtgcattccactctaccatgatcctctcccgacaataatcgatctaacggccagggtaggccacgtgtcataatcttaaaggtcccacgtcaaatgatactcgcttcatagctaagatgagaaatttcttttctagttcatcgattcacacacctcattacattggcgcgtgatctatacgcgcttcttcaaagtccgtacttgtctcgaaacaaagttccggtaataacctcgtatttggttcggtttctttgctttataagggtatttaagtcttcttagcattgagaatctcggaatcgagaggcgtactttatagtagaagagaaagatctttatgggacctacttaaaagctggcatgagagagtgtcactttaagcgtgtcgtgagtggcaaacttgtcttttcgtcgagagaatttaggggttaatcacgtggagacatttaattggtgccgcaagaaaaaagtaaattcgcgcgtgatactcacgttgatgagatgatttttctcgacctacccattactctcaatttaccgaacctagcctatataccaattttaaaattggttatgaatcttatgataataaaaactcctaaaaatggaatatcatatatcaactttattggaattttttgatcgtccataagcgtgattttgttttaactttcctgtaaaacagatatataagaatccaaatatcataagattcttatcttattatgtggattagatgctactactagaagaatttttgagaagaaacaagtgtattacataaggatctaatgagatcattcgtattaaatacgaatatgccccacgtatgggccactttcttcctgaaccatgtcacgtgcagtttacatgtcttaacgatcttgaatcatgctcggtcttagatcttgccacgtcgacgacacacttctctctgactctgtgagttttttagtttcatacatccttggacgtgcgttgcagtaaccaaaagctgcagaagcatttaactattcgtcaagcttaacggacaaagacgattcttctcccctatttattagctattaatgcgtagtttttcattaatgacaatttggtgagtattaaaatctgatttaagttttataactcgacagccaatagtagtactgttgcaaattaaaaatgtgacaaaaatcgaaatatgtaggcggagaatcttagaacaactacaaagagttatgatcttttccgtgcatccaaaataaaacatcgaaaatattttggctcttttaaaaattattttgtctcttgttctgtctttccacgtcggatttagcgggaaaatgtgaacgattctccgccggaaacgggaacggacggtaataggtaaccggtgggagccacgtcatattaagatcatgacgatggattaaggcaacagaatcaaccaaaagaaaacgggtccacgaggatttggttgggtcggtcggtgtcgttaattctccgataaattcttatttttatgataatcttttttacgtgactttctttaagaataattcgatttgttttaaagaaaatatgtggagcttaaagggaaaaaaacacagcccacaagaaaaaaaacagcctttgtgtaactcgtaggaacaagacgttgaatggacagaaaaatcccgaggagaattagctgacgtagctaagacagctcatacattctcgtttcaaaagcattgaaaattcctttttatagcaaggatgttaactttgattctaaatacagtgcaacctaccctaacctaatatccattgggcaatttcgtaattgacaatgtaaaccagaaaaagaagtgcttttggctgagacaaaagttcggttgttgcttttttgactgattagtgttttagcgccaaatttgaatatgttttccctctctttgatcaaagaagtctaaaatgttgcgtttggatgatacttagggttaagtgcatgcgacatcagtatatagatatagacatatagttgtgttagctacatctcatgtattggcaaatatcatatcaagattatgcgcatcaaattgtaatatacttgcatgatctattagactattaggatatctctgttcgaggagagtttgtttgtcaacttgtagctccaataatattgttaactaccaagacagctttttcatgtccataagctattcatattgtattgttcaatctcatcaatcagcaattgtttttttttgtttgtagatcataaatgagctcaaattccaatttcgggaagatattcgcacgacctcagtataaattagtatatgtattatacatattctaagatgttattaaatcattgttagagatagtcgggaagatcaaattatattaaacttctacaaagatcacaccattactctcaaggggcatgttgttcctcggacgtgacaaaaacttgaaatatttcgtattattttagtgagagatattttatatgctgaatagtttattcatttcgatagaatgatagttgtaaatggagattgattaggcatatagccgatttatattttataactgagatacgaataaggcaatgtcgactcttccgtattacaactgtcgacaaatttccatagttttaggagaacttcgcggatctaaggatcttcccttaatttatactaagatcttagccgtccaaaagaatattgaaactaccacactctcaaagtttgactattattggattttgtccgttgatgaccatgtaaatgtgtctctaacatattcaaacgcttttagactaatccaagtgagtatttgtttaagactcaattcgaaaagatcaacaaagcaaacaatgaaagaaaagttgagtagttcttcttgtagttgttaatcgtagcagtccaaaatgttgaggattccatgatttcacctacatatagattttaattatttcatcaaaaataaaaataaaatgaaatgatcctttgtaatatttttagtgatgggtaaattaatcatttgtatctttaatttatctcataaaaattatgacatatagttaaattgttggatttatcattcctcaatattataagtgaattgttaggccgaatattataatgagtttatttattcatattgcattacattttgtgtttggtgatcccagtgagatgtttgaggagtaatgaagaggccatatttattattattttatttttttccatatttttttgttcaataagaatagtttgacttttgtttcataaaatatggtgtaggttttgacttttgctaagaaaaaatatatttgactttttgcatatacaatataaagaagcaaactttttttttttttatcacaagtacagcatgatctatgttatgagttagctgttgagtagtgacgaagcagaaggctaaaagcacacacaagtaattaggagtggtacacaccgctagtactctatcacgccgcttcagagctcatgttttttgtatttttaaaccatttatttttctctattgctatttttaactacaaagatcgaaaactacaaattcgtactaaccagtctataacaaaaaattgaattgaaaatatgtgtacgattcaatggatgatcttttgcaattgcacgactcttttagttgccgcttcataagtaaaattagtttcaggttaataatcccacgactttctagttaatacttcaaaatttttaccaagtcctgattttttttttttttataaatattattgaagagtgttaatctgttcaagaaatgccgacattttttagattgtgtgtttagacttgtcaaaaccagctgcgagataaaataaaataaaattgagagataatagaaaatatgaaaattctaaataaatagaaataattcattaattttgattactttaggagttgacaatacacttttttgtgcaggccgatagtttctgttagtttttgtatacatgcttggacttagtgtggattgaaagtcaatctactttgttttctcaagaaacagagttactctgctttacgcaaattaatctcccaaaataaaataacaaactatcgaaaaatcacattccaacagtatagataataaaacccaacatagaaaataattttattttaattcaatactacgtcctatatacacaaacaaaacccaccaaaataatatacacatccaaccccaaaaaaaaaaagaaatgccaaagccacgaaaaaccccacaaacaaccctaaacataagtaaaaacaaaatcatacatatcttcgtctctctgaattttgaattaacccttctttattccgcaattcggttcggttaagttaggcattaaaccggtttaccggatatcaacacggagacgtctaagttcagtgaggaaagtaggacttgaagtgagagttctatgagcaagacttcttatgtcttctctcgaacaatctcttgagatcctcaccagctcccacattgctccttccttcaccatctctttcgcattcccttctgcaatactcaaaattgtgtgttagtagtgtcaatcagtttgtacatatgtttgtacatataaacacatgcacttaccatgttgtgctaagtgacaaagagctaattcaatgtgtctccttatggctgcagtttcggttttggcgttttgtacaatccaggagagtgcaccgtcttctattaatagtgatttccctcttttagttcctgctaagtgatgcatttagtcaatcattcttagataacgatatgttaaataagtttttttttataccttgtgttgatgctcttgactcgcatttcgcaaagtttgcgatcccgcgagcaacttgtgcaagaacatcaggatgtccacatctgaccattcccaacaaagctgcaatacctccttctgatcttagttttgtctgcaatttatctgagtgacgcagaaagtccaatgtatttcaagatttaaccaatatatagtctatgagttctttttcattataaagtgaaaaaacgaaaaataccgtttccacatagatttgcaatggctccggcaaccatcctaagggtctgaggatcttcagcattggctgctgttgatgacaataaaccaatgcctccttgatccatgatcagctcctggttggtttctgagaaacaaaagtaaatatgacttggtttcgtgaccaaaaaataaatgatcaactaaagaatttagcccatgagaaccacaattatgtaccattcattgcaagatttgcgattgcaccagcagcaactctgtgaatagtctcatcttctgtatttttcagaagcatcaacaaggaagtaagaccaccagcttccacaatttgctgctgatttgcctctggtattacattacaataaacattcatagaaataatgaggccacgaaatggttaatggtaaggcaataaaaaaaaagtcacaagaatgaagattgcagaaagaaaaccttcggcagccagatttgctaccactttgacagcatgaatcctcacatcagcatcttcagcttcaagcagagacaatatcttttgcaaccccacttcaagaggcaaacgtatgtataaggtgtgatattatatattttgctgtaatgaaccgacaacaaccaaccgataacgtcagaaattaccttgttcaaacaatctagctacaggaggtttctcagcatttcctggatcttggatttgaggaagtcttaactgagacattaaagaatctctagcaccagaagttttctctgaaccatgttgctcaaggtttcgtcgagtctgccaagaatatataaagaatgggtaaaacaggccagatatttgaactaagaaaaagagagaacaagttttgatacatgaaagatgactgtgtgttctttacctcgtcagcagtaagactcaattgcagtagttgagaatgcaatgtcgctatttccccttctagtttttccttttgttgagtctcattttccaacatcttatggagtctcatgatctcagaattccctgatgcctaagtaattacagagttgaaaatgaataatccacaaacaaaccaaaacaagaaggataaaagcaaggttttcggggtatacttcgactttcttgaactcattgagttgatgtttaagcctattcacttcctcttcagccgccatctttgattgagcttctttctgaagcaactttttcagttcagagacttcctctaaggctggggctattgatctctgtataagaaatatatgtataagccaagtttagtgagactatagctgcaacgtgaaaaaaatatcatgcacaacgagagacgttacgtttccatttgatgtgatgtctaggccatttttctctccaagggcaagtctttcagcagcaagctttttctgattctttgaccaattctcctcaagcttctttattgattccatgtaatcattctgataccttagcttttcgtcctacacaaagatttgatgagtgaatccatagaccaaaaagacgtttctatagcaaaggtctcgttccatcacgttacaaaatgaactcacctctagagcattggcatatctcttttcagcctcagaaatttggttatgcgcctctacggttattctttcgatttcatcaacgaatgctttctgctgtctttcattttcctcaattagattgtctagttgtacttcaagtcttctagacaagcttttgtaatcaaactcttcctttatcttcaccatattttccactttcattgcctataaataacaaaaaagttaaacgttgcaaccaggaacacaaaaattcaacaggactatactattatataccaattttaacaaaataagtccaaagctacgggcctcttaccctctgcccaaacattatagtgcttgttgtctctcctcgatgtcgtggtgatggaccaattgtaataactaaggaggttcttgcagtgcctgttgagataataggccacttgtcaacatagtaaacattggaataatcccaataatattatcatctaatactaagatatacaaatgcctacactaaagcagatattaacttgcctccaaatgaatctctaagtaatctagttagctttgaatcacggaatggaacatgagaactattctcagcaagtgcattgatgcatttccccagtgcactcagagagagattgatagatttggcttcctctagtgtatgtccctcacttcctagtaaaatatataaacaaacaaaagttcagattcaagaaaaagataaatctcaacacaaagttattcactacaacttgaataaccatcaactttgaagttcaagttgatggttattatcaaagtgtagatgaggaacctgatttattgatacgttctgacccagcgagatccaccacaactaactttcctttccggacaacaggaggcttgagagacttagtcatatgggagtttccattactttcacttgacaaaccatctcttgttttcatagagcgcctaacatttacctgcagtttagttgactatgaatacacaagtttttttactaacaactcttcaagcaaagtcatgatcaatagtattcaccattaaaatagcatgactacgggatgactcggtgttcaatttggtattagcagcaaaccggtgagcttctccgagttgcagtagttccaagaagctttgttgatccctaatttcaaccaaagtggcacctggaagagacacatctccatttttcgggtcctcaactatagcaatgttatcattagacggatcaagaaggtcttgtacagtctccatataaagctgcaaataggagacagatatagaatccgtctccaacgaaacttcagctaaaatatcttccatagcacggaccataattccacgatcagcgacatcttcttcccccagttgcccaagtgtatatgtcttaccagtaccagtctgaccataggccataattgttccattataaccatccaaaacaccctataccaaaaaagaaagactcaaattcatagaatgttttcaacaacaataaaaaaaactggatactgatgaaggtctagtacaacttctatatacctccacaacaggtttagccacaacttcgtaaactcgcttctgagaagcatactcggtaagcacttcatcaaactcaaatgtatcagtgtcccaattatttttccggagtttcaacctcttaagctaaagaatcaaacaagaaagtcacaaaattgagctctctccacatttcaaaaaccagactttagtatataaataacactgtacctctggttgtaactcaacacaatcagcaaaatctgcatcagcaatcaattcttcaccattacgtggccttaatctaacagctactcgaactcttccaggaacttcaaaaaaacaaaatcacaatcaacaacaataagaaaaccaatttataatctcaaacacatcaatcataaagtttctatctttggggagaaaaaaactaaacagtgaaaatttataggtaaaaaaaaagatgaacagaggatttttgtttttaccaccggcgtcgccaccgcctccagacttagagctaccaccaccaagtgcggcggggctgctttttctaaggactgacttggatttgacagaagctttctggccaccggaggaagtagaagcagaggactgagttctgagtgagcttctttgagttccatttctgtaactgacacctccggttcctgaagtcgttgacatttctcgacttcaaaaaacgcataaatccaaaaacgaccaaacaaattctctgggagagtatcaaaaaacaaagaagcttcttttgtgtttccacaattttatgagttcccgagaaaattcctttaatttttttctttcacggagtttaatttctcgggaagattgcaaaaatttagagagaagagagagagaaagagttgagtgaagtggagggaatcgtgtaagaaggcgtgacacagttaaaacttacatcaacttgtgtcctaactattttaccggtttgacataaatgccctttactggtcccgttatttaccccgtttggaccatctaccgtacgcttgttgttgttccgcgtgaatcatttcattattaatatgctattcgagcaaccctgtcacgagagatgtgaccattttaattgcttactatttgtagcaatctcatttttccaaaactcgtgtatgtgtttagtcataagatcgttagataactacaaatttgtttgaattcacaaaattttagtccttatcacatatgttgtgaaactgtaaaacacattttgtcgagatggactggtttgaactttgaatgagtttttatatattaaatttgaattcgtttctttaaagcataattataggaagatcaattaaaagaacaaaaggttttggactgagaaaaggcaataacaacaataaagggattcaagggcccatagaaaaagtatatttgtcaaatcgtcccaatgaaaagagttttcctttcaaatattttggccgaaccaaaaaaaaaggtgatagaatataaattaaaatataataggagaaaataggaaatcaattcattaacaacaatatgtacaaaaaggtgctttgagatgaattgaatctagtatatgaaaattttaactcaatatagtttagttttaaaatggaaatttctggatcgacattaaaataattgttcgatcaaaattatgattcgatttttttcataaaatttgtagttcgcttacacctggttcaaacatcatgatccttccaaaccaaaaaacaccatcataataagaaaagaatgaataacaaaatttgaacatattcaaatagtgaattcttaacccaattgacacatctctgatatttcataatcaaatgtaaaacgaaacctttttttttgccattctggtgctttatagtgtgtatatactgcagcattgatgtataaagagggaaacttattcaaagcactcagactattcagtattcatgtaggggccttcttcaatgagagactttactaaagtgagttatattcaaggaacaaagagttattttctataaaatataaaagggcactttgttatttctctttctaatttcagcattatttgtttattatattgatcataggatttggggagatattctagacatgtaaaatgtccaaaatcgaaaatttatgtttaaaatcgaaaattgaattcatataaaattgtttttttttaggggtaaaactatgaattacaaaaggttatacgactgatgcaacgtcagatcattcgatattgcatcatggcctgaaagtggttttttccaaaggttgcaatgtcgcagtaagtacttcattgttccactattttttcatgtataagaaagaaaaataataaagcctaaagcaaagaagtacaaaacatgtttcacagttgaaaactaaaagtctacatgttcatttgttaagttttataaagaaaactgtagtgcactgcttttctctctttgctttttgtaaattggttgataagatccgaaaaatggacccaatattgtaatgtaaccatcaagaagtgaaagtgaaagtgaaagcaacagtttacccacaccaaggacatatgttctatcatttcatagtctacctcaactcgtcggttgcagtcttaagttttgatatcaatttttgtttgttacagtttttcatagtttagacaatttagaaaccgtattgaaaatcaaatccagtttcatctagtgaaatttcagatcaaaatcagttgtatgcgaagacagtatataaaaaatttggatggatacttcttttataaaaatagatcagatgcaactagtgcacttgattgtggatattgacattgttcaatacacaccattcaaagatctgcattggcattgactattccatctttttgctaaaaacttttgatgggttacactttaaacataaccccaacgagatgaagatcatacaagcacagggaaataatcttatgagcatcattgctagggaatatgtatacacaaacgacagaatgtattcaatctacagtcatcgactacaacaccgaatatcccaactagttcaaacaaatcgatcatggccaaaaccgagcctcaagtctttaaagtttcttaagctatcaaagcatactgccactaccaggcaaaaatcactgatttcgttcaatcactgggcactatcacctaaacatctcttaatctgccatggttcgatataggtaaactactttgactacttcattggatccaccataagctatataaaaactccacttactctaagtcccacaactcttaagtgaatcaaactttgtccaggtaagaagaacactactttctccagctaagacagagaaagcaaaatcaatgactcattcaatcaaggacacttaacacctaaactaaagacacatctaaatcttccatgactcgataaagataccctgaacaacatcttcagcttcagaaatttcaagctacatactttatccaccataagctataatgctatatacaaaccccaacttgttcgtccactataaacaaaccaggggaatccaccataagctctatacgacatctttagtttcagaactatcaagctacacacttttatccaccataagctatttacgacccccaactagttcataagcctcataaccaagagaatcctatatctgcaaacaattcaacttctccaagtaagaagaagtaagctggtaccaataagaacacaatttcataatataaccaacactttattacagaacaacaaatccaatgttgcaaaacatgaaaccacataatagcagaatctaaggcctttcctaagaaaccctaaaagcaaataaaaccataataagagcagaaaacagagagccaaaccaccaacatcacgagacttgaaaataaaaaaacaaaagagaacacaacagtttcttcaccaattcatatcctatcaaccttatcagccttcaccacaggattagctttagcaatagcttctctcgcaactcctttgaaatcgaattggcactcgtgactctctggatatctatgagttccacagaaagtgcttccacacctacacttgaaacccgtcacgccaactttcttgttacagctcaagcatctcgtagccgtcgatttcggtggatccaacggagcagcagccgaatcaccccctctcgttgatgaggaagacgatccagatccgaggacgccttgagtgatttcttggctctgttgtggttgagttttgggtttattagggtttagagatttctcgacggcggctttagcggaagcggtttgttcctccgtggctcggatgtctctgtagcatttagagcagaggttcatgttcgatggagatccgaagaagccacatcctttgacgcagagctttggctctgaaggagagaagcttgtgctgtcgttttgctcagaacccataatggaaagatctcccaattccaaagtcgaaatcttactgcaaaagaaaagacaacacaaatcgtgaataacagatgaagaatgaatttgtgactttaggtttagggtttttatttatgattccgtcgagaaaataaagggaaattgacaatatcgaaagatttagaaaacggagattcttggcttgtttctcaagcgagaaagactaaaattatttctcatttatgactaaaatacccttggaactctttataaagtcgaagagtaaatgcgtcatttgtcaacacttaagaccaggtcagcgtctatctcacaaagaccactttacccttccggcgcaaaaaaggacaaaaaagagatagataagagttgtttaatcttcgccgtcaaaaacttaaatcgaatggttcaagaatagatgaaggattcaaacgaagaacacaaatctgcatatcggcacagaacaaaaccaataagatatttacctaattcccacccaaaactctgctttagtatgtcggcgacaattctctcgtaaagaaaatctctgacggtatgtatcactgaaaatttccgatagaaacttcgtgatttgatcggagatggagaccgtaaccgaaacctcttagctttcgccagagagaaattaggacagaacagaaaccagactcttttagttcttttgcatttgtctttgtggtcaaatggtttattcatatgcggtaaggcgcacggaagatttaatacatccctgataatattcgttcgatgaaacaatcggagagtgatgacgccattgtttactaatccaacggtggtgattggaagttttttgatgagataaagtggatataaaatgggtggggttatcaactttttatggtgtttgtggattacgataaagttggttcgagttcgtgaagataatcggttttatatgaaccgggtttggtttgtggggacatgcttagctggttggacggtgacgtaacagtaggataaagaaaaaaggtggcgcgtttgtcccgacgcgattagtccatcgctcttttgatttgatcggaatgtgatgatatgttgttccaaatgtactctttcttccttgggccttttcaattatctctttcttttcttcgctaaaacgaccggattttaaaagtggtcaggtcttttctcactgagtttacttgcaaatatcaacatgactaaatcgttttaatttacgtaaagtgttttggacaccactatatctaatcttgagctataatttgtttatgcttgtccttaaaatcgagactaattcaatttccatttatctggtttggaaacgactaatcgaaatccaaaatcatcgaacgctatcattcaagacgttatattagcaagcgactctcactcgcgactgcatccttttttttggatccaatactgaccataaggtccacaaccaaattaaatttgatatagtttgtgaattgtttatagggtccataagcttcttagttcttatgctcctctttggtatggtattaatacttcaaaacgtagctatctaatctatatatcatctatcgatatgttcatttttacagggagtcttgttcttatattttgcttacaagtatcaactttggttgcgtttcattctcttgttcgatcctctcgttttcttttatgttatgctccgtaatatatataaattgccttcaagcaactaaatttcaataattaaatatgttacgtatttcttctgtcagtacgatgtatgtacgcaccgtaacggcaaagcgaaaataaagcgccggtctaaagcaactctgcttacacatttatcggtggttcgtgacggagcaacagctattagccactcatatgtctccacatgtttgactacgacaccggtttaataagttgaaactaaaccacctaattataaggatatcattttttaaaagtttttaaagctaagaacggaaacgaataataaagattctttcttctaaccccattcgctctctccgatcaacacaacatttgatctaacggtttaattttctcgagaaaccgaaggaaaacaaacagaggtgcataacgattctgacggaaacttttgagatattttttttagagccaaaaggattcactttttttggttttatcttcgcatcgatctatgacgtacagcaatggcgtcgatgggacggtgcctgagctgaaattgagagtcgaagaagattccgataatggtgattatctgaaattgagaggaggatcaaatgaagaagatgaaggatcatcggcggaatcatcgagatgtccgataggatcggttacttctgtctggttctgggtgaaattgatctccttggtcgtttgtttgggttcattggcctttgttatcatcaaatgggttggtccctttttgattgaaaaggttcgttttttttttgtctctcgaagatctgatgcttattggttacatttgattggattagggtatgcataatgattctggtttctgctgggtttttaattgttgaaaattagggttcttgaattacatgtatgagtatgtgtttataaggaaggttattcatttatcatcattaatgttggtgtgatttgtttcaggagctgattccatttataaattgggtgagaaacacattcagcataccggttctcggtcttctactatttgcctcagtggcattgtttccaagcattcttcttccttcttccccttccatgtggatggctggtcttacatttggttatggaaaagggtttcttctgattttatcagctgcttccatcggtgttactcttcctttcttaattggacatctcttcctccacaagatgcaagtaagcatcatcatcccatactctttgttcggatacttattattaagcttgtaccatgagatgatcaatttggactttttttctttcttgtcatttgtgcaggaatggttgaagaaataccctaaaaaagcagccatacttagagctgctggtgaaggaacctggtttcatcagtttcaagcagtcacactaatccgtgtctctccatttccttacatcatttacaactactgcgctttagcgactggagttcattatggtccttatatcttaggctctcttgttggaatggttcctgagatctttgtctcaatttacacgtacatgcctctctctctttctctatgtctcttgtctcaatgtttaaggcatgttctgcagaatcttaagactggtggttttctgttttgggatatttgcaggggtataatgctaaggacactagcagttgcatcagacacgagacacacactttcggttgtggagatagtcgtgaatgttcttggcttctgtgtaactgcgagcgcgactatagtctgcacaatctatgcgaagaagaagctaagtgcgatgcaatcagaggacgtagagacattacaaaatccaatactttattaactcttttcaccatgaccacaacataccatcatctaacacgatcttgaaattgataatatataatgtttttttttttttttgttattcttattcatttgaaaatgaatatttatgtctttttctcttgtatatatgatatgtatcaattgaattttgaaaatttccaatgtatatttattagatcatctaagtctttttctttccttgcatataatccaccttatgtatcatggaacaatgtcttgttgggttttgttcaaaagtaaaaacaaaaatgatccatgaagactgtgtgtcctcctatgttccatgaaatttatgtatcaaatgatctttggagctaacttcgatgctgagtgtcaatgatgacgtcatctgtttcggttttgttgacagagtagtcaacgcgagaacctctgtgatgtttgggtttagtgccacgttattgggccgtcggaccaactgcgccaacttcaatttcatatggataggtttggatcaatttcatatggatcatatgatacgtttgatgtatttaacaaggaataatttcctggcaatttttattacttggtctgaataatgatgtaacgagtgaagaaaatatatagcgtatcttaaaattaagcataagtattgaaaatcatcgaaaaaaggagcaaatctggcttcatatagtgaaaatattgctatgaaagtctctgatagaccttaaaaaaaaaaaaaagcaaacccgtttactatatgagccatgtcttgcacaccagtctcaaaccacaataatatcttcaaaacaatcaagaaagaaatggaaaaaaaggaagaagaacaaaatgattaaacaaactcagtaaaacagagagaacaaaagctacagaaacaaacaaataacagaaagacgtttacttttggtcactcacttgtctctgtctctaattctcttccctttttctaaaacccattagtttccaaaagtttgatttggacctcaactaatgaattaaccccaagcatttcacaaaatgaaacctactctcactcaatgatctcatcataagccatgtaacattcaacattgcctaaaaataactcattcattcttacttcacaagtaatttatcttactccaaataacatctcatcatttgaatcgaatattaaatgtacagttctctgttcatcatgcattcaatatgtttgtaaccaccaattgagattggggaccataactacttgtttttttcttcatgaaaaattgagaattcatatactccatttttgtgaaaagaattaggtagggattatttaatggcaaaaatggttggtgaaggagagaataaatgctttggtaagaagtacagacaagccagacactctcctccattacatacacatatagacgattgaacaaagcaggcacgtgcttcttcttcatttggtggaagccagagagtgtgagaaagactgaatttaatacattcaccagtttactttccagccaaggcacacactctcttctctataatgcttagatgagactagcctgacaacaaattccttcttcttttgtccatttttttgttcaaaaacttgcaaatactcttgaatctgtgattctttcttcttttgtcgtttcttgagaatgttgactttggtcggtaaaattttctagccgttaaggatgactaagtaaatgcagaagcagctcaaaagttctcacctttagctcaatcccaagaaaaatcaacggttttgttttataaatgcagctacttgttcttggttctggtgttagagaacaaatcccaatttggagctcgggtttaatttcgggttcgggtttggatcatgaaccgataatgtcaattgggtaggatccgtttatgagctgaatatgagaaaggttcatctttttctggttttggttcatttcatctacatttcaacttctcgctctgattccatcagtgaacgagacattctgcttcagttcaaaggcagtatcagtgacgatccatacaacagcttggcttcttgggtttccgatggtgacctctgcaatagcttcaatggaatcacttgtaacccacaaggtttcgtggacaaaatcgttctgtggaacacaagtctcgccggaaccttagctccgggattgtcaaatctaaagtttattcgagttctgaacttgtttggcaacaggtttacaggtaatttaccgttggattacttcaagttgcaaactttgtggacgattaatgttagttccaatgcgttgtctggtccgattccggagtttattagtgaattgtctagcttaaggtttctagacttgtctaaaaatggtttcaccggagagattccggtttctctgtttaagttctgtgacaagaccaaatttgtttcactggctcataacaatatctttggatcaatccctgcttcaattgtaaactgtaacaacctcgtaggatttgatttctcttacaataatctgaagggagtgttgccgcctaggatttgtgatattcctgtgcttgaatatatctcagtgagaaacaatttgttgtctggtgatgtctctgaggagatacagaaatgtcagaggttgattcttgttgatttaggaagcaatttgtttcatggattagcgccttttgcggttcttacgttcaagaacataacttatttcaatgtctcttggaaccgatttggtggtgagattggagagatagttgattgcagtgaaagtttggagtttttggatgcttcgtcgaatgagttaaccggtaggattcctactggtgttatgggttgcaaaagtctcaagcttttggatttggagtctaacaagctgaatggaagtatcccgggaagtattgggaagatggagagcctctcagtgatcagattagggaataattctatagatggggtgataccaagagatattggaagtttggagtttctacaggttttgaatctgcataatctcaatctcattggtgaagttccagaggatatatccaattgcagagtacttcttgaactgtaagttttaatcgatgttttcgagaatttatcggttcttgttactgtgtttgaatctcacattgttgttaatcgtttgcttgttggttgcagagatgtttcagggaatgatttagaaggaaagatctctaagaagctattaaacttaacaaacataaagattcttgatctgcatcgaaaccgtctgaacggaagtatcccacctgaacttggaaacctctccaaagtccagtttcttgatctttcacagaattcgctttcagggccaatcccgtcttccctcgggagtttgaatactctaacgcatttcaatgtctcctataacaatctctctggtgttatccctcctgttccaatgatacaagcttttggatcttctgcattttcgaacaaccctttcctttgcggtgatcctcttgtaactccctgcaattcacgtggagctgcagcaaaatccagaaattctgatgctctaagcatttcggttatcatcgttattattgcggctgctgtcatcctctttggtgtctgcattgtgcttgctttgaacctaagagctcgtaaaaggagaaaagatgaagaaatacttacagttgaaaccactccactggcgtcttcgattgactctagcggtgtgataattggaaagcttgttcttttcagcaagaatttgccttcaaagtatgaagattgggaggcaggtacaaaagctttgctcgacaaggaaaatataatcggcatgggatcgattggatcagtctatagagcatctttcgaaggaggagtttccattgcagtgaagaagcttgagaccttaggaagaatcagaaaccaagaagagtttgagcaagaaattggacggcttggaggtttgcaacatccgaatctgtcttctttccaaggttactacttttcctcaacaatgcagttgattctctctgagtttgtccctaatggtagcctctacgataatctacacctaagaattttcccgggaaccagctcaagctatgggaatactgatttgaattggcacagaagatttcagattgctttaggaactgcaaaagcgctctctttccttcacaatgactgtaaaccggcgattcttcatctcaatgttaagtccaccaacattcttctagacgaaaggtacgaggcaaagctatcggattatgggttagaaaagtttcttccggttatggacagctttggtttgactaagaagttccacaacgcggttgggtacattgctccagagttagctcagcagagtttgagagcgagtgagaaatgcgatgtgtatagttacggtgtggttcttcttgagctggttacaggtagaaaaccggtggagtctccatcggaaaaccaagtcttgatcttgagagactatgtgagggatttgttggagactggttcagcttctgattgttttgacagaaggttgagagagtttgaagagaatgagctgattcaagtcatgaagttaggactcctttgtacgtccgagaatccactgaagagaccgagcatggctgaggttgtgcaggttcttgaatcaatcagaaatggatttggatcatgatgaagctttttccctttttttgagcaaagattgcataggaaatgtgcagataagtttattcttttgggattttccagttttagatttacgtttgttcaatgaaattgttactctggtttacacaataccacaccgagaatactactattaaggatgagggaaaatagatcaggattacaaagttcattctacaggcgagatcaaactcctatagttatcataaactcatactttgtcacaaacacatttaaaatgttgagtttaaaatatcaaattgtgatcatctctctggacttgagtttagaatattcactctcagtatctcttagcaatactctgatttggaatctcatggctccttacgactcttttgcgaatccaattcaacaacattgaaccggtttagctggttaacttactaactcagcgaaacactgcgttttaataatttacctcttatccacaaaacgctgccgtttcggttgttatggttagtcggccttgaattcgttggctgcgacgacagagacagatatataagtcggaagccactagaaaaagacggtggcgttttgtatcgctgatcagatttcataaaccacgactgacttctcctgctcgccgatcagatctccgacgaaggtaacggattccgattgttgtaaccaatgtagaaaccttaaatgaatcggcaaattcccaagctaaaaatttgtattgcaagtttctgataatctctgcttttaaattcccaatgtattaattctgcgatttcagaactagaatcgatctctcatcttctgaattttggtttacgaggtgtaattaattggtcaaaagctcaaaatctgaagaatagttttaagtttacaagtctttttttgtgtgcagtttttgattaagagaggaagaagatggatcaaggaaggcaagtgttttcagtagatcttctcgagagatatgcgacaaagaatcgtggcatgattacatgtatggctgctgggaatgatgtaattgttcttggaacaagtaaaggatggattatccggtatgatttcggagttgggagttctaatggtatttgttcattttgtcattctttttctttttttttgtgcgaattctaattttgtcatttttgtttgttaattcagtagtgaaaaaatagacaaatcttttttctctttgggtatagatattgatctcgctgttggtcgaactggggagcaatcaattcacaaggtttttgttgatcctggtggtagtcattgcattgctacagtcactggtgttggaggagctgaaactttttatactcatgcaaagtggcttaagccgcgtgtgttgagccgtttgaaaggtttgctcgttaatgccgtggcttggaatagacagcagataactgaaggttatgcttttggtgtgatatgatgagtcttcttattgatgtttttctcacatggatccatattgattttgttttggtctttccctggattcagtttctactaaggagatcattctgggcactcaggatgggcagctgtttgagatggccgtggatgagaaggataagagagagaagtacatcaagtttttgtttgaattagaagaacttcctgaagccttcaaggctttgcaggtactaaaattttataccgagttggaattatatgtttcctccattggttcattattccaatcactgtcttttattgaaacaaatgtgtagatggaaacggccaacataagcagtgggatgaggtactatgtgatggctgtaacccctactcgactctactcgtttacagggattggaacattagaagtaagctaaactctgttctgttatgtgatgacttctgtacccaatgattttacttaggaacattaaatgtcatgctagtaaaatcaaatgcttatcatggaatgaaatggtagcattaggagataagtggaaggtcacaatatattattgaacgggatccattttattcgccaatggttgggcttcaaatgtcaaacatgattgttcctcctttcaaatttggcataaaaaaattagatataacggcttatagtttagctctttgttgcttcaaaatccatgatctttgccaagtgtgaattaacttttcttgcatttaatttctaaccactaagtgtttactccagtctgtttttgctagttataaagaacgagcagttcattttatggaacttcctggtgaaataccaaataggcaagtgcttgattaccttaggctcattttgcgtattaaagaaatcacaaagtgtaactctaccctcttaacatgtaatgtttatcgtttttcagtgaactacatttctttataaagcaacgaagagcggtgcattttgcatggttatcagggacaggaatttatcatggtggcctaaattttggagctcagcacaggtagaatgacagtaccaatgtccctctgaaattatttggatctttctatttgtttcccactttcatatttttggttattttgttctgtaatttaattgaaacttgttggtagttatccaaatggcgatgagaactttgtggagaacaaagcactcttggactactcaaaactgagtgatggaactgaagcagtcaagcctggttcgatggcactctctgagtatcatttcttgcttcttattgggaataaggttaaggtatgtgtaaacacatgaggttgatatattcctcgtgtatgtatcatttgatctggcttcatataagtgttttgtttcattaatatgcttactcattccttaattgtgggggtaggttgtcaatcggataagtgaacaaatcattgaagagctccagtttgatatcacctcagattcagtttcaaggggcataattggactttgcagtgatgcctctgctaacgttttctatgcatatgatcaaaattcgatattccaggtgtgtattggcttactcatttatgtggttgtaaaacttcctcagtaaatttatctgatatcttctgctttcacttctcattttcggctttggatatattctttaggtttctgtgattgacgaaggacgagatatgtggaaggtttacctggacttgaaagtctatgctgcagctttagcaaactgtcgtgaccctctccagagagaccaagtttatttagttcaggtgatcccttgacaccatcggttaagttaataggcattgatttaggtgccaccgtgtcatattgctgtcacctgcccatagaaacttgacgggaagaatctctctggttttgattatgtgtgattgggctccttctgttgtaggcagaatctgcattcaccgacaaggaatatctgcgagcagcatcattctacgccaaagtaatttctagttcctctgttttactttgttctttcatgatgtaattcatcattgacctggtacagtgttttctttgcagatcaattatgtaatatcttttgaggaggtcactttgaagtttattagtatcaacgaaccggtaaacatttacgtttgtatcgttgctagttttatttttataacataaagaaatctctaatccagtgcgtgctatttaggaaagaaaaatgtgtttcatttgtgggcttggaatattcactgccgtttgttccttatgtgattgcaggaagctttgaggacgttcttgttgcataagcttgataatctttcaaaggatgataaatgccaaataacgatgatatcaacatgggcaactgagctatatctggacaaggtttagcttttgctgtctctggtctcacttctcattaaacatagatttggaaaacatctattattcccttaattcctctcattgatttcgtccccgatttactttctgagttgttatatcttgttactctgtctcatattccttgaatgcgaatatagataaatcggctgcttttggaagatgacactgctatagaaaatcgtgactcggagtatcactcagtcattcaagaattccgtgctttcatgagcgattgcaaggatgaattggacgaggcaaccacagtgaaaattctggagaggtaaattccacaagtatcccaggcgatctattaaattctatctttcagtcagtgagcacactgaccttcatgatgatgtgtattgttttctgggataatatgttctcttaaatactgttttcagaacatctcataggataccttgcttgcggtaaacactttcttcttatctatctcttttttgttctcttgtagttatggtcgggttgaggaattggtatattttgcaaacttgaaggagcagtatgaaattgtagttctccattatattcaggtgaatggcatgaaatttttttcttttcttgattgatccatatagatacaacaatatcttacacagagttgttcagtttacattataagctttttctttgtccattagcaaggggaagcaaagaaagcattggaagtgctccaaaaatcttcagtttcagttgaactccaggtgtgtaaaaattagcattgggatcttgtgaaattatggagtctcccaatctttgttttgtcctgaactataatataatttgcacattccagtatcaatttgcgccagaacttattatgcttgacgcatatgaaaccgtggaatcatggatggccaacaaaaatcttaatccaaggagattaattactgcaatgatgcgttactcgagcggacctcatgcaaagtaatgtcccacatcttaactactgtatatttctattcacgttgtgttactaatctcgccaataaatcctccaaaaaaatttcaggaacgagacacatgaggtcatcaaatatcttgagttttgcgtccaccgtctgcataacgaggatccagggattcacagtttacttctctcattatatgccaagcaggtttggttgctttccgtctacaaaattctttgattacctgaaaatttagacgtctgtaagtaatctgcaaagcatatttaggattactgtctcttttctctttttttccacttgtaagactgtgagtccgtgacaagaggttgctaaagtgataaataatggttctctttatatatataattaggaagatgacggtgccctcctccgttttctgcaatgcaaatttgggaaaggacgagagaatggtcccgaatttttctatgatcccaaatatgcattgcgcctatgtctcaaggaaaggagaacccgtgcctgtgtccatatatacagcatgatgtctatgcatgaagaggcagtagcccttgctcttcaggtaagaaatccatttaataacaaaagaaaagtatttttcacttccttctcctacgtgcgatctttaacttaaaacgttttttgaaacaaaattgttactgaaagccatattttatgatgccagtgtgcagagagtttggttgatcatttgaaaacggtttctgttttacagattgatccggaacttgctatggctgaggctgataaggtcgaagatgatgaagacttgagaaagaagctgtggctgatggttgcaaagcatgtcgtcaagcaggaaaagggagctaaaagggaaaacatacgaaaagctattgcctttctcaaggaaactgatggccttctaaagattgaagatattttgcctttctttccggactttgccttaattgatgacttcaaggttagtcaacgtttcctcttttccagacacacacgctctggcttgggccaaacaagttgcttctgttctcttgtaattttcttcaatacgcttttgcaggaagcgatttgctcatctctcgaggattacaacaagcaaatagaacaactgaaagaggagatgaatgatgccacacgtggtgcagataacattagaaatgatattagtgcgctaactcaaagatatgccgttattgaccgcgacgaggaatgtggggtatgatcatcctaagattgagtagcctttatctagcgtctacctatttataaatatgaatcaatgttttccgaagcaccaaaatcactagcacacctgatccttttcaatgttgttaccaggtttgtaaacgtaaaatcttgatgatgagcggtgatttcagaatggcccagggatattcttcagcgggaccattggctcctttttatgtctttccttgtgggcactctttccatgcacagtgcctgatcacacacgtcacaagctgtgcacacgaagagcaagtaagtcttgaagcataagttcttgttatgagttccctctatctccttctgcatatagatactgcaaattttagcaatatttgttcgttattgtgattccattttttgattggttttcccaaaatctgtctaggccgagcatatactcgatctgcagaagcaactgacattgcttggaagcgaaacccggagggatataaatggtaaccgatctgatgaacccataacaagcacaacaactgcagacaaggtagggacattttcttttccttttttaatcttttctttaacatttttctgtgacctgacatattttctttacggtgaggcagcttcgatcagagctagatgatgctattgccagcgaatgcccgttctgtggagaattaatgatcaatgagatcactctgccttttattaaacctgaggattcacagtattctacttcatgggacctccgatcagagaccaacttagcaaaccagaggaccatttctttgcctgtttgattcatgtcaaaccgtgaattctttcttgtgtgatctcttcttcagctagctttgaaatgtgaatgtgatttttgggttctgtattattgatgtagtattactattaaacatgcttctggagatacatacaatatgctatctcacctacttttgtctctatatctaagtgtttttctgaactattatttcgatctaaaagatacttctgtattccatgattttacatcagtgatgcgactcttcctctgcttcaaaatctttttctgcagatattttcttcgccagagcctgcttggtccagcgcttcaagtcataagctcttttaaaaggcttcttctccctggtaagtttcctctttgtaatggcaattgcaagatcgtttgggaacaacgtttgccagacaaaggcgtggagaagcgtggagacaaacaaaacgcagaccatcgctgtggaaatgaaggaaagagtgagtgctagagcccggctcgggtaaccaggtactgcctctgcatactttattgttgctacggatgctgttgtcataggaaaagtatatgaccaccacgccactgagaacctgcaaaaccccgtagccacttagtatcatcaacatatatcttcaaccaagaatatttaaacccgagatggacttacttaaatccagtgaagaaattgatccgagcaactagggatatgtataggaagagtgcaatgaagaagcaagttcttgaacatccgtcgaattggccatatatcgtgttccaagcaatacttgctgctgatggggcagcaatgaacatagagtaaacaggatgaagctctttaggaagagcttcactggtgggaagtctctgataaagtgttacaaacacaaccaagtaatgtgcaaaacctactgcccatagaaacttagctacttcatcccatccaacttttgaagctaagatggccccgacgaaattccctacaacagaaagatgagaagatgggtttgcgactttgcatagtcgcctcttccctcccgaaagccattgcccgtagatctttagctcgaggaagaaataaggacccatgaaaacacaccaaatggcgggatggaggtattttcggtttggtgagaacatgggaggtacgctaatggctaggaacatgcaaaccacccaaggagcgaagaagaagttgactcgaacaggatgaaaatactctcttttgacagcttcaaagtagaagatgcatttgagtatgtaagtgaaggacacagagactaaaactaccagtgaaaatagccatacaactaagttaatcaatggtgtgatgtgtaaaaagtttgttgcaggacttttcgctagggcaagccacaagacagcttgactgctaagtcccaaacagataccgaagcatccaattgggaaccttaggagaaacggccattgctcctcttttggaagcagaatatcttcattgtcctgcaagagagtacaattggaactaactgataattaagttttgaagagagaaagagaaagaagaagagttgttaccttgacttcatccaattcaggtcctctaagagcagcaaagtatcttcctgcagaaacattttcatttatagaatcatctttggtctcaccatcttcagttcttaaagaattctcaatgtctctctcccttattatagaaggcaataaagacttttgtttgctgagcgttgatttagtcctaaacatactaaaatctgttttccgaccatctccaccgttgatgattccacctgattcaaacccgccaaagctacgaccactcctcggtaaactctttttgtcatctctttctctagattctctgttgagcactgagaaacctgtctctagcgaaacctgtctgctaaaacctctgaatggtctttgtttccctcggtttggtcctctgtttccagagaatctcttgttgttgttgttctcttgctgttgcagttcttgctctgcttcatcttcaacttcattgatgtcggcgaaagtggaatgagcatttgactgtttcctctccattgatcagagcaatttgataatttgaaacacaagagaagatatttttcttctagtatggaaaggaaacatgttaatgtatatagaaagatgcaatggactaagttaaaaaaagcaaagtttgtggttaaggggcacgagaaagcttggtgaatggtgtgagttaatgcgtatgtgaaccaaaactttcctggaaagtttcttaggtttctcgtgaaagcttttcgatccaaactacttggaaaaggtgagagacgatgaaaaaaaaaaaaaaaaaaaggccgttccattagtcacgagattcaaatgcaaccaaagtcaatttgctcttttctatacaaaacataatttgagtcgttaattcgatttctgttagctcctcttgtttggttaaaacttataaacttaacatataatactaacattttggaaaaaggggtcgaaagattaaagcaaccaaacatatgtgcagaaatatgaatggcatatattcttcttctttgtaagagatttttctatgaatttcgttccaaaatgctttacgttttccctttatccaaacaaaaaactttgatcaatgaactcaaaataatacaaaagtgatataataaatcatcaaatagcctcgcatggattaggagtcataggaccataagacaaactcacataagccgtgattattttcacaacttcttgaataatatgatacaatctataatttataatttataatgtttgtttatgaatcaggtttaaaacaatattcggactgttgattaataaaaaattacaaatataagctaagcttgagatcgaaccctcacacattgaaggtagattgccacagagatgaccactataccgccacaagttttgtaagagtaacgcccctaagttgttctaaaccttggcatttatagcctgtagtttttgtttttatagtaaacaaaaagttgtaatgtaaccttacttcatatagctctaacaatatatgagtgttgtgaaatgggaatacttatgggattagattgttaaccatatatataaggtttgagatcattagggtgtgtttacaaaatctatattcttgcaatacctaatgttttcaaaacccacaacattagtgaagaattattgcatgaatctcttagacttgcaaagtagattcttatttagcgttcgtggctttttggttcgacattattggaagcaaccggaaagcaggcagacccagtcagaatagtggtgggtcccacgatgtgtcgaataatatatatctgatcctgaagacaagatcatgaccgtcggtttaaaacacgtaattgggttccaaggctttatgaaaaccctagaagtaaaagggaaaaccgaaaaacagagagatagggttcaaagcggttaggaagatcctttttccttaaggaaaaggaaatcaaggataaagaagaattattcttttcctggttataaataagcaagcccctgttcaacaaaacaatcacaaaaagaatgtcaaaaaagcaacgctgcttgaggatggaatcgctgccccacgaggtcgtagagcgcatcctagagaagacttgctgtggattctctgctgagattcacggctgtatcgaaacaatggaaatcatcgatcgaatctccattcttccaacaaagacaattgacacagcgtcagcaatcaggtgatccagctcttctcatggtctccagaagtcgtgaggattattttaacccggatttaaaacatctaactacactggtgttgggttcatcatcatcggtcaccatccctacaccttgggagaaggacaaggagaaggagaaggagaaggagaaggaggacgaagaattcttcttagtttcttttgatagctgtgacggtctcgtttgtctctacaaatactggaaatctggttatgtggtcaatcccaccactagatggtatcgccctcttcctctctctcaattacaacaactccttatcagcttaggtcgcagtgtcttcgagcttggatacacagtctgtgatattggattcggtaaagacaaaatcacgggcacatacaaacccgtttggttatacaattctttagaaattggccttgaaaacgctactacatgcgaggttttcgactttaacaccaacgcttggagatatgtttctccgaccgctccctatcgggaggaaaccaaaattctatctttcgatcttcacactgaaacctttcgagtggtctctaaagctccttttaccaatgtaaaagcttttgatatcgtcatgtgcaatctcggcaaccgcttgtgcgtttccgagaagaactggcccaaccaagtgatatggtcattcaattcaggcaacaagacatggcacaaaatgttttccattaatcttgatgtaacttctcattggtttggtaatcacatagccgcggtcatgccactagcacttttttatgagaagaagaagaagaagaagttgttgttttattgtcgtgtgcgaagtcgaacattgatggtatatgatcccgaaaccgaatcatatgatgttgctttcaatgattactccatcggttatcctctttgttatttccagagtttaatctctatttcataaatctgattattgccaatgtattatggtgtaataatctttatttctttttccatccaccgtttctttgtcagttttgcaactcttaaagagatgattatgatatatccagagtctttttttaccaaggctgctttttatgcttctagtttatctcactcagtttacttccttacatccttttcagtgatcgcaatatgctctggagtctgttaagtttaaactttggcagacacttgaatgacagaatttggtgcaaaaaggtttaaacctgcgtagacaggacttttcgctaaggcacgccacaagacagcttgactgctaagtcccaaaacatataccgaaacatccaatcgggaaccttagaagaaacggccatagctcctcttttggaagcagaatgaagataatgaagatattaaagaaaaaaaaacaaggccgttcccattagtcacgagattcaaatgcaaaccaaagtcagtttgctcttctgtctacaaaacataatttgagtccgttaagttggaccggttcggtttagttaattcgattgctttttgctctcttgtttggttaaaacttataaacttaacatataatactaacattttggaaaaaggggtcgaaagattaaagcaaccaaacatatgtgcagaaatatgaatggcatatattcttcttctttgtaagagatttttctatgaatttcgttccaaaatgctttacttttttatatgcaatttatgagaatgagaccacaacaacttagattggtgtacatatatcaaatgaaacatgtaatataacagtcctataactacttatagaaacctaattaaactattacgtagtgttaccaccttaaaaggttaacaaaccttgacaagtaagtctaaagataaacttaacctacattagctaacatatcatcatcttttcaaacccatttaatactgattaaatcctagatgtcaggttgcttcagctgagaatagcttgattacccaattatattaatcaataaaaatgtgtgtgtgcctaacatttttgtaacaaagaacgatatcttatgctaagctcaataggttttagatcaaaataataattccaaatcataataagaatacatgatctagaacaatatgttacaagtgaattaatgagcaagttgccaaaaaaaagagcaagttgccaaaaaaaagagcaagttgcttaagaaaggtgtaaatttaacccaccagatgaaaatgcgatttcgcctaacagaaaagactcgaatcaaaagtagaaagaaatttattattttgactattttcctcactatgtttcgataattttggtaagacaaactataaaacataatagtacaagaaaagaaaaaactaaaagaaagtaaaataaaataaagatacaatcttatttcctttaattatgctccctactttttcacttttgttacataaatatatctccacttttcttttcatagtttttccccaatctcaaccatttacaattaaattgattttccccctctcaaaacgaaccaaaccggttccaaacaatagcagaattccaaagaatcaagaaactaaaccgaaaaaaaagaagtaaaaattaaaaagtaaaaattacttcaccggtttaaatccaataatctttctcttcacacttttcacttctggtttagcaatttggatctcttcctagcttcgctatagagaaccacacccataatcgtcacaccaaatccggctattcccatcaccgtcaccggattcctaaatatcaaaaccgagactccggcagccaccgcagcttttccgttccccaaaacctgcaatgtgagagcacttgtatgctttgtcaccaagaaattcgtcaaattcactaaatatgccactgtcgcattcccggctaacaagaagatgatcaatggatccgtcctcgctttctcgattagaactcttaaaacgtttccttcaatgtatagcgtaaatggtagtaagatacaagccgccattggagccatgtatagcaaaagattcatagaatgtagcttctccgattccgacgtcagaataatcccctacaaaatacacaaaatccggttcaaccaaaccaatagtgagatccaatagacgcaattcgatcataccgatcgattagaatctgaattatctgtttaaatgctatagattgaaattcagacagagactgaactaaaccggactcatttcagttctaagaataaaaaccggattcgaactggaactaaatttcttccagatttgttataataaacctggattcggaaaaatttaagagtgatgttttgtaataaaatcgaaattcgaacgcaatttctgattctcttagtactaaaacggaaaattcaatacaccaaaccgattaatacctggacgacggatttgagagctctaccggcggtggaagcaacacagataaggaaaccaaaaagatgaaaagaaggttcagagttagaagcaagaacgatgccggagacaaccggaagaagagctaaataaacttcagtggactctgttttacaagtaatgagaaaagagaacacggcggtgaaaaacggcgtcgtagctccaatagcttgattaaaagaaacagggatataacgtagcgaagtgttgccacagacgacggagagacaaaagatcgctgacaaagagaggatctttagaaactgacggcgagataagatgtgctgacgtggcacgattccggcgatattgattacggcggagctataggcggcgcatgataacatgtgtgtcatggtgaggaagattgggtaacggaaaccgtagtagaagagaaggtatttgtttaagaggaggactcctatatttgagccaaaccaggcggcgattatagccgccgtgaggattgttggtgatacggtgggggaagagaggaagaagggtttgagtggtgaagaagcggaggagtgtggtggtgttccggggatgtctacgatggttggtgcggcggttgcggcggcgtcgaatctaggattgctcatccgccgcgttgtccatgattgagcttcaaccatttttcggataggggcgaaatgggaataacaataagtttttcttctttctttctttttctagagagagagagagaaagtgtgagtttttatctttttcggtggggattgagatctgagtgagtgaagaagaagaagaaggaagatgattaatcggacggtggagattcagatttagctgtaaaggtttagaatgatatcagccgttggatcttatagttggagggaattgttatatttaaaaataaaagaaaaataaataaaaagacaaatctaagaaaattaattttaagattcgaagtcttgtgttcggagactaagcatgagtcagaagtgtcggtagtaggtccacatttgagatccgatggaagcaatcctctatgacgcagcctaatttgtaattacatacaaaccccactcactaattatttagcctctcttttcaagttttgtttttaataattgtcccttaatacaatattagcaatagttgaaacacacattagcctaacattaacattccagaacacaccaaaaattaaaaaatctcaactaacaaagttggataagtcacatttatatatggttacatcaaaacaaatgcgtcggtgttgaccagatttagactctctcttttttgggttgattatatatgtttagatttcaaagaagcatttgaaactatttacatttgacaatagaggtcgtacattttaataaaggttgtcacaaataccaaaatctaatcagatctgtgaagtaaataacgcgatttttcttttgcatcagcattaatcacgcattgtgtttatcatcgaaatgactaattgactatataagtcatctaaatatattaatagatttgttatgtcattcaaagttcaataccaattatggtaacaaaatagattataaaagggatattataattcgagaaaaggggacttggccaatagaatgcattattctttgctactttctgcaaaatattttctttatcgcattgcatagattaaattattttatacgttcattacttgccatttttcccactgatcatgcatgcgattgctaatatctaaggtgataataattttgttaggtgacttttgtgaattcgacaaatatatccttcatgcgaaaggaaaaaaataacatggtggataataaatttgataagagccatattaatgaattacaaaaagagaaactgttcgttgacaaaaaaaaatgtcccacactgaaaaggaatccaaatatgaaagatgcaacacagaaatcatgattttctacgagtgtgtgtaataggtaagagctatctttacttagaaggaccagctcactttatctgtcttctttgcattccctaaaaaaacgaaatgactccttttgtaaattgccgtaagacaaaatccaatgaatgataataaatgattacagcacgtcacttagtaagaaacatttagaatgatgaatgtctacgtatacttatgatatcatcaaatcaactaattcactagctaaagctaatccttttatttatgtagtagtttagactaaataaataattatgtatcgaccttcataaattaaaaccaaaaaagtatgtatggctccctaataaaaaaaccagacaacagaaattacaccaaaatgtttgaagtttgatgttctgtctaaccattactatttagtttaatactacaaagcaatcaatttttaatgtaagaaaaaaacatagtatataataattcatctctgacaatgtgagattttattatttgagagtagtttatagcagcacataacatttcacatgttcttggaattcaaaattctatatgatttaaatacttcttacgtttaccagaataaattatgtagggcacaatattgtaggaaccatttgtttccatgtgcgacccaattttagtgggccaaaaacagtgaaactaaagctagttgctgatagggcccgcgtgacaacgaaacattatctaaaacatttggtctatactattacaaaagcaaaatggcttcgcccgggttcgaaccggagaccttcagtgtgttagactgacgtgataaccaactacaccacgaaacctgttgaacattgattagatacacacaatatatagtatagtgatcaaattctgataggggctcaacattagttacgcaattgaaagtacagagagttttggtacaaaacaaaaagcttgtgttgtttcaatataaacctcaagttttgatacaaaacaagttctcaatcactaaaaaacgtaacgttttataaaatgtatggttgttgacttgttattaaaccttactggccacgaaatcgctgtttgtagcttcccatatgacagtaccatcacaagaacaaagttttttgtagttttctccaacccctgcgcttctagcaatcactgcggcggtcaatccggggcctgacttattatcatcggtcttgtacaccacgacggctctcccgataaggtctgcaaccttgagtttctctttctttcccgaataaaaggcctctccgtttttgtctgcctctagtgttcccaggtctcccaatggctgacagaagaaaaagagagtttttagaggattgtgatgacattttcgttttctaagaatgcgtttcaccaacctctgtgccagtttgatcttgaaatggattgtacaagctccctgtgctggctgctccgtttgtgagatctccatactcgttgatacaccagctgtgggttccgggtgacaaaccggtaaagttggcttcgattcttgcaagttccatactgacctgagcaaatcggactaccccgaaaatgtcagggcctttgaattctgctactgcagctgagactaagaaatctgccaaaacacatcacaaagtaaatatcataaaacaaatgaggaaagaggtcatcaatgaaagacaaaccgtggaattgaaacggtaaatcctcaaattcaatactgtcagtgtattaaagagtagctcaagaatggaaaattgccagtacgtaaatcttcttaatgttgaactaaacataaacacaagccatgtactccttacatgttctatgagctgagaaaatatatcttctttcttttgatgttcaaatctttcttctcaaacaaaaaccaaagtgacccgagaagagatatctaaccttgaggaacaccttgtccaattaagcgagcttttcgaccagtttgctccaaagcttgagtcatagccttaacaggggaagatccaagtatcctcacaacttgattggacaaatccacctccactttctcaataccttacaagattaaaaatttccattacacataataagcaccaacaaagtaaatcataaccaaacagacgacgattaataaagttgtttctcctactaccttcaatggtttctaatttgttcttcacagcattaacacaaccctcacatgtcatatccaccataaactcagtctggaacacacaacacaagttctcactagctcaaatccaaaaattgttgtataaagatacaggattacgagaaagacttacaagaagctgaggcatggctcgatcctcctgcaaatcaaattcagctacttaaatacttaatcatcgaatcaggaaagcgaaaaagctcaaattggaaatagggtatttcaaaagttcaaagctttaaaccaaaacctgatggagattacgatcagaagtgagagcagtcgccatcggagagctaacgaagcttcgtgaaagtcccaagagacgtggagacgatcgggagaggaaggagaaattgagagattgagatttggggttggtagaggaagaagaagaagaagaagagaaggcgatcgcgatgggaatcgcagaggcggcggctacgacggctgaagtcgttgccactgacctgagaattgatgccattatcttgcttcttcagtttttgcggctttttatttctgacctttcaacaacctttaaattttatcatttttaattaaaaaataaatcggttaatctggggatcactattactttggtaaattaatgtgcagtaattctgttgttattacaaacagttggtgttattaccttaaacgcaataatatttcagagggagtttattgatgatacaaaaaacagttttagccaaagccaggagggagttcaggatcttcttcatcatcattatatgcttctcctttgttatcttgtacatcatcactacatgcctctcctttgttatcttctacagctcctttaatcagctcttgcttctgtttactcgctggactggtgttgaaatcagttcttgcttctttttttggtgttggaatcttatgttccatttctctagcggatgttccgcgtttctcgcctctcgggttagataatgtggcgtagacggattgaacggtttctctgatttcattcttcatcccgtcttctgatcttattatcccccataaaccatctgagagctggcttagcatcttgctcctacaggaaacaatccaaaaaatttagtacgcttgtgtcataatcatttacaacaacaggagttagctgaatagaagaaaatccctcttaatttacccgacttcttcgaatatcgcatcagagagttgcctggttttcatattttgagcaccatgtcgtttcaaagatgttgactccttgacaactgatatcatattattccgtaaatcctcctgcaatccagtaaccgctttaatagtcagatcacaatgcaaacacaggcagtccagaagaacaaagctcaagatgtttatcaaacactgttaaaagaaaattccttgttgccttacataaacttctccggctaagaaagtagtaaccttcactcttatctaaatattctaccaagttgcgctaatgacaatgcccattcgatggataagtataaagactcctcaaagacaatgaacactataccagctataagtaagatgtcaaaccaattcacagtaagtgatactgaaattctgaatcagctatagtaggcctatagctgtgatctaacagcttaacaccattaagagaactctctcccctaggatctgattcatctaagaaaaactaaaggcatcttgataaactctccgaatcatcaatggtttacttacttccacgcctctaaagcaacttcagatacacttatcccaaaatcaaaatcaaatgaccaaactttccctatcttaaacaactggtattgttaggaatcccatattaacacaaaccttccctgagaccaagctcaaacttatctttgcacacaactaaccatatcacttgtttcaacactacaacagtacacacgaaacgaaaagatcaaattttttggagtgagttccgagaagctactgatgaaagtacctaaaaccatttatggaggactattgggctcagtctatatgaaccaaaagagcaaactttatacaaattctcaatcgaaatctctattactcaagtcaaactaacaaaagattccaatttgatgatcttttgaaacaatcaaaatcgactaatcattatcactggtcctaacaaagccacgaatgtactgggaatcgagagaatatgaaccctaattagaggagcaaggaaagaaaaacacacgatgtgcaatgcgaagacgacggagaaagagaaagagggcttacgttttctttgaggcggcgaatgattttgagacggagacgatcaaaatctccgtcgtccttaagcttctctacaacttcctctttgcttatcttcctcgccatacccatcatctctcactcttccttccttcctctggattttctatttctttccttttatttttttcaaaaagtcgtatttaataaaatcaataattttgtttgcatctatttaaattgtcagggcttcatgatgcatcatggatctacaaatcacaaattaaaccataattgaatagttaattagctattttatagttttaacaatattccttatctatttttcttttgtaattagtaaatttaacttttaaactcttgtgtttgaaccgatccacttgtaaaattatagtttgttcgtcttcattcacgtttatattttacgagtgacctttgctgaatgttgatgtatatatgttcatttaacataattgccaacatggtcaccaccatgttcatgcacaaagcacttcataatcataatcatgacacacgacacgattatgttgttatatggaacaagttcaaatggaccataagatgaaagtcagacctaatcctgaccccaatatctattccctttaattcattaaaatccaccaattattgcaaaatttggtatctttcaagtgtccacatcatccttcgaaattaattagactctaatttgccccctatatgaagaatttggaatattgaaatcgttcttaatcgaggatatataaataaataaatcctttaagatacaaaagtaaccgattgtattttttaggactctcatgtactccaacatttcatgatcttcatgtaattaacgtaatcgaccattatctttttggtaggtcttattgttcaagacttcagacatttatataaattagataacgttgaacttgtaagacacaacaaaagcaaaatagaaaaacatagttcgaaatttgagatgagtttgtataggaagatcgaaaaacatggttctaaagagagaaaataactgagagttcacttccaaggacatttaaatgagaagaagtgattgttttttattcgtgactacacatatctatatgactatacgcttaatttttaaccgattatgaccaaatccaatctcttaaaacaagagtaccacaaaataaagtaaattaaatgttctggtatgaccgtataaagtttctgtgatttataattaaccaacaacgatcagttttgctacgtgctcataagtatttagtatactgggtctttgtcccgaaaaagtataatcgataattcgatatgtaatgttacgaatcgtttacttagatgccatgcaatcatgtctagagaaaaaaaaatcattttcttagtgctattttaatataaataattatttaacttttgcttgaaattgacataaatcttaatataccaactttttcgtcgaccaaaataatataaaatataggtctatcattatatgtttttatcctaggctaggcggcctgaagaattaaataatgtatttcggcatctatggtaaactatataaatgacaacactttctctttataatacaaattggtaacctgaaaattactatgaactaaatcgattaatcgacaagaagtacttttttatatattggatgattttcatttgttttagattttctatacagttactaatagtagaaagtgttttgtatatgaaaattaaatgatgtatgtattgttaagaactagtcattgttttttgatatgtgtgaattttttaaaaaatcagtatttacataacataggagttaagaaactaactgaaactattttggctcaataaactgaaagttaaaatcatttcaagaacctagtgtcggatgaaacaaaatatatgaataaagcacattttaaatgtaagttgcatgttttgcgtaacaatatatattccctaataaatagccactaaatgtacagctcaagttaaatcgtttaaaatgcacaccttcgaaataaatctaatcgtttagtattagtatcactcactcaatcgtatctttcgaatagtttaacgttgttttctttgaggtcactaaaaagcttgtcttttcaaagaataagttgaaaaaaatggtcataagaaacaaaatcttggatggtataaaatgactaacagcattgctgtcgaaattctgcatcaaaaaacaagagaattcatatagtacccaaaaattctcttattaccaaaacactcccataaccaccaacaagaaaataaaaagggcatgaattttccagattcttcattgttcacaccaaattttgcttatgaaaatgatttagatttctctagtttgatcactccttcaacgcgtgtatcattccaagaacctaaaccatgtaatccagtcattcatagtgcagggattgagaacgatggaagacaaaactgtgagacgaccatgacattaagcgaaatcatgaaaggagacgatgagccgaagaacaagagagctaaacataaagagcttgagagacaaagaaggcaagaaaacacatctctattcaagattctaagatatttattgccatctcaatacataaaggtaagtaacattttcaaatttttcttatacaaattctgtctcatctcatgaagtcaaaaaatttctatagattatatagaagatccccttagtctaatcacggtaattaattaacaattgtgtaaatagggtaaacgttcctcggcagatcacgttctagaagcagtgaattacatcaaagacttacagaagaagatcaaagaggtcagcgaaaaaagagatagaatcaagagatctattactcatccatcatcaagaggagaattttcaataagatcattagcatcatcaacttgttcttgtgttggagacacgaacattgctgttgtggttaggccttgtttgatcggactagagatcgtagtaagttgttgtaacagacacgaatcttgtctatcaagtgttcttcaactcctggctcaagagcaatgctttaatattgttagttgcatctcaactagactacaccaaggattcatacacaccattgcttctgaggtaattatctataatctatcttcgatctgatttatgaagaaagagggagttaatctttatattttatgtgatgagagataaatattaatattttgggaaatttcttaaacttgtgtaggtcgaggagggaatagaggtttatttctcagagcttcaagaaaagataatcaaaattggaacctcaagagtcactactcgctagtcagagtttattaaacctaaaaattttatgaatttacgtcctaattaagatatatatcctcaaccattcccaccaccacaagcatgttgtgtttttagtttttagaagtttatattgttcaggatgtggatgctgtttgaattgttgactaatacaaaaaaaattatgaattgtttttttcctataacaagttgtatgaataatttgattaatgcaaaattttgtgaaatgacattttctaacgatttttgtaataatgaaatcgtataataagatagctcatattcattgatatttttttttattacggtgtaaatattactgaattatcgatacaaaaacaaaagtatgttgataaaaaagttgttagatgtatcatgcatttatgcaatctatctggtgttaggttgtggcatcttttgcttgcataataaaacatttttaaaacaatatcttgaattattttaattatcgcgagacaattaagaaaaccgcaacatttaaatatgtcttttttgcctcaatataaatactaatgacagatattaatattcttagaaaaacataagtatttgacagataaataattaattaagatgcttcagtttcaactaaacgaataaagaagtaactgtgaaagagcgaagaagagtcacacaaaaaaaacaatggcggaatcttcagagcctccggttgttctccttcaccgaccaccgtctctaactttcatggacgagattctgactcgtgaattccgtactctcatcaccgacacttcctcatcggaatcactcccgagcttcttcccccgtcacgcctcctccgccagagccttcgttatcagcggcagacttccggtaaccgatgaactcctttctcatctcccttctctccagattctcgtctgcactagcgtcggcatcgatcacatcgatctcgccgcatgcaagcgtcgcggcatcgttatcaccaacgctggcaacgcgttttccgatgacgttgctgattgtgccgtcggtttgcttattagcgttctccgtcgtattcctgccgccgatcgttacgtccggtctggtaattgggcgaaatttggggattttcaattagggtccaaggtttgttcgaaatcacaaactctcaatttcgaattctgatctataactgtagttagatgattacaaaggggaaatttaggttaaaagcgtttttttttattctgagtaaaatttgggaatagctttagattgtggggttacagataaagtagagctatgtgttagtaaaagtctttgtggtagtgacttgtgataatatttattgttacaggtaagtgggaagagagttgggatagttggattggggagcattggatcatttgttgctaaaagacttgaatcatttggctgtgttatctcttacaactcaaggagtcagaaacagagtagtccataccggtattactctgacattctctcgttagcagagaacaacgatgtacttgtcctctgctgctctttgacagacgaaacgcaccatattgtgaatagagaagtgatggagttgcttggtaaggatggggttgtgatcaatgtgggacgaggaaagttgattgatgagaaggagatggtcaagtgtttggttgacggtgtgattggtggtgctggtttagatgtgtttgagaatgaaccggcagttcctcaggagttgtttggtttggataatgtagtgttgtctcctcattttgctgtggctacaccagggtctttggacaatgttgcacagattgctttagctaacttgaaggcgtttttctcgaaccggcctttgctttctccggttcaattggattgagagagcgcccggtttgatcaggtagctaaattagttaagctattgtttattataatcaataattcaaaaagaaagtgtaatgaatatttgaatgtaccctgacattctctcccaaagaagaagaattaatgacgcatattatttaaataattctcccgcgttgcacatatgactaatttagtcggaacattacgattggcaatataatcataatgtttatgaataaccttttggttctaatgttattgtgaaaatactgttaaaacatgatttcatatattagtttatctttggaaacgtaaatagttgacaaacgacaatataaaaataaatgtctgctgttcaatttaactaatcattgaaaatacataaacgcacgtatatatagacattggatagagtcggtacacgtatcgtctatagaacctgctcgcacgtcaacttatactatattcaaaaacctcacttaaacaacaattgaccttttttcctaaattttattagtatttctattgaaaaaattcaatgaaatgaaacaaatcccaatcggtacggacaaaagtctccaataaaaaaggaattaaaaaaaaaaaggatagtgatccgcacgtagccaccactactgtcgttgaaaatcccctctatataagattgtctcaaattcgattacttcatcaaaaaacaaaccaaaaacaaaccctaagaataaagaaaaagaggctagaatgggtccaatctcaagttcttggagctttaacaaattcttctcaatagttttcgttgttttcgccatctccggcgagttcgtcgctggatactatcgaccaggcccatggagatatgctcacgccactttctacggtgacgagaccggtggtgaaaccatgggtacgtacacaacttcatttcacttctcttgcatataccatatgaagtcgatgatccaacgtttccagacatatatatccacacgattaacaaaaaaaaaaagtttatgaaaaaagtttccaaaatattttaccatggatacgtagtccatagcaatttttcatttgcattgcatgtgcattgaaccgtacctgaatcacaatatgtcacgcataagatcaatgatataataactttatgtatatatatatatatataatgtaggtggtgcatgtgggtacggaaacctttttaacagcggctacggactgtccacggcggcgctaagcacgacattgttcaatgatggttacggatgcggccaatgttttcagataacatgttcgaaatcaccgcattgttactctggaaaatcaacagtggtcacagccaccaatctttgccctcctaattggtaccaagactccaacgctggtggttggtgcaatcctcctagaacccatttcgatatggctaaaccagctttcatgaaactcgcttactggagggccggtatcatcccagttgcataccgaaggtatatatatactacacttagttattcaacttcatatattatattccaaaacttatatattttataatgtgattgatcatatagagtgccatgccaaaggagtggaggtatgaggtttcaattccaaggtaattcttattggcttcttatcttcgtcatgaacgttggtggcgccggagacatcaagagcatggccgttaaaggtagccggacgaattggataagcatgagccacaattggggagcctcttaccaagctttttcctctctctatggtcaatctctctctttccgggtcacttcttacaccaccggtgaaaccatctatgcttggaacgttgctccggctaactggagcggcggtaagacttacaagagcaccgctaatttccgttaaaactaggcttttgccctaccaaacgaaaacggagttttctcttctccttctttttttgttaagagtttcggtggccttttgttgtggtggcccggctttatgttatacatctacatgtatgtataatgtatgtatgtatctaattgtgatataactcttcttataaatatcatgaagtcaacacttcttgatcaagagaattcgttttgtttctgaaaattttgttatttgtaaattttctaccaataaatcgcttgcttttgtttagaagacaaattaaaggtcttgaaccagaatttggaacagagttttgaaaattgggaatgagtctatacatatatttccgtatacatctcagtttggtctaataataagtaccaaacagaaattaccaagaacaatacatattcagctattaataacatcgattagtaatatcttgattcatttcatttttaatataacgttttcccaaaacccctgatccgattcaaaaccctacttcttggtgagtctctctctcaagatcttcacacccatatacctgccaaaatcattagcctttagtaaaaaaaaacaaaaaacatcaacataattaatatatatgattgattttacctgccaagcatcataaccgtggcttgaggatttgtcccgggacaataaccaacggtcgacatatcaatgactctaagccggtcgataccaataactttataatccccatcgaccactctgcccacaacgcatcctccatggtaatgccaaatggttgtaactgtatgttggcaaaattcctctgcggatggaggcaacgaggctccaggaccactgcgaggcggccttagattgacaggagtactcgccgtgaggttaagtaaatactcaaatgacacatctgcgtacttatacctcgaaaaagctttagattgcacgactctctctatggtttggattcctcgaacacaacgttttaggtcgtcaggatgttggaaatagttgaaagtcacaatcgggttatcttttgggtttcgggtcttgagctctaaatgacccgttgataatgggcccattactttctctaaaaggaagcctccttgaaaaggttgggctgatgataatttggtcattgaatttgactctaataatgttgcccttggtgaaaacattgcatagtagtctctagtggaggacgatccactagaaccaccaccacctccgccaaaattttcaccaccggcggcttcgacatatgttccttccccggtaatcccaacaacctcaatgagtgagacctcaacggggactggagaaggaacgaacacggcattcatagggttgtcatacatgccttgacccacatgaggctggtccatcaccaccgtgatgttttgggcctgtaattgagccgatgggccaacaccacttagcataagaagttgtgggctccctagggttccggccgataggatgatctcactcaaggcgccttcctttaggtaagctctatgagcctgaccggtccggtctcggtacacaactccgttggctattggcttggtcgtaccttaaacgtgaataattatattggtaatttgatagttagttaataatctgatttagtggcaacaaaatgaattagaataaagtgtggtaagcaagaatttacatgaaatgtatagtgaaaaaaaggtagacattgattttgcaaaatatcaggttcaatccatattaagatgaaaaaaatttaaccatgtgaaaacaggaccaacatttttgtttaaccagcatgattgaatatattttagttttactacgttatgagtattggatgattatattctgcaatgctacattaagtacctcgagtacgaaacaagatccggtggacggtggcatgcaaaaggacggtaatacccttaggatcggcatactctaacaaatcggcggcggtgtgtctattgccgttgcggtcaaaaatagtaccgccaaatttggtgccattgatatgatcataggtgaaaccattattagggacaatcccagcctccaataagccgtctctcacggccgtttgccaccgccccatcggaggctgaaacgccaccttagcttcaacccactggtacgactcgttcgctagcgctccgtcccaacccatgttcctaacaacatttcgattcgtataaattatttattttaacgtggacacaccaagtcaccaaaaacatcaacaataagaaatatcttgtatgttgtactatgtaacgaccctaacagattaaatgactattctacatataagtataataagatcgttttctcttttatttttatttttacggcaaaaatcgttttctcttttattaagtgtgtgtgataatatatagttatacatatatttaatgttatccttagaccttagttgattgatcatataataatgtctacaattattactgtctcaccaaccatagtaagaatgaggactcgataatatattaatttccatgtaaattgtatgcatgcgtattagtgttactgtatacatatgcactaacctaacgtatttagtgcccgcacgtgtatagaagccggcgttgagagcgcttccgccaccgagaacccgagcacgtgcattaatgacaccatcttctgatacaaaacgctgagatggtgaggactcagacaggtcagagagagcggctccgaaagccgagagcctcgtgatgttggggttattgtacggtgagtcaccgcgttcgagcagcaaaacgctggcgttttgagacagcgttgcggctagagggcacccggcagtcccaccaccgatgatgatatagtcgtagtacgacgttgtaggacttcctgtcgcgtcccgcatgaaggagtagttcggagctgcgatcaaagggtaaaactataacttcgcactaatatgaatacttaagaatctagttgtagttcatgaatattacctttgtcagaagaacaaattggagaatggagaaaaagagagagagcaacaaacaatctccatgaccaaaatctatccatcattaatacaaattgagtttagcacaatctagagtagagttctctcactttgtatgcctatatgtatatgataatgtatgggttatttataaagtctttggtgacctatggtgaaattaatactcgaccttttcatcatatatatagctagaaacaataaagagtccatctaattctgaggaaatgcaacatcaagattctatgtctattttaatggacacgtgtcacctgaagaagcagataaataagacccaatagataaattaattaatttaatttcaagaaaatgcaagttagatgaagtatcatgagagaaaagaccaaatggccgataaaatttctagggaatgtaatgtagatattgatacacttaacctgtctctcttggatatgaataaagaaatctgaaattggaattaaaattagatactatatatttatgtaattgtgtttcagtgtgtgtaataccaacgtccattaatagacagttggttacagacttacagtttaaatgcaccaacattttcgttctcgatcgtgtgatcataataagccgaatatgttaggtggaaataatgattcataaattggtttcgtacgtttaaatgaaacgaaaattagcagtacgtatatatactccagttttttttttttttttttaattaccttattgatcatcactttaattcagcataaatgattatgacaatcaatctaattagcaaatgatcaggacttgtagatgttgttactgatatgtcttttgacgattccattgatatggaaaacccatattactgatatgtcttatcataactatatatactctctaggagaactttttgaaatagttaacaaaaatgttgaagtagtcgatatagatgattcatgattgggtcatacatcatgtaggtgtagcactcgcacatgataaggtcgtgtcattaactactctacagggtatacagtacagagtaacataattgtagattaattttgtatggtcaaggttgcacaattttttttttttttttccataaaaaatgagtcaaatttatgaactatgggccataatatttgtgccgtgtgaattcaattataaaagcaaacggactaaaaagcccatcatacattttcttcatccttttttcttttgtcatcccctcaagaacgtaaagtatagaaaaaaaaaaaaaaaaaaactattaaagtattccaaatctattcgacttgggataacgtaagtacgtaactcttagcataaaaatgaactgcatatatggttttataagtagaatcaaaagttttgatcaagaaaacaaaaatcaaaagtcaagaggaaaggaataatgctatataccaaaagtcaaacatataaaattccgaaatgaataacaaaataatagaaatagtggagtacacaatgcttgtacacagctcattaacatgaaatacagatggaggtctccttggttctcaaaagcatagacaaatcaactaactctaatgattaagttataaaaaatcatattataagtaggttaatcactcgagagtctcagacagcgaagcaaccagaaaagagagagagagtggaagacatataggtcccgcttgcaatgcttcgtacggtcaccaaattaacaagtggcatacttgaaatgggggctgtctaatttattatcgtcacgaactataaaaagcttcttggtgtgacgttggataagtttccctctacaccaaatccacaaggtcgaatcatttagaacctaatagtttactttccagaatgctaacaatttttttgataacattcatttccacttaagacagtatgtaatgttttcacatttatttattattagattaacaaaattctatttcatcaaaaatgaattttgtaagcaaattgaatatttataagggaacttataagttccaatattcatggatgaaatggcttctcgcgtcgccaatggcttaaccttagaattaaaaagtatgaagtaataggtataattagacaaaaaagtaagggtctgaattgtaataaaaaacttctcgtgaagtaagtaaacgcgaaactggttctcccggtaacaagttgacacggcatttttatttgaaagaagagaagaagaaagagagagagagaggactgggtctggtctcttcgctgcaacctatagctgttgtttgctcttcgacgggattctcactactcttttgccaaaaaaaagaggtatactttccagaattgttcaaactcttgatgaatttctctttagaaaaaactcatctttttaggttggaattgattttgttttttacatttcaagttgaagcagttggagagaactttatgctcttgttcttatctagattcctgcaagtttgttgctttttctttctgtagctaaatttaagtctctctagtgattaattcgatgcaatttaatgacccaattcgagagttttgtgtattccgtagaattttgagctcaaaattcttcatttgagtctcaatcgagttttggtgatgtgagttagttcttcgacctctgtagggaatttgagttatgggttttgttttcgattcactttcaagctaaattcgctttcattagtggaatgttttcatcaaagctggaatcttttccaatttcagttgctgtttactttgtggattactgcttaaatctgaggttttaagtgttgaaactttacagatcggaggttccgaaggtgaatgcagcttgcgatttcatagaaaagaagattcgtttgctggattaggcttatttgtgtatcatagctttgaggttttaactgagatttattgatagtggaacttaggttttcgagaggtgtgaacagttgggtatatgggtatggacatagctgataaggagaatacgagcccgcttttatttgaattctgcaattgctataaagttgcaagccttactgaaaccattctaaaccctgtaaatgtttccaacttaaaagatagatatgtacttggagaacagttaggctggggtcagtttggtgtgataagagtatgttctgataagttaactggagagaggcttgcttgtaagtctatatctaaagacagactggtaacacaagatgacatgaagagtatcaaactcgagattgcgataatggccaagttagctgggcacccaaatgtggtgaatctcaaagcagtttacgaggagaaagattctgtgcatcttgtgatggaactatgcgcaggcggtgagctttttcacaagctcgagaaatatggaaggtattctgaggttcgtgctagggtgctcttcaagcacttgatgcaagtggtcaagttttgtcatgatagcggtattgttcacagagatttgaaaccggaaaacattcttatggccacaatgtcttcttcgtctcctatcaaattggctgattttggactggcaacctatataaagcctggtaagataaataacactgacattttataagttatcaaatccaaaaatggagattgtgtattctaagaaatgggttttcgtgtgagcaggcgaaaagctgagcggaacagttggtagtccgttttatatagccccggaagtgttagcagggggatataaccaagctgctgatgtatggagtgcaggggttattttgtatattcttctcagtggagcgccgcccttttggggaaagactaagtcaaagatttttgatgctgtcagggctgccgatttgagattttctgcagagccatgggacaatataacttcatacgccaaggatttgattcgcgggatgctttgtgtggatccttcccaaaggttatcagctgacgaagttctaggtatgtcatttctatcgttttcgaaataatgatttgtttgaatgcttgactcgagtaagttatccatgttcctaaacatgtcaggccactgagatattactttaatgttgtctatggatttgtagattaaagcagagtgataatttttgtgtgcatttgtttgcagctcactcttggatggagcagttatctgaatcaggtcaagaacaatatgatcaggatgggtttggttgtgaaggattggagaatgggggatgttctttctccacacaatgcgtttctcgggaacaagactatagctttagcgttggccagttagagcaatcaacagataacgattttaaatcatcgttctcgacattcctacctgcggataacacactgccaaattccggttttgatgggttttcttttgatgggaaacaaccggaatcaaccacagctggcttctcatcaactggaattccctctatgccaagctttacctttttttgtacaagcccagcaaggacacagaacaacgacataactgaaatagatggaaaagttcgaggtacctctttcgcttttccttggcttacaatgtttggacttgatgattgctagaaatgtagagtcatatactttctaaatatggcaaggaaaataagtgaatcaatatctggaacagttgactataattgagtttgcattagtatcatcttctttcttggtgttttaaacggacatcagtcttgagctaatcaaatgatctgtgtcccatttttacagactcaagcccaaagaggttactgccttcaccagattcttcttcacaacttgagaggcgtgatgaagcaggggagaatcagacagaagcaggaggaaagtcagagacaagaagggaaagaggaaactggtcaagaatgtcaggtctacacagcaaaaggaacagaacaataggactaggcgagctagaccagttggtggtggatgttgcagtcacagagtcgataatcagatgggcatcttgcacgcatattcccaccgctccatctctcagattgtcgctcgtctgctagaagaagaaaacgaagaagacaactgttatcagtaaaatattgtatgtacacatctgattttgtccctgcaatgtctttgtttttgtagtaaaacttttccatggaaactgacctcaactgtataaaccaacggaaatagagtgtgattttgatctctttagagaagttattgttcgattatgagcaatttaaaaagtaaaagaaaaagcattgcgtctgccgggagtcgaacccgggtctattgcttggaaggcaattatcctaaccgttggactacagacgctgaacgagtgacacattgataaagtattatttatagttacataataactaaatattcgtttacttgattacttccattataacttagctgataggcgacacagactatagctgagctagatatatagatgtcacaaaacaaacttaagtgatacaatatcacaaattttattagacaagtgtgttcaaagttcaaattcttcacgagaaacattgtcaataaaaataaaagaacccaagaaaattaaaatgtaataagaaaccaaacattttcattgcatttgtacttattgatcatgtttcaaattgaattgccgaatgatgtttcgatttaaagattctaaactacaaagtaatacaaaaaaaaaaatctactttctaataacacaaatatactgaagataaaatgtgaaacgaactaagaattgagttttaaacatcttctctcgtcgtttattagaccaatggacgactctcttcatcgtcttccttctcaaacttaacccgttccaattttccgggtgtctgacccgaacccgaagatttggggtttgggtttggatccggaaccatcttgagaataatgcccataaagatgagtaacaatcccgtaccgtgctgttcagttaaaggctttgtgaatatcaaataggacagtaacagcgttaccgcttttctcgccgtcgttatctactccccaaaacaaaacaaaatattaattacattgttctacaaacacaagtttaaactctaaagtaatatatgtggcctaaacttgatatgatcgatgctttattagttactatacaaaaacgaaatgcaatagtaaaaatgatgaaagtagttttaccatagcggttgtggctgcgccaaagagtgcaatgagggatagaacggagacttgtccgataaatgtagccatggcttcgaacaccaacactccatacacatatggatgctaccaaaatgtcaattaagaaaaatgtaattaatcaactacattagtcaacgatcatcatataatgtctcttgtcatataagttaaggtggtgatcgaataagaattaaagtattgaattacattatgcaaagttcacaatcttatatgatcgccactatggattaaaggggatataggttgagagcatggttgataagaactaaagtattgaagcttacttgagcacatgaattccaagctgtgaaaagctctccagtaagaatcatcggtgcaagtaagaacggtaagccaactaccgtcgagcaaaacaacatctccatctaaaatcaaagagtaaaaaaaaatctgttacaagttattcgagaaagagggatatgttcaagagaagctgtacaaaatattacttgtgttgtctcaggattcatcgtgaagatagcttcttgtaagttaccaagaaaagcgtccatgatgagagcgcccgagatcatcataaccccaattatactgaagtttggggaggtatgggcatcagccaatgtgaataagatgagaccaattacaagtaacatagcagatatgtactcgtggacagggtattttcttctcaaccctggtataaaagctcccataaccataaccggcaaaacctagataacagaggaagaaatcaatgttaagagatactgcgagaattacacaatgattcaccaattaagaaaatgtaacatatcttgctaaccaatacccctgggattaaacaagaatgtgactttttaaattcctaccgtaacatttattgatacaaaatccatgtgagttcaaaccgttactgacaatgtaataatgtaaggagtctttgattacaaagccgagataaacaaatgcaatgatctatatatattgaacgaaattgatctcagagattaatctaaactttgatccctcgctcaactaatgatggtattggactataccatgcattacttctttttttaaataaaaatctatagtatatatatacaccattagttggttaagtgaaatattatataccttagtggatttgaacatgatttgagcaggataattgagataagccaaggagcctttggtgaggccatgagaacccataagaacaccagatagtttcacgtaagtcttccatggattaaccatttgcttcgtcctgaagccatacatgtaaatcaaggcaatgtacaccaatccttgcgcaaacgtgaaataccatccataactgcaacgcgcacacacacatattatacttcttctactattcgaattttaattaataaagatttgacttttaaattacctgaatttaagccggttgtacacatattcctgcaaatttgataagaagccaaaaaaagtgtgtattaaagatccgatattgtagtcaaataaaataaatctaaattttaataaatgaattaagcaaatacagaatctgaagatttttttttttctgtatttgtattaaatgtatacaaatctcagattcaacaaaaacaaaattgcatgcctaatcttcgcctttgtttccggtaaaagtctttgttctaatgaaatatttttagaagaagaacaccggattcatctcttaaccttaggaatgtttctcttgacaaaaagacagagaaacacaccgcatgcaaaaccggaattcccagacaaaatcaaatcataataaacgaataaataaaaacaattcatgaaaaatatcgaaaaaaatctctgatactattgatttggttatatcagatttattatttaaaaaaaaaaacgaacctcgcagatgccattaacgaggtaaccaaagaagaaaccagaagaacagatgagaaattgttgccatctgggtttatcagaaagaggaattccaaacagttttatcatttgttcttcgctgttagtcttcatgatcttgaaaaaaagaataaatcggaccaaggaatgttatgttagaaatgaaaaaaaaaaactgaaatctgattttctttttgttcctctctttgaagatttgggatttgtaaaagtgaaagagtcagtgatattgacaagtagatgaagaaaggtattaaatcaaatgaagaaagaacaaaagaattc

SEQ ID NO: 1117 - DNA, 106142 bp, Arabidopsis thaliana
aagcttgagaccttaggaagaatcagaaaccaagaagagtttgagcaagaaattggacggcttggaggtttgcaacatccgaatctgtcttctttccaaggttactacttttcctcaacaatgcagttgattctctctgagtttgtccctaatggtagcctctacgataatctacacctaagaattttcccgggaaccagctcaagctatgggaatactgatttgaattggcacagaagatttcagattgctttaggaactgcaaaagcgctctctttccttcacaatgactgtaaaccggcgattcttcatctcaatgttaagtccaccaacattcttctagacgaaaggtacgaggcaaagctatcggattatgggttagaaaagtttcttccggttatggacagctttggtttgactaagaagttccacaacgcggttgggtacattgctccagagttagctcagcagagtttgagagcgagtgagaaatgcgatgtgtatagttacggtgtggttcttcttgagctggttacaggtagaaaaccggtggagtctccatcggaaaaccaagtcttgatcttgagagactatgtgagggatttgttggagactggttcagcttctgattgttttgacagaaggttgagagagtttgaagagaatgagctgattcaagtcatgaagttaggactcctttgtacgtccgagaatccactgaagagaccgagcatggctgaggttgtgcaggttcttgaatcaatcagaaatggatttggatcatgatgaagctttttccctttttttgagcaaagattgcataggaaatgtgcagataagtttattcttttgggattttccagttttagatttacgtttgttcaatgaaattgttactctggtttacacaataccacaccgagaatactactattaaggatgagggaaaatagatcaggattacaaagttcattctacaggcgagatcaaactcctatagttatcataaactcatactttgtcacaaacacatttaaaatgttgagtttaaaatatcaaattgtgatcatctctctggacttgagtttagaatattcactctcagtatctcttagcaatactctgatttggaatctcatggctccttacgactcttttgcgaatccaattcaacaacattgaaccggtttagctggttaacttactaactcagcgaaacactgcgttttaataatttacctcttatccacaaaacgctgccgtttcggttgttatggttagtcggccttgaattcgttggctgcgacgacagagacagatatataagtcggaagccactagaaaaagacggtggcgttttgtatcgctgatcagatttcataaaccacgactgacttctcctgctcgccgatcagatctccgacgaaggtaacggattccgattgttgtaaccaatgtagaaaccttaaatgaatcggcaaattcccaagctaaaaatttgtattgcaagtttctgataatctctgcttttaaattcccaatgtattaattctgcgatttcagaactagaatcgatctctcatcttctgaattttggtttacgaggtgtaattaattggtcaaaagctcaaaatctgaagaatagttttaagtttacaagtctttttttgtgtgcagtttttgattaagagaggaagaagatggatcaaggaaggcaagtgttttcagtagatcttctcgagagatatgcgacaaagaatcgtggcatgattacatgtatggctgctgggaatgatgtaattgttcttggaacaagtaaaggatggattatccggtatgatttcggagttgggagttctaatggtatttgttcattttgtcattctttttctttttttttgtgcgaattctaattttgtcatttttgtttgttaattcagtagtgaaaaaatagacaaatcttttttctctttgggtatagatattgatctcgctgttggtcgaactggggagcaatcaattcacaaggtttttgttgatcctggtggtagtcattgcattgctacagtcactggtgttggaggagctgaaactttttatactcatgcaaagtggcttaagccgcgtgtgttgagccgtttgaaaggtttgctcgttaatgccgtggcttggaatagacagcagataactgaaggttatgcttttggtgtgatatgatgagtcttcttattgatgtttttctcacatggatccatattgattttgttttggtctttccctggattcagtttctactaaggagatcattctgggcactcaggatgggcagctgtttgagatggccgtggatgagaaggataagagagagaagtacatcaagtttttgtttgaattagaagaacttcctgaagccttcaaggctttgcaggtactaaaattttataccgagttggaattatatgtttcctccattggttcattattccaatcactgtcttttattgaaacaaatgtgtagatggaaacggccaacataagcagtgggatgaggtactatgtgatggctgtaacccctactcgactctactcgtttacagggattggaacattagaagtaagctaaactctgttctgttatgtgatgacttctgtacccaatgattttacttaggaacattaaatgtcatgctagtaaaatcaaatgcttatcatggaatgaaatggtagcattaggagataagtggaaggtcacaatatattattgaacgggatccattttattcgccaatggttgggcttcaaatgtcaaacatgattgttcctcctttcaaatttggcataaaaaaattagatataacggcttatagtttagctctttgttgcttcaaaatccatgatctttgccaagtgtgaattaacttttcttgcatttaatttctaaccactaagtgtttactccagtctgtttttgctagttataaagaacgagcagttcattttatggaacttcctggtgaaataccaaataggcaagtgcttgattaccttaggctcattttgcgtattaaagaaatcacaaagtgtaactctaccctcttaacatgtaatgtttatcgtttttcagtgaactacatttctttataaagcaacgaagagcggtgcattttgcatggttatcagggacaggaatttatcatggtggcctaaattttggagctcagcacaggtagaatgacagtaccaatgtccctctgaaattatttggatctttctatttgtttcccactttcatatttttggttattttgttctgtaatttaattgaaacttgttggtagttatccaaatggcgatgagaactttgtggagaacaaagcactcttggactactcaaaactgagtgatggaactgaagcagtcaagcctggttcgatggcactctctgagtatcatttcttgcttcttattgggaataaggttaaggtatgtgtaaacacatgaggttgatatattcctcgtgtatgtatcatttgatctggcttcatataagtgttttgtttcattaatatgcttactcattccttaattgtgggggtaggttgtcaatcggataagtgaacaaatcattgaagagctccagtttgatatcacctcagattcagtttcaaggggcataattggactttgcagtgatgcctctgctaacgttttctatgcatatgatcaaaattcgatattccaggtgtgtattggcttactcatttatgtggttgtaaaacttcctcagtaaatttatctgatatcttctgctttcacttctcattttcggctttggatatattctttaggtttctgtgattgacgaaggacgagatatgtggaaggtttacctggacttgaaagtctatgctgcagctttagcaaactgtcgtgaccctctccagagagaccaagtttatttagttcaggtgatcccttgacaccatcggttaagttaataggcattgatttaggtgccaccgtgtcatattgctgtcacctgcccatagaaacttgacgggaagaatctctctggttttgattatgtgtgattgggctccttctgttgtaggcagaatctgcattcaccgacaaggaatatctgcgagcagcatcattctacgccaaagtaatttctagttcctctgttttactttgttctttcatgatgtaattcatcattgacctggtacagtgttttctttgcagatcaattatgtaatatcttttgaggaggtcactttgaagtttattagtatcaacgaaccggtaaacatttacgtttgtatcgttgctagttttatttttataacataaagaaatctctaatccagtgcgtgctatttaggaaagaaaaatgtgtttcatttgtgggcttggaatattcactgccgtttgttccttatgtgattgcaggaagctttgaggacgttcttgttgcataagcttgataatctttcaaaggatgataaatgccaaataacgatgatatcaacatgggcaactgagctatatctggacaaggtttagcttttgctgtctctggtctcacttctcattaaacatagatttggaaaacatctattattcccttaattcctctcattgatttcgtccccgatttactttctgagttgttatatcttgttactctgtctcatattccttgaatgcgaatatagataaatcggctgcttttggaagatgacactgctatagaaaatcgtgactcggagtatcactcagtcattcaagaattccgtgctttcatgagcgattgcaaggatgaattggacgaggcaaccacagtgaaaattctggagaggtaaattccacaagtatcccaggcgatctattaaattctatctttcagtcagtgagcacactgaccttcatgatgatgtgtattgttttctgggataatatgttctcttaaatactgttttcagaacatctcataggataccttgcttgcggtaaacactttcttcttatctatctcttttttgttctcttgtagttatggtcgggttgaggaattggtatattttgcaaacttgaaggagcagtatgaaattgtagttctccattatattcaggtgaatggcatgaaatttttttcttttcttgattgatccatatagatacaacaatatcttacacagagttgttcagtttacattataagctttttctttgtccattagcaaggggaagcaaagaaagcattggaagtgctccaaaaatcttcagtttcagttgaactccaggtgtgtaaaaattagcattgggatcttgtgaaattatggagtctcccaatctttgttttgtcctgaactataatataatttgcacattccagtatcaatttgcgccagaacttattatgcttgacgcatatgaaaccgtggaatcatggatggccaacaaaaatcttaatccaaggagattaattactgcaatgatgcgttactcgagcggacctcatgcaaagtaatgtcccacatcttaactactgtatatttctattcacgttgtgttactaatctcgccaataaatcctccaaaaaaatttcaggaacgagacacatgaggtcatcaaatatcttgagttttgcgtccaccgtctgcataacgaggatccagggattcacagtttacttctctcattatatgccaagcaggtttggttgctttccgtctacaaaattctttgattacctgaaaatttagacgtctgtaagtaatctgcaaagcatatttaggattactgtctcttttctctttttttccacttgtaagactgtgagtccgtgacaagaggttgctaaagtgataaataatggttctctttatatatataattaggaagatgacggtgccctcctccgttttctgcaatgcaaatttgggaaaggacgagagaatggtcccgaatttttctatgatcccaaatatgcattgcgcctatgtctcaaggaaaggagaacccgtgcctgtgtccatatatacagcatgatgtctatgcatgaagaggcagtagcccttgctcttcaggtaagaaatccatttaataacaaaagaaaagtatttttcacttccttctcctacgtgcgatctttaacttaaaacgttttttgaaacaaaattgttactgaaagccatattttatgatgccagtgtgcagagagtttggttgatcatttgaaaacggtttctgttttacagattgatccggaacttgctatggctgaggctgataaggtcgaagatgatgaagacttgagaaagaagctgtggctgatggttgcaaagcatgtcgtcaagcaggaaaagggagctaaaagggaaaacatacgaaaagctattgcctttctcaaggaaactgatggccttctaaagattgaagatattttgcctttctttccggactttgccttaattgatgacttcaaggttagtcaacgtttcctcttttccagacacacacgctctggcttgggccaaacaagttgcttctgttctcttgtaattttcttcaatacgcttttgcaggaagcgatttgctcatctctcgaggattacaacaagcaaatagaacaactgaaagaggagatgaatgatgccacacgtggtgcagataacattagaaatgatattagtgcgctaactcaaagatatgccgttattgaccgcgacgaggaatgtggggtatgatcatcctaagattgagtagcctttatctagcgtctacctatttataaatatgaatcaatgttttccgaagcaccaaaatcactagcacacctgatccttttcaatgttgttaccaggtttgtaaacgtaaaatcttgatgatgagcggtgatttcagaatggcccagggatattcttcagcgggaccattggctcctttttatgtctttccttgtgggcactctttccatgcacagtgcctgatcacacacgtcacaagctgtgcacacgaagagcaagtaagtcttgaagcataagttcttgttatgagttccctctatctccttctgcatatagatactgcaaattttagcaatatttgttcgttattgtgattccattttttgattggttttcccaaaatctgtctaggccgagcatatactcgatctgcagaagcaactgacattgcttggaagcgaaacccggagggatataaatggtaaccgatctgatgaacccataacaagcacaacaactgcagacaaggtagggacattttcttttccttttttaatcttttctttaacatttttctgtgacctgacatattttctttacggtgaggcagcttcgatcagagctagatgatgctattgccagcgaatgcccgttctgtggagaattaatgatcaatgagatcactctgccttttattaaacctgaggattcacagtattctacttcatgggacctccgatcagagaccaacttagcaaaccagaggaccatttctttgcctgtttgattcatgtcaaaccgtgaattctttcttgtgtgatctcttcttcagctagctttgaaatgtgaatgtgatttttgggttctgtattattgatgtagtattactattaaacatgcttctggagatacatacaatatgctatctcacctacttttgtctctatatctaagtgtttttctgaactattatttcgatctaaaagatacttctgtattccatgattttacatcagtgatgcgactcttcctctgcttcaaaatctttttctgcagatattttcttcgccagagcctgcttggtccagcgcttcaagtcataagctcttttaaaaggcttcttctccctggtaagtttcctctttgtaatggcaattgcaagatcgtttgggaacaacgtttgccagacaaaggcgtggagaagcgtggagacaaacaaaacgcagaccatcgctgtggaaatgaaggaaagagtgagtgctagagcccggctcgggtaaccaggtactgcctctgcatactttattgttgctacggatgctgttgtcataggaaaagtatatgaccaccacgccactgagaacctgcaaaaccccgtagccacttagtatcatcaacatatatcttcaaccaagaatatttaaacccgagatggacttacttaaatccagtgaagaaattgatccgagcaactagggatatgtataggaagagtgcaatgaagaagcaagttcttgaacatccgtcgaattggccatatatcgtgttccaagcaatacttgctgctgatggggcagcaatgaacatagagtaaacaggatgaagctctttaggaagagcttcactggtgggaagtctctgataaagtgttacaaacacaaccaagtaatgtgcaaaacctactgcccatagaaacttagctacttcatcccatccaacttttgaagctaagatggccccgacgaaattccctacaacagaaagatgagaagatgggtttgcgactttgcatagtcgcctcttccctcccgaaagccattgcccgtagatctttagctcgaggaagaaataaggacccatgaaaacacaccaaatggcgggatggaggtattttcggtttggtgagaacatgggaggtacgctaatggctaggaacatgcaaaccacccaaggagcgaagaagaagttgactcgaacaggatgaaaatactctcttttgacagcttcaaagtagaagatgcatttgagtatgtaagtgaaggacacagagactaaaactaccagtgaaaatagccatacaactaagttaatcaatggtgtgatgtgtaaaaagtttgttgcaggacttttcgctagggcaagccacaagacagcttgactgctaagtcccaaacagataccgaagcatccaattgggaaccttaggagaaacggccattgctcctcttttggaagcagaatatcttcattgtcctgcaagagagtacaattggaactaactgataattaagttttgaagagagaaagagaaagaagaagagttgttaccttgacttcatccaattcaggtcctctaagagcagcaaagtatcttcctgcagaaacattttcatttatagaatcatctttggtctcaccatcttcagttcttaaagaattctcaatgtctctctcccttattatagaaggcaataaagacttttgtttgctgagcgttgatttagtcctaaacatactaaaatctgttttccgaccatctccaccgttgatgattccacctgattcaaacccgccaaagctacgaccactcctcggtaaactctttttgtcatctctttctctagattctctgttgagcactgagaaacctgtctctagcgaaacctgtctgctaaaacctctgaatggtctttgtttccctcggtttggtcctctgtttccagagaatctcttgttgttgttgttctcttgctgttgcagttcttgctctgcttcatcttcaacttcattgatgtcggcgaaagtggaatgagcatttgactgtttcctctccattgatcagagcaatttgataatttgaaacacaagagaagatatttttcttctagtatggaaaggaaacatgttaatgtatatagaaagatgcaatggactaagttaaaaaaagcaaagtttgtggttaaggggcacgagaaagcttggtgaatggtgtgagttaatgcgtatgtgaaccaaaactttcctggaaagtttcttaggtttctcgtgaaagcttttcgatccaaactacttggaaaaggtgagagacgatgaaaaaaaaaaaaaaaaaaaggccgttccattagtcacgagattcaaatgcaaccaaagtcaatttgctcttttctatacaaaacataatttgagtcgttaattcgatttctgttagctcctcttgtttggttaaaacttataaacttaacatataatactaacattttggaaaaaggggtcgaaagattaaagcaaccaaacatatgtgcagaaatatgaatggcatatattcttcttctttgtaagagatttttctatgaatttcgttccaaaatgctttacgttttccctttatccaaacaaaaaactttgatcaatgaactcaaaataatacaaaagtgatataataaatcatcaaatagcctcgcatggattaggagtcataggaccataagacaaactcacataagccgtgattattttcacaacttcttgaataatatgatacaatctataatttataatttataatgtttgtttatgaatcaggtttaaaacaatattcggactgttgattaataaaaaattacaaatataagctaagcttgagatcgaaccctcacacattgaaggtagattgccacagagatgaccactataccgccacaagttttgtaagagtaacgcccctaagttgttctaaaccttggcatttatagcctgtagtttttgtttttatagtaaacaaaaagttgtaatgtaaccttacttcatatagctctaacaatatatgagtgttgtgaaatgggaatacttatgggattagattgttaaccatatatataaggtttgagatcattagggtgtgtttacaaaatctatattcttgcaatacctaatgttttcaaaacccacaacattagtgaagaattattgcatgaatctcttagacttgcaaagtagattcttatttagcgttcgtggctttttggttcgacattattggaagcaaccggaaagcaggcagacccagtcagaatagtggtgggtcccacgatgtgtcgaataatatatatctgatcctgaagacaagatcatgaccgtcggtttaaaacacgtaattgggttccaaggctttatgaaaaccctagaagtaaaagggaaaaccgaaaaacagagagatagggttcaaagcggttaggaagatcctttttccttaaggaaaaggaaatcaaggataaagaagaattattcttttcctggttataaataagcaagcccctgttcaacaaaacaatcacaaaaagaatgtcaaaaaagcaacgctgcttgaggatggaatcgctgccccacgaggtcgtagagcgcatcctagagaagacttgctgtggattctctgctgagattcacggctgtatcgaaacaatggaaatcatcgatcgaatctccattcttccaacaaagacaattgacacagcgtcagcaatcaggtgatccagctcttctcatggtctccagaagtcgtgaggattattttaacccggatttaaaacatctaactacactggtgttgggttcatcatcatcggtcaccatccctacaccttgggagaaggacaaggagaaggagaaggagaaggagaaggaggacgaagaattcttcttagtttcttttgatagctgtgacggtctcgtttgtctctacaaatactggaaatctggttatgtggtcaatcccaccactagatggtatcgccctcttcctctctctcaattacaacaactccttatcagcttaggtcgcagtgtcttcgagcttggatacacagtctgtgatattggattcggtaaagacaaaatcacgggcacatacaaacccgtttggttatacaattctttagaaattggccttgaaaacgctactacatgcgaggttttcgactttaacaccaacgcttggagatatgtttctccgaccgctccctatcgggaggaaaccaaaattctatctttcgatcttcacactgaaacctttcgagtggtctctaaagctccttttaccaatgtaaaagcttttgatatcgtcatgtgcaatctcggcaaccgcttgtgcgtttccgagaagaactggcccaaccaagtgatatggtcattcaattcaggcaacaagacatggcacaaaatgttttccattaatcttgatgtaacttctcattggtttggtaatcacatagccgcggtcatgccactagcacttttttatgagaagaagaagaagaagaagttgttgttttattgtcgtgtgcgaagtcgaacattgatggtatatgatcccgaaaccgaatcatatgatgttgctttcaatgattactccatcggttatcctctttgttatttccagagtttaatctctatttcataaatctgattattgccaatgtattatggtgtaataatctttatttctttttccatccaccgtttctttgtcagttttgcaactcttaaagagatgattatgatatatccagagtctttttttaccaaggctgctttttatgcttctagtttatctcactcagtttacttccttacatccttttcagtgatcgcaatatgctctggagtctgttaagtttaaactttggcagacacttgaatgacagaatttggtgcaaaaaggtttaaacctgcgtagacaggacttttcgctaaggcacgccacaagacagcttgactgctaagtcccaaaacatataccgaaacatccaatcgggaaccttagaagaaacggccatagctcctcttttggaagcagaatgaagataatgaagatattaaagaaaaaaaaacaaggccgttcccattagtcacgagattcaaatgcaaaccaaagtcagtttgctcttctgtctacaaaacataatttgagtccgttaagttggaccggttcggtttagttaattcgattgctttttgctctcttgtttggttaaaacttataaacttaacatataatactaacattttggaaaaaggggtcgaaagattaaagcaaccaaacatatgtgcagaaatatgaatggcatatattcttcttctttgtaagagatttttctatgaatttcgttccaaaatgctttacttttttatatgcaatttatgagaatgagaccacaacaacttagattggtgtacatatatcaaatgaaacatgtaatataacagtcctataactacttatagaaacctaattaaactattacgtagtgttaccaccttaaaaggttaacaaaccttgacaagtaagtctaaagataaacttaacctacattagctaacatatcatcatcttttcaaacccatttaatactgattaaatcctagatgtcaggttgcttcagctgagaatagcttgattacccaattatattaatcaataaaaatgtgtgtgtgcctaacatttttgtaacaaagaacgatatcttatgctaagctcaataggttttagatcaaaataataattccaaatcataataagaatacatgatctagaacaatatgttacaagtgaattaatgagcaagttgccaaaaaaaagagcaagttgccaaaaaaaagagcaagttgcttaagaaaggtgtaaatttaacccaccagatgaaaatgcgatttcgcctaacagaaaagactcgaatcaaaagtagaaagaaatttattattttgactattttcctcactatgtttcgataattttggtaagacaaactataaaacataatagtacaagaaaagaaaaaactaaaagaaagtaaaataaaataaagatacaatcttatttcctttaattatgctccctactttttcacttttgttacataaatatatctccacttttcttttcatagtttttccccaatctcaaccatttacaattaaattgattttccccctctcaaaacgaaccaaaccggttccaaacaatagcagaattccaaagaatcaagaaactaaaccgaaaaaaaagaagtaaaaattaaaaagtaaaaattacttcaccggtttaaatccaataatctttctcttcacacttttcacttctggtttagcaatttggatctcttcctagcttcgctatagagaaccacacccataatcgtcacaccaaatccggctattcccatcaccgtcaccggattcctaaatatcaaaaccgagactccggcagccaccgcagcttttccgttccccaaaacctgcaatgtgagagcacttgtatgctttgtcaccaagaaattcgtcaaattcactaaatatgccactgtcgcattcccggctaacaagaagatgatcaatggatccgtcctcgctttctcgattagaactcttaaaacgtttccttcaatgtatagcgtaaatggtagtaagatacaagccgccattggagccatgtatagcaaaagattcatagaatgtagcttctccgattccgacgtcagaataatcccctacaaaatacacaaaatccggttcaaccaaaccaatagtgagatccaatagacgcaattcgatcataccgatcgattagaatctgaattatctgtttaaatgctatagattgaaattcagacagagactgaactaaaccggactcatttcagttctaagaataaaaaccggattcgaactggaactaaatttcttccagatttgttataataaacctggattcggaaaaatttaagagtgatgttttgtaataaaatcgaaattcgaacgcaatttctgattctcttagtactaaaacggaaaattcaatacaccaaaccgattaatacctggacgacggatttgagagctctaccggcggtggaagcaacacagataaggaaaccaaaaagatgaaaagaaggttcagagttagaagcaagaacgatgccggagacaaccggaagaagagctaaataaacttcagtggactctgttttacaagtaatgagaaaagagaacacggcggtgaaaaacggcgtcgtagctccaatagcttgattaaaagaaacagggatataacgtagcgaagtgttgccacagacgacggagagacaaaagatcgctgacaaagagaggatctttagaaactgacggcgagataagatgtgctgacgtggcacgattccggcgatattgattacggcggagctataggcggcgcatgataacatgtgtgtcatggtgaggaagattgggtaacggaaaccgtagtagaagagaaggtatttgtttaagaggaggactcctatatttgagccaaaccaggcggcgattatagccgccgtgaggattgttggtgatacggtgggggaagagaggaagaagggtttgagtggtgaagaagcggaggagtgtggtggtgttccggggatgtctacgatggttggtgcggcggttgcggcggcgtcgaatctaggattgctcatccgccgcgttgtccatgattgagcttcaaccatttttcggataggggcgaaatgggaataacaataagtttttcttctttctttctttttctagagagagagagagaaagtgtgagtttttatctttttcggtggggattgagatctgagtgagtgaagaagaagaagaaggaagatgattaatcggacggtggagattcagatttagctgtaaaggtttagaatgatatcagccgttggatcttatagttggagggaattgttatatttaaaaataaaagaaaaataaataaaaagacaaatctaagaaaattaattttaagattcgaagtcttgtgttcggagactaagcatgagtcagaagtgtcggtagtaggtccacatttgagatccgatggaagcaatcctctatgacgcagcctaatttgtaattacatacaaaccccactcactaattatttagcctctcttttcaagttttgtttttaataattgtcccttaatacaatattagcaatagttgaaacacacattagcctaacattaacattccagaacacaccaaaaattaaaaaatctcaactaacaaagttggataagtcacatttatatatggttacatcaaaacaaatgcgtcggtgttgaccagatttagactctctcttttttgggttgattatatatgtttagatttcaaagaagcatttgaaactatttacatttgacaatagaggtcgtacattttaataaaggttgtcacaaataccaaaatctaatcagatctgtgaagtaaataacgcgatttttcttttgcatcagcattaatcacgcattgtgtttatcatcgaaatgactaattgactatataagtcatctaaatatattaatagatttgttatgtcattcaaagttcaataccaattatggtaacaaaatagattataaaagggatattataattcgagaaaaggggacttggccaatagaatgcattattctttgctactttctgcaaaatattttctttatcgcattgcatagattaaattattttatacgttcattacttgccatttttcccactgatcatgcatgcgattgctaatatctaaggtgataataattttgttaggtgacttttgtgaattcgacaaatatatccttcatgcgaaaggaaaaaaataacatggtggataataaatttgataagagccatattaatgaattacaaaaagagaaactgttcgttgacaaaaaaaaatgtcccacactgaaaaggaatccaaatatgaaagatgcaacacagaaatcatgattttctacgagtgtgtgtaataggtaagagctatctttacttagaaggaccagctcactttatctgtcttctttgcattccctaaaaaaacgaaatgactccttttgtaaattgccgtaagacaaaatccaatgaatgataataaatgattacagcacgtcacttagtaagaaacatttagaatgatgaatgtctacgtatacttatgatatcatcaaatcaactaattcactagctaaagctaatccttttatttatgtagtagtttagactaaataaataattatgtatcgaccttcataaattaaaaccaaaaaagtatgtatggctccctaataaaaaaaccagacaacagaaattacaccaaaatgtttgaagtttgatgttctgtctaaccattactatttagtttaatactacaaagcaatcaatttttaatgtaagaaaaaaacatagtatataataattcatctctgacaatgtgagattttattatttgagagtagtttatagcagcacataacatttcacatgttcttggaattcaaaattctatatgatttaaatacttcttacgtttaccagaataaattatgtagggcacaatattgtaggaaccatttgtttccatgtgcgacccaattttagtgggccaaaaacagtgaaactaaagctagttgctgatagggcccgcgtgacaacgaaacattatctaaaacatttggtctatactattacaaaagcaaaatggcttcgcccgggttcgaaccggagaccttcagtgtgttagactgacgtgataaccaactacaccacgaaacctgttgaacattgattagatacacacaatatatagtatagtgatcaaattctgataggggctcaacattagttacgcaattgaaagtacagagagttttggtacaaaacaaaaagcttgtgttgtttcaatataaacctcaagttttgatacaaaacaagttctcaatcactaaaaaacgtaacgttttataaaatgtatggttgttgacttgttattaaaccttactggccacgaaatcgctgtttgtagcttcccatatgacagtaccatcacaagaacaaagttttttgtagttttctccaacccctgcgcttctagcaatcactgcggcggtcaatccggggcctgacttattatcatcggtcttgtacaccacgacggctctcccgataaggtctgcaaccttgagtttctctttctttcccgaataaaaggcctctccgtttttgtctgcctctagtgttcccaggtctcccaatggctgacagaagaaaaagagagtttttagaggattgtgatgacattttcgttttctaagaatgcgtttcaccaacctctgtgccagtttgatcttgaaatggattgtacaagctccctgtgctggctgctccgtttgtgagatctccatactcgttgatacaccagctgtgggttccgggtgacaaaccggtaaagttggcttcgattcttgcaagttccatactgacctgagcaaatcggactaccccgaaaatgtcagggcctttgaattctgctactgcagctgagactaagaaatctgccaaaacacatcacaaagtaaatatcataaaacaaatgaggaaagaggtcatcaatgaaagacaaaccgtggaattgaaacggtaaatcctcaaattcaatactgtcagtgtattaaagagtagctcaagaatggaaaattgccagtacgtaaatcttcttaatgttgaactaaacataaacacaagccatgtactccttacatgttctatgagctgagaaaatatatcttctttcttttgatgttcaaatctttcttctcaaacaaaaaccaaagtgacccgagaagagatatctaaccttgaggaacaccttgtccaattaagcgagcttttcgaccagtttgctccaaagcttgagtcatagccttaacaggggaagatccaagtatcctcacaacttgattggacaaatccacctccactttctcaataccttacaagattaaaaatttccattacacataataagcaccaacaaagtaaatcataaccaaacagacgacgattaataaagttgtttctcctactaccttcaatggtttctaatttgttcttcacagcattaacacaaccctcacatgtcatatccaccataaactcagtctggaacacacaacacaagttctcactagctcaaatccaaaaattgttgtataaagatacaggattacgagaaagacttacaagaagctgaggcatggctcgatcctcctgcaaatcaaattcagctacttaaatacttaatcatcgaatcaggaaagcgaaaaagctcaaattggaaatagggtatttcaaaagttcaaagctttaaaccaaaacctgatggagattacgatcagaagtgagagcagtcgccatcggagagctaacgaagcttcgtgaaagtcccaagagacgtggagacgatcgggagaggaaggagaaattgagagattgagatttggggttggtagaggaagaagaagaagaagaagagaaggcgatcgcgatgggaatcgcagaggcggcggctacgacggctgaagtcgttgccactgacctgagaattgatgccattatcttgcttcttcagtttttgcggctttttatttctgacctttcaacaacctttaaattttatcatttttaattaaaaaataaatcggttaatctggggatcactattactttggtaaattaatgtgcagtaattctgttgttattacaaacagttggtgttattaccttaaacgcaataatatttcagagggagtttattgatgatacaaaaaacagttttagccaaagccaggagggagttcaggatcttcttcatcatcattatatgcttctcctttgttatcttgtacatcatcactacatgcctctcctttgttatcttctacagctcctttaatcagctcttgcttctgtttactcgctggactggtgttgaaatcagttcttgcttctttttttggtgttggaatcttatgttccatttctctagcggatgttccgcgtttctcgcctctcgggttagataatgtggcgtagacggattgaacggtttctctgatttcattcttcatcccgtcttctgatcttattatcccccataaaccatctgagagctggcttagcatcttgctcctacaggaaacaatccaaaaaatttagtacgcttgtgtcataatcatttacaacaacaggagttagctgaatagaagaaaatccctcttaatttacccgacttcttcgaatatcgcatcagagagttgcctggttttcatattttgagcaccatgtcgtttcaaagatgttgactccttgacaactgatatcatattattccgtaaatcctcctgcaatccagtaaccgctttaatagtcagatcacaatgcaaacacaggcagtccagaagaacaaagctcaagatgtttatcaaacactgttaaaagaaaattccttgttgccttacataaacttctccggctaagaaagtagtaaccttcactcttatctaaatattctaccaagttgcgctaatgacaatgcccattcgatggataagtataaagactcctcaaagacaatgaacactataccagctataagtaagatgtcaaaccaattcacagtaagtgatactgaaattctgaatcagctatagtaggcctatagctgtgatctaacagcttaacaccattaagagaactctctcccctaggatctgattcatctaagaaaaactaaaggcatcttgataaactctccgaatcatcaatggtttacttacttccacgcctctaaagcaacttcagatacacttatcccaaaatcaaaatcaaatgaccaaactttccctatcttaaacaactggtattgttaggaatcccatattaacacaaaccttccctgagaccaagctcaaacttatctttgcacacaactaaccatatcacttgtttcaacactacaacagtacacacgaaacgaaaagatcaaattttttggagtgagttccgagaagctactgatgaaagtacctaaaaccatttatggaggactattgggctcagtctatatgaaccaaaagagcaaactttatacaaattctcaatcgaaatctctattactcaagtcaaactaacaaaagattccaatttgatgatcttttgaaacaatcaaaatcgactaatcattatcactggtcctaacaaagccacgaatgtactgggaatcgagagaatatgaaccctaattagaggagcaaggaaagaaaaacacacgatgtgcaatgcgaagacgacggagaaagagaaagagggcttacgttttctttgaggcggcgaatgattttgagacggagacgatcaaaatctccgtcgtccttaagcttctctacaacttcctctttgcttatcttcctcgccatacccatcatctctcactcttccttccttcctctggattttctatttctttccttttatttttttcaaaaagtcgtatttaataaaatcaataattttgtttgcatctatttaaattgtcagggcttcatgatgcatcatggatctacaaatcacaaattaaaccataattgaatagttaattagctattttatagttttaacaatattccttatctatttttcttttgtaattagtaaatttaacttttaaactcttgtgtttgaaccgatccacttgtaaaattatagtttgttcgtcttcattcacgtttatattttacgagtgacctttgctgaatgttgatgtatatatgttcatttaacataattgccaacatggtcaccaccatgttcatgcacaaagcacttcataatcataatcatgacacacgacacgattatgttgttatatggaacaagttcaaatggaccataagatgaaagtcagacctaatcctgaccccaatatctattccctttaattcattaaaatccaccaattattgcaaaatttggtatctttcaagtgtccacatcatccttcgaaattaattagactctaatttgccccctatatgaagaatttggaatattgaaatcgttcttaatcgaggatatataaataaataaatcctttaagatacaaaagtaaccgattgtattttttaggactctcatgtactccaacatttcatgatcttcatgtaattaacgtaatcgaccattatctttttggtaggtcttattgttcaagacttcagacatttatataaattagataacgttgaacttgtaagacacaacaaaagcaaaatagaaaaacatagttcgaaatttgagatgagtttgtataggaagatcgaaaaacatggttctaaagagagaaaataactgagagttcacttccaaggacatttaaatgagaagaagtgattgttttttattcgtgactacacatatctatatgactatacgcttaatttttaaccgattatgaccaaatccaatctcttaaaacaagagtaccacaaaataaagtaaattaaatgttctggtatgaccgtataaagtttctgtgatttataattaaccaacaacgatcagttttgctacgtgctcataagtatttagtatactgggtctttgtcccgaaaaagtataatcgataattcgatatgtaatgttacgaatcgtttacttagatgccatgcaatcatgtctagagaaaaaaaaatcattttcttagtgctattttaatataaataattatttaacttttgcttgaaattgacataaatcttaatataccaactttttcgtcgaccaaaataatataaaatataggtctatcattatatgtttttatcctaggctaggcggcctgaagaattaaataatgtatttcggcatctatggtaaactatataaatgacaacactttctctttataatacaaattggtaacctgaaaattactatgaactaaatcgattaatcgacaagaagtacttttttatatattggatgattttcatttgttttagattttctatacagttactaatagtagaaagtgttttgtatatgaaaattaaatgatgtatgtattgttaagaactagtcattgttttttgatatgtgtgaattttttaaaaaatcagtatttacataacataggagttaagaaactaactgaaactattttggctcaataaactgaaagttaaaatcatttcaagaacctagtgtcggatgaaacaaaatatatgaataaagcacattttaaatgtaagttgcatgttttgcgtaacaatatatattccctaataaatagccactaaatgtacagctcaagttaaatcgtttaaaatgcacaccttcgaaataaatctaatcgtttagtattagtatcactcactcaatcgtatctttcgaatagtttaacgttgttttctttgaggtcactaaaaagcttgtcttttcaaagaataagttgaaaaaaatggtcataagaaacaaaatcttggatggtataaaatgactaacagcattgctgtcgaaattctgcatcaaaaaacaagagaattcatatagtacccaaaaattctcttattaccaaaacactcccataaccaccaacaagaaaataaaaagggcatgaattttccagattcttcattgttcacaccaaattttgcttatgaaaatgatttagatttctctagtttgatcactccttcaacgcgtgtatcattccaagaacctaaaccatgtaatccagtcattcatagtgcagggattgagaacgatggaagacaaaactgtgagacgaccatgacattaagcgaaatcatgaaaggagacgatgagccgaagaacaagagagctaaacataaagagcttgagagacaaagaaggcaagaaaacacatctctattcaagattctaagatatttattgccatctcaatacataaaggtaagtaacattttcaaatttttcttatacaaattctgtctcatctcatgaagtcaaaaaatttctatagattatatagaagatccccttagtctaatcacggtaattaattaacaattgtgtaaatagggtaaacgttcctcggcagatcacgttctagaagcagtgaattacatcaaagacttacagaagaagatcaaagaggtcagcgaaaaaagagatagaatcaagagatctattactcatccatcatcaagaggagaattttcaataagatcattagcatcatcaacttgttcttgtgttggagacacgaacattgctgttgtggttaggccttgtttgatcggactagagatcgtagtaagttgttgtaacagacacgaatcttgtctatcaagtgttcttcaactcctggctcaagagcaatgctttaatattgttagttgcatctcaactagactacaccaaggattcatacacaccattgcttctgaggtaattatctataatctatcttcgatctgatttatgaagaaagagggagttaatctttatattttatgtgatgagagataaatattaatattttgggaaatttcttaaacttgtgtaggtcgaggagggaatagaggtttatttctcagagcttcaagaaaagataatcaaaattggaacctcaagagtcactactcgctagtcagagtttattaaacctaaaaattttatgaatttacgtcctaattaagatatatatcctcaaccattcccaccaccacaagcatgttgtgtttttagtttttagaagtttatattgttcaggatgtggatgctgtttgaattgttgactaatacaaaaaaaattatgaattgtttttttcctataacaagttgtatgaataatttgattaatgcaaaattttgtgaaatgacattttctaacgatttttgtaataatgaaatcgtataataagatagctcatattcattgatatttttttttattacggtgtaaatattactgaattatcgatacaaaaacaaaagtatgttgataaaaaagttgttagatgtatcatgcatttatgcaatctatctggtgttaggttgtggcatcttttgcttgcataataaaacatttttaaaacaatatcttgaattattttaattatcgcgagacaattaagaaaaccgcaacatttaaatatgtcttttttgcctcaatataaatactaatgacagatattaatattcttagaaaaacataagtatttgacagataaataattaattaagatgcttcagtttcaactaaacgaataaagaagtaactgtgaaagagcgaagaagagtcacacaaaaaaaacaatggcggaatcttcagagcctccggttgttctccttcaccgaccaccgtctctaactttcatggacgagattctgactcgtgaattccgtactctcatcaccgacacttcctcatcggaatcactcccgagcttcttcccccgtcacgcctcctccgccagagccttcgttatcagcggcagacttccggtaaccgatgaactcctttctcatctcccttctctccagattctcgtctgcactagcgtcggcatcgatcacatcgatctcgccgcatgcaagcgtcgcggcatcgttatcaccaacgctggcaacgcgttttccgatgacgttgctgattgtgccgtcggtttgcttattagcgttctccgtcgtattcctgccgccgatcgttacgtccggtctggtaattgggcgaaatttggggattttcaattagggtccaaggtttgttcgaaatcacaaactctcaatttcgaattctgatctataactgtagttagatgattacaaaggggaaatttaggttaaaagcgtttttttttattctgagtaaaatttgggaatagctttagattgtggggttacagataaagtagagctatgtgttagtaaaagtctttgtggtagtgacttgtgataatatttattgttacaggtaagtgggaagagagttgggatagttggattggggagcattggatcatttgttgctaaaagacttgaatcatttggctgtgttatctcttacaactcaaggagtcagaaacagagtagtccataccggtattactctgacattctctcgttagcagagaacaacgatgtacttgtcctctgctgctctttgacagacgaaacgcaccatattgtgaatagagaagtgatggagttgcttggtaaggatggggttgtgatcaatgtgggacgaggaaagttgattgatgagaaggagatggtcaagtgtttggttgacggtgtgattggtggtgctggtttagatgtgtttgagaatgaaccggcagttcctcaggagttgtttggtttggataatgtagtgttgtctcctcattttgctgtggctacaccagggtctttggacaatgttgcacagattgctttagctaacttgaaggcgtttttctcgaaccggcctttgctttctccggttcaattggattgagagagcgcccggtttgatcaggtagctaaattagttaagctattgtttattataatcaataattcaaaaagaaagtgtaatgaatatttgaatgtaccctgacattctctcccaaagaagaagaattaatgacgcatattatttaaataattctcccgcgttgcacatatgactaatttagtcggaacattacgattggcaatataatcataatgtttatgaataaccttttggttctaatgttattgtgaaaatactgttaaaacatgatttcatatattagtttatctttggaaacgtaaatagttgacaaacgacaatataaaaataaatgtctgctgttcaatttaactaatcattgaaaatacataaacgcacgtatatatagacattggatagagtcggtacacgtatcgtctatagaacctgctcgcacgtcaacttatactatattcaaaaacctcacttaaacaacaattgaccttttttcctaaattttattagtatttctattgaaaaaattcaatgaaatgaaacaaatcccaatcggtacggacaaaagtctccaataaaaaaggaattaaaaaaaaaaaggatagtgatccgcacgtagccaccactactgtcgttgaaaatcccctctatataagattgtctcaaattcgattacttcatcaaaaaacaaaccaaaaacaaaccctaagaataaagaaaaagaggctagaatgggtccaatctcaagttcttggagctttaacaaattcttctcaatagttttcgttgttttcgccatctccggcgagttcgtcgctggatactatcgaccaggcccatggagatatgctcacgccactttctacggtgacgagaccggtggtgaaaccatgggtacgtacacaacttcatttcacttctcttgcatataccatatgaagtcgatgatccaacgtttccagacatatatatccacacgattaacaaaaaaaaaaagtttatgaaaaaagtttccaaaatattttaccatggatacgtagtccatagcaatttttcatttgcattgcatgtgcattgaaccgtacctgaatcacaatatgtcacgcataagatcaatgatataataactttatgtatatatatatatatataatgtaggtggtgcatgtgggtacggaaacctttttaacagcggctacggactgtccacggcggcgctaagcacgacattgttcaatgatggttacggatgcggccaatgttttcagataacatgttcgaaatcaccgcattgttactctggaaaatcaacagtggtcacagccaccaatctttgccctcctaattggtaccaagactccaacgctggtggttggtgcaatcctcctagaacccatttcgatatggctaaaccagctttcatgaaactcgcttactggagggccggtatcatcccagttgcataccgaaggtatatatatactacacttagttattcaacttcatatattatattccaaaacttatatattttataatgtgattgatcatatagagtgccatgccaaaggagtggaggtatgaggtttcaattccaaggtaattcttattggcttcttatcttcgtcatgaacgttggtggcgccggagacatcaagagcatggccgttaaaggtagccggacgaattggataagcatgagccacaattggggagcctcttaccaagctttttcctctctctatggtcaatctctctctttccgggtcacttcttacaccaccggtgaaaccatctatgcttggaacgttgctccggctaactggagcggcggtaagacttacaagagcaccgctaatttccgttaaaactaggcttttgccctaccaaacgaaaacggagttttctcttctccttctttttttgttaagagtttcggtggccttttgttgtggtggcccggctttatgttatacatctacatgtatgtataatgtatgtatgtatctaattgtgatataactcttcttataaatatcatgaagtcaacacttcttgatcaagagaattcgttttgtttctgaaaattttgttatttgtaaattttctaccaataaatcgcttgcttttgtttagaagacaaattaaaggtcttgaaccagaatttggaacagagttttgaaaattgggaatgagtctatacatatatttccgtatacatctcagtttggtctaataataagtaccaaacagaaattaccaagaacaatacatattcagctattaataacatcgattagtaatatcttgattcatttcatttttaatataacgttttcccaaaacccctgatccgattcaaaaccctacttcttggtgagtctctctctcaagatcttcacacccatatacctgccaaaatcattagcctttagtaaaaaaaaacaaaaaacatcaacataattaatatatatgattgattttacctgccaagcatcataaccgtggcttgaggatttgtcccgggacaataaccaacggtcgacatatcaatgactctaagccggtcgataccaataactttataatccccatcgaccactctgcccacaacgcatcctccatggtaatgccaaatggttgtaactgtatgttggcaaaattcctctgcggatggaggcaacgaggctccaggaccactgcgaggcggccttagattgacaggagtactcgccgtgaggttaagtaaatactcaaatgacacatctgcgtacttatacctcgaaaaagctttagattgcacgactctctctatggtttggattcctcgaacacaacgttttaggtcgtcaggatgttggaaatagttgaaagtcacaatcgggttatcttttgggtttcgggtcttgagctctaaatgacccgttgataatgggcccattactttctctaaaaggaagcctccttgaaaaggttgggctgatgataatttggtcattgaatttgactctaataatgttgcccttggtgaaaacattgcatagtagtctctagtggaggacgatccactagaaccaccaccacctccgccaaaattttcaccaccggcggcttcgacatatgttccttccccggtaatcccaacaacctcaatgagtgagacctcaacggggactggagaaggaacgaacacggcattcatagggttgtcatacatgccttgacccacatgaggctggtccatcaccaccgtgatgttttgggcctgtaattgagccgatgggccaacaccacttagcataagaagttgtgggctccctagggttccggccgataggatgatctcactcaaggcgccttcctttaggtaagctctatgagcctgaccggtccggtctcggtacacaactccgttggctattggcttggtcgtaccttaaacgtgaataattatattggtaatttgatagttagttaataatctgatttagtggcaacaaaatgaattagaataaagtgtggtaagcaagaatttacatgaaatgtatagtgaaaaaaaggtagacattgattttgcaaaatatcaggttcaatccatattaagatgaaaaaaatttaaccatgtgaaaacaggaccaacatttttgtttaaccagcatgattgaatatattttagttttactacgttatgagtattggatgattatattctgcaatgctacattaagtacctcgagtacgaaacaagatccggtggacggtggcatgcaaaaggacggtaatacccttaggatcggcatactctaacaaatcggcggcggtgtgtctattgccgttgcggtcaaaaatagtaccgccaaatttggtgccattgatatgatcataggtgaaaccattattagggacaatcccagcctccaataagccgtctctcacggccgtttgccaccgccccatcggaggctgaaacgccaccttagcttcaacccactggtacgactcgttcgctagcgctccgtcccaacccatgttcctaacaacatttcgattcgtataaattatttattttaacgtggacacaccaagtcaccaaaaacatcaacaataagaaatatcttgtatgttgtactatgtaacgaccctaacagattaaatgactattctacatataagtataataagatcgttttctcttttatttttatttttacggcaaaaatcgttttctcttttattaagtgtgtgtgataatatatagttatacatatatttaatgttatccttagaccttagttgattgatcatataataatgtctacaattattactgtctcaccaaccatagtaagaatgaggactcgataatatattaatttccatgtaaattgtatgcatgcgtattagtgttactgtatacatatgcactaacctaacgtatttagtgcccgcacgtgtatagaagccggcgttgagagcgcttccgccaccgagaacccgagcacgtgcattaatgacaccatcttctgatacaaaacgctgagatggtgaggactcagacaggtcagagagagcggctccgaaagccgagagcctcgtgatgttggggttattgtacggtgagtcaccgcgttcgagcagcaaaacgctggcgttttgagacagcgttgcggctagagggcacccggcagtcccaccaccgatgatgatatagtcgtagtacgacgttgtaggacttcctgtcgcgtcccgcatgaaggagtagttcggagctgcgatcaaagggtaaaactataacttcgcactaatatgaatacttaagaatctagttgtagttcatgaatattacctttgtcagaagaacaaattggagaatggagaaaaagagagagagcaacaaacaatctccatgaccaaaatctatccatcattaatacaaattgagtttagcacaatctagagtagagttctctcactttgtatgcctatatgtatatgataatgtatgggttatttataaagtctttggtgacctatggtgaaattaatactcgaccttttcatcatatatatagctagaaacaataaagagtccatctaattctgaggaaatgcaacatcaagattctatgtctattttaatggacacgtgtcacctgaagaagcagataaataagacccaatagataaattaattaatttaatttcaagaaaatgcaagttagatgaagtatcatgagagaaaagaccaaatggccgataaaatttctagggaatgtaatgtagatattgatacacttaacctgtctctcttggatatgaataaagaaatctgaaattggaattaaaattagatactatatatttatgtaattgtgtttcagtgtgtgtaataccaacgtccattaatagacagttggttacagacttacagtttaaatgcaccaacattttcgttctcgatcgtgtgatcataataagccgaatatgttaggtggaaataatgattcataaattggtttcgtacgtttaaatgaaacgaaaattagcagtacgtatatatactccagttttttttttttttttttaattaccttattgatcatcactttaattcagcataaatgattatgacaatcaatctaattagcaaatgatcaggacttgtagatgttgttactgatatgtcttttgacgattccattgatatggaaaacccatattactgatatgtcttatcataactatatatactctctaggagaactttttgaaatagttaacaaaaatgttgaagtagtcgatatagatgattcatgattgggtcatacatcatgtaggtgtagcactcgcacatgataaggtcgtgtcattaactactctacagggtatacagtacagagtaacataattgtagattaattttgtatggtcaaggttgcacaattttttttttttttttccataaaaaatgagtcaaatttatgaactatgggccataatatttgtgccgtgtgaattcaattataaaagcaaacggactaaaaagcccatcatacattttcttcatccttttttcttttgtcatcccctcaagaacgtaaagtatagaaaaaaaaaaaaaaaaaactattaaagtattccaaatctattcgacttgggataacgtaagtacgtaactcttagcataaaaatgaactgcatatatggttttataagtagaatcaaaagttttgatcaagaaaacaaaaatcaaaagtcaagaggaaaggaataatgctatataccaaaagtcaaacatataaaattccgaaatgaataacaaaataatagaaatagtggagtacacaatgcttgtacacagctcattaacatgaaatacagatggaggtctccttggttctcaaaagcatagacaaatcaactaactctaatgattaagttataaaaaatcatattataagtaggttaatcactcgagagtctcagacagcgaagcaaccagaaaagagagagagagtggaagacatataggtcccgcttgcaatgcttcgtacggtcaccaaattaacaagtggcatacttgaaatgggggctgtctaatttattatcgtcacgaactataaaaagcttcttggtgtgacgttggataagtttccctctacaccaaatccacaaggtcgaatcatttagaacctaatagtttactttccagaatgctaacaatttttttgataacattcatttccacttaagacagtatgtaatgttttcacatttatttattattagattaacaaaattctatttcatcaaaaatgaattttgtaagcaaattgaatatttataagggaacttataagttccaatattcatggatgaaatggcttctcgcgtcgccaatggcttaaccttagaattaaaaagtatgaagtaataggtataattagacaaaaaagtaagggtctgaattgtaataaaaaacttctcgtgaagtaagtaaacgcgaaactggttctcccggtaacaagttgacacggcatttttatttgaaagaagagaagaagaaagagagagagagaggactgggtctggtctcttcgctgcaacctatagctgttgtttgctcttcgacgggattctcactactcttttgccaaaaaaaagaggtatactttccagaattgttcaaactcttgatgaatttctctttagaaaaaactcatctttttaggttggaattgattttgttttttacatttcaagttgaagcagttggagagaactttatgctcttgttcttatctagattcctgcaagtttgttgctttttctttctgtagctaaatttaagtctctctagtgattaattcgatgcaatttaatgacccaattcgagagttttgtgtattccgtagaattttgagctcaaaattcttcatttgagtctcaatcgagttttggtgatgtgagttagttcttcgacctctgtagggaatttgagttatgggttttgttttcgattcactttcaagctaaattcgctttcattagtggaatgttttcatcaaagctggaatcttttccaatttcagttgctgtttactttgtggattactgcttaaatctgaggttttaagtgttgaaactttacagatcggaggttccgaaggtgaatgcagcttgcgatttcatagaaaagaagattcgtttgctggattaggcttatttgtgtatcatagctttgaggttttaactgagatttattgatagtggaacttaggttttcgagaggtgtgaacagttgggtatatgggtatggacatagctgataaggagaatacgagcccgcttttatttgaattctgcaattgctataaagttgcaagccttactgaaaccattctaaaccctgtaaatgtttccaacttaaaagatagatatgtacttggagaacagttaggctggggtcagtttggtgtgataagagtatgttctgataagttaactggagagaggcttgcttgtaagtctatatctaaagacagactggtaacacaagatgacatgaagagtatcaaactcgagattgcgataatggccaagttagctgggcacccaaatgtggtgaatctcaaagcagtttacgaggagaaagattctgtgcatcttgtgatggaactatgcgcaggcggtgagctttttcacaagctcgagaaatatggaaggtattctgaggttcgtgctagggtgctcttcaagcacttgatgcaagtggtcaagttttgtcatgatagcggtattgttcacagagatttgaaaccggaaaacattcttatggccacaatgtcttcttcgtctcctatcaaattggctgattttggactggcaacctatataaagcctggtaagataaataacactgacattttataagttatcaaatccaaaaatggagattgtgtattctaagaaatgggttttcgtgtgagcaggcgaaaagctgagcggaacagttggtagtccgttttatatagccccggaagtgttagcagggggatataaccaagctgctgatgtatggagtgcaggggttattttgtatattcttctcagtggagcgccgcccttttggggaaagactaagtcaaagatttttgatgctgtcagggctgccgatttgagattttctgcagagccatgggacaatataacttcatacgccaaggatttgattcgcgggatgctttgtgtggatccttcccaaaggttatcagctgacgaagttctaggtatgtcatttctatcgttttcgaaataatgatttgtttgaatgcttgactcgagtaagttatccatgttcctaaacatgtcaggccactgagatattactttaatgttgtctatggatttgtagattaaagcagagtgataatttttgtgtgcatttgtttgcagctcactcttggatggagcagttatctgaatcaggtcaagaacaatatgatcaggatgggtttggttgtgaaggattggagaatgggggatgttctttctccacacaatgcgtttctcgggaacaagactatagctttagcgttggccagttagagcaatcaacagataacgattttaaatcatcgttctcgacattcctacctgcggataacacactgccaaattccggttttgatgggttttcttttgatgggaaacaaccggaatcaaccacagctggcttctcatcaactggaattccctctatgccaagctttacctttttttgtacaagcccagcaaggacacagaacaacgacataactgaaatagatggaaaagttcgaggtacctctttcgcttttccttggcttacaatgtttggacttgatgattgctagaaatgtagagtcatatactttctaaatatggcaaggaaaataagtgaatcaatatctggaacagttgactataattgagtttgcattagtatcatcttctttcttggtgttttaaacggacatcagtcttgagctaatcaaatgatctgtgtcccatttttacagactcaagcccaaagaggttactgccttcaccagattcttcttcacaacttgagaggcgtgatgaagcaggggagaatcagacagaagcaggaggaaagtcagagacaagaagggaaagaggaaactggtcaagaatgtcaggtctacacagcaaaaggaacagaacaataggactaggcgagctagaccagttggtggtggatgttgcagtcacagagtcgataatcagatgggcatcttgcacgcatattcccaccgctccatctctcagattgtcgctcgtctgctagaagaagaaaacgaagaagacaactgttatcagtaaaatattgtatgtacacatctgattttgtccctgcaatgtctttgtttttgtagtaaaacttttccatggaaactgacctcaactgtataaaccaacggaaatagagtgtgattttgatctctttagagaagttattgttcgattatgagcaatttaaaaagtaaaagaaaaagcattgcgtctgccgggagtcgaacccgggtctattgcttggaaggcaattatcctaaccgttggactacagacgctgaacgagtgacacattgataaagtattatttatagttacataataactaaatattcgtttacttgattacttccattataacttagctgataggcgacacagactatagctgagctagatatatagatgtcacaaaacaaacttaagtgatacaatatcacaaattttattagacaagtgtgttcaaagttcaaattcttcacgagaaacattgtcaataaaaataaaagaacccaagaaaattaaaatgtaataagaaaccaaacattttcattgcatttgtacttattgatcatgtttcaaattgaattgccgaatgatgtttcgatttaaagattctaaactacaaagtaatacaaaaaaaaaaatctactttctaataacacaaatatactgaagataaaatgtgaaacgaactaagaattgagttttaaacatcttctctcgtcgtttattagaccaatggacgactctcttcatcgtcttccttctcaaacttaacccgttccaattttccgggtgtctgacccgaacccgaagatttggggtttgggtttggatccggaaccatcttgagaataatgcccataaagatgagtaacaatcccgtaccgtgctgttcagttaaaggctttgtgaatatcaaataggacagtaacagcgttaccgcttttctcgccgtcgttatctactccccaaaacaaaacaaaatattaattacattgttctacaaacacaagtttaaactctaaagtaatatatgtggcctaaacttgatatgatcgatgctttattagttactatacaaaaacgaaatgcaatagtaaaaatgatgaaagtagttttaccatagcggttgtggctgcgccaaagagtgcaatgagggatagaacggagacttgtccgataaatgtagccatggcttcgaacaccaacactccatacacatatggatgctaccaaaatgtcaattaagaaaaatgtaattaatcaactacattagtcaacgatcatcatataatgtctcttgtcatataagttaaggtggtgatcgaataagaattaaagtattgaattacattatgcaaagttcacaatcttatatgatcgccactatggattaaaggggatataggttgagagcatggttgataagaactaaagtattgaagcttacttgagcacatgaattccaagctgtgaaaagctctccagtaagaatcatcggtgcaagtaagaacggtaagccaactaccgtcgagcaaaacaacatctccatctaaaatcaaagagtaaaaaaaaatctgttacaagttattcgagaaagagggatatgttcaagagaagctgtacaaaatattacttgtgttgtctcaggattcatcgtgaagatagcttcttgtaagttaccaagaaaagcgtccatgatgagagcgcccgagatcatcataaccccaattatactgaagtttggggaggtatgggcatcagccaatgtgaataagatgagaccaattacaagtaacatagcagatatgtactcgtggacagggtattttcttctcaaccctggtataaaagctcccataaccataaccggcaaaacctagataacagaggaagaaatcaatgttaagagatactgcgagaattacacaatgattcaccaattaagaaaatgtaacatatcttgctaaccaatacccctgggattaaacaagaatgtgactttttaaattcctaccgtaacatttattgatacaaaatccatgtgagttcaaaccgttactgacaatgtaataatgtaaggagtctttgattacaaagccgagataaacaaatgcaatgatctatatatattgaacgaaattgatctcagagattaatctaaactttgatccctcgctcaactaatgatggtattggactataccatgcattacttctttttttaaataaaaatctatagtatatatatacaccattagttggttaagtgaaatattatataccttagtggatttgaacatgatttgagcaggataattgagataagccaaggagcctttggtgaggccatgagaacccataagaacaccagatagtttcacgtaagtcttccatggattaaccatttgcttcgtcctgaagccatacatgtaaatcaaggcaatgtacaccaatccttgcgcaaacgtgaaataccatccataactgcaacgcgcacacacacatattatacttcttctactattcgaattttaattaataaagatttgacttttaaattacctgaatttaagccggttgtacacatattcctgcaaatttgataagaagccaaaaaaagtgtgtattaaagatccgatattgtagtcaaataaaataaatctaaattttaataaatgaattaagcaaatacagaatctgaagatttttttttttctgtatttgtattaaatgtatacaaatctcagattcaacaaaaacaaaattgcatgcctaatcttcgcctttgtttccggtaaaagtctttgttctaatgaaatatttttagaagaagaacaccggattcatctcttaaccttaggaatgtttctcttgacaaaaagacagagaaacacaccgcatgcaaaaccggaattcccagacaaaatcaaatcataataaacgaataaataaaaacaattcatgaaaaatatcgaaaaaaatctctgatactattgatttggttatatcagatttattatttaaaaaaaaaaacgaacctcgcagatgccattaacgaggtaaccaaagaagaaaccagaagaacagatgagaaattgttgccatctgggtttatcagaaagaggaattccaaacagttttatcatttgttcttcgctgttagtcttcatgatcttgaaaaaaagaataaatcggaccaaggaatgttatgttagaaatgaaaaaaaaaaactgaaatctgattttctttttgttcctctctttgaagatttgggatttgtaaaagtgaaagagtcagtgatattgacaagtagatgaagaaaggtattaaatcaaatgaagaaagaacaaaagaattctcattttggatttctctttttttttttttctcttactctctaacttaatgctcacgaacactttttagcattagtattgaagtattaagggtctaattgtcttttagttttctaacgcttatatttgtatttatcttagtatttataatttattagataattatgtttatttagaccaaaatgtaaaacctttttttttttttgtcaaaaccaaaatgtaaaacctaaaaaccggtttcatttgatgaattttatttcagagaatattttattttgaaaaataaatccgtcaagttaagttggattttagtgaacaattatatgattaacacgaacttactttgcttcaaacctcgtataacgaactctcccagtatcgggacttgtgtgactcgagttagagcgaatgatgagctggcaaaacaaaaagtcagtttcaggcagccacgtttcatttagttccgcgtcgatgttcatgccacgtcagatgatgctttagtatttttccataaccaagtgtaataacatgagaaaataaaataactaaccttttgacggagtattaaaatatttaatttgaggacctaccataaattccgtgaaaagaccttaccatgaatttcgtttcaaggtattcaatttattagttgtaaacttgaatcgtgacatgctgagtatttcgggacttgtaattccaccggaaaacttattaaatttgttttttgtagtcaagcctattattattaatataatcataagtcgttgaaagcacaaatataaaatagtattcttaagagagtataactataatactcgcaagttaaaactgtatttttttggtcaattgctgtcaagatttatgtgctagtatccagcaagatttgattaaatcccctttaattctattacaacttacaagtagattacactgtgaaaaaattatttctacaactgtcacgttgtagttacaaattgggcctaggctttgtatattaagattcataaagcccaataattttataattttataggtacaaagattccataccatcaaggaaacttctaacgcctgggacacatctacaatcttaaaactcacataaatacctcttacataaaagctaaatattatgtatagtagatatgtgagtcccacttaatatctgtaactccacaatgacatatcttcataacacatctcttcttccgtgtaaacattagtaggagtcatgtcttccatatacgatcgcggcggcgacattagtggcccctccgcgagtctcatcatcgtcgttgagacttcttcgtagtctccaaatccatacgaagaagaattcctctcctccgatcccgaaccagagccggaacccgaaccaaaacccaaatccacatcatctcccgcacaaggcaaaaccgtaattccactttctaaatccaccggcctaaacatctccgcagcttccgccgcaactcttcttatcacatccggatcattggattccggcaccggaagccgccaagcggagtcggcgaaattcaaacatgcggatctcccacgcagagctaaaaccgccacgtcgtgtgcacgcgctgccatatctgctgtgggataagtcccgagccaaatgcggcgttggtgcgtcggttctctgacttcgcagacccatttgtcaccgttcctccgccttatgcctctgtaaactgggtgacgtgtctccttaaacactctccttcccgcacgcttcttaggcctcatctccgccagaataatatcatcattattcataactcaaagtaccaaaaattcgccggaaaacaaaaagagactccggttaacttaaattactgttgaaaacgtgtttattttttcttgtaagtatttagttacaaaaaaagattaaagatttgttcgaattaagagtctttcttctgacttaggctctgttttttgtttttgctgggagttgagaaacagagaagtgagaaagaggggtatatataggctatggttatgggacccacagtatacgaagtatacgcgcgtaggacacatgtaatcttatccacgaatgcatttattagctgttagccgttataacctaaagttctgtctagaatttattaattgtgtgagcttgaacccactaattaattaaagaaccctcttaaaaaagtgtttcttcttttaaacattgtaggagttaatttggcacattttatttaactgtagttttcgtcatcagtctacaaattcgcaacctaagtgcatacgactgacatatatatacatatatatattagttttttccatacgttttacgactgacatgtagtataatttatagtttataacagtgtttccctttgtggtctgtttaccaaattacgggattggtctaatatgaatatatgattataatctcacaagtaagagtgcatggcttatggctattagaactaaaataaacgaagaagtttcctgaattcaacatgacacaagatgaacaatcttcttacagttttagtcagatattagctttttcatctttttgttgcaatttcatttaaaaaaatactaaaactgtatcttgcaacaaaaagatgaaattcaaaactaggaaaaggttttcttacaaaatcagattaattatataaatttgactatcaaaacgtttacgacaaaattatttgatcatcgttgtttttttgcacgatggaaggatatgaaatgtaaaaaaagaaaagaaaaaatgaaatgtagaaatatgaaacgaaaaatgaaaatatattacattgggcaagaatcatatagataatatttataccataaaaataatcacctcacttaaatttattgggttttctgttcatttatatacaatcgttatgttcgttttgatattttatgaatggtggtgaaatacgatatcaaaattatccattttcctcccatatttcatcagtgccagccaatggttttaaaataaataccgagacgaagaacattcttggaatcttttggtcaaacataactatttggcttagtttaacttttacaagttaatagtattaaattcgggtagttgggtccagctctaccatgttgagattttgggaccaaaatatccattttaattagaatcttatttcgatatttgttttgtggatataacacgtgcctcatttcgatactaaggaaattagctgtgagtaacacgtgggatttccgtgggaactatttcttagtactactacgatagtacttgcacataacatgtggtgattaaaactcattaaatccctctttttatcaaactaaattatgaaagaaaaaactaaattatgaaagaaaaaataaatcaaactttggtattaaacagaagatagaaattaccacattgatcgttcagttgaaacagaaagaatgtgatgcatatctcgagatctattagaatacattaacatgcaagtttaatttatcacattttagtctcaattaattaaaaaaatgaatgtttagtgaattaatgaattcctctaaattgtagatgctcgctaaaaacctttcatgcaaagtaatagacgatagtgacgatgctgatgttgaatgtttgataacgagatagagtacagaaagaaatgttgaaattataaagtgaaaactttagagagacaaggagacaacgtcggccacaagaattaaggcttcatgctgtctcgtgagtgtcacatgcgcgtggccacaagaattaaggctaaagagttaagattattttgttcaaaaacaaaaaagattatatattttaggtgaatactttaatgttcattatagccaattatatgtatattccgtgtattagtaatttgccgaacttactaactaaacaatttttttttggattattaactttataagatatcaaatgataaacaatctgtcaaaaaaaaataaaagttatgtcagcaatgataatatgctacgtcaaaaaaaataaaacaatgtgcaaattatatacttcctaactaatccctcccaatgccaacatctttgttgatttagtagacaaactacggaaaatttcttaaatcatttctttcaacaatttatgagcgcaatcccatctgccattacgacaaagaccgactattacagaattacgtgtttgctcttatcccctttctttccattttacttgaaagtttcaatgcttcatctagttgttgtttttggcagagagagtgaatgattgcactgaacatgataattgacacactacaaaaaaaaagtattttgaatcgcttattttttatatttgcatcaattataattgatgcaaatgagttttatatcacttttataagtgactctgaaattggtgatgcaaattatgtgcatcgtttcaaataattttgcattaattgcaaacaatgatgttaattttacacaaataatataaatgatattagtatttgcatcaatttatcaaaataacgttaataattgttatggtaataataagtaatgttaagtgtttatatcaattataaataactaatgttaaaatttgtaaaatcatattaaatatatatttagtaaacaaatttatttaattttattaattaatataaaagtaacgattatatttgtttagtagaaatagttgcttattaaactttacactttgtatacaataaaaatagttgtctctttttttcatgggagcgatgtgggactttgacaaattaagtaacctattaaatcgttttttacaattgatgcttaatctttaattaacatcatttgttattcatgcaaaagcaaattcttaggattgtatcaatttttgtgaaagtgatgcaaatgttctagatttgtatcagtttaaataaaatgatgccatatatatcaataatagcattaatcattgtaactgatgttaaatatttatttgtattaattataaataagtgattaaaattaatatcactaaattttttgacacaaattatgtgatgtgaatgagtatttttttttttgttgtgacatcttcgttatcattctccatttttctaagcaacaatatggcacttccatgaagatcttgcttgcagagtccgcttataaatgtagatttagtaactgcatttggttgacaacccctttcaaacatttgatcaagtacaccaggcacttgagaaatcatattaccattaagcagacctttaatgacagtgttatatgtcacaacattaggtttgtaacccatagctttcatattcttaaacaaagttggtgcatcataaacagaagcattttcctcaagacaaaaaggcctgagcaacgtggtaaatgtgaacacatcaggctcatggccagctttcaacattctcgctaatgtagacaaagcaaatctcagctgcgagcagtgacagaaagcatttatcagcaaatttaggatgtaggtatcctgttcaattccagcgatttccatcgtgttgccaagacggatcacatgatcattctcggttccgattatatttttttcttctaattttgttttttgatagcgatggtgtgtttaagctacaaattatatcatttacctatacatatttgtgcagaatttagcaagtacaatctgaaaagcaatgtagacagatgaacagagtgataaggaaattatgagcttgctttcatgcccggagaatggttataaatcttggtggtcgatctgcttaagaaaaatgttgtgtacatcaatgttgtcacatatgaaactccaacttagtctttcaatgctctgagacggtaatatgatgtaaacaccaaaattctaagaaagcatatccaaaaagcttttcttcaatctaccatccgataacatatcgacaaccatctttaccgtggaagcatcaactgagaacccgcacctctttatttcttcaataagtttagctgatttggttgcatcaccttctccaagatgtgccctgatgagtatgttgtatgtacaaccatttggcgaatgcccatcctcttccatttttctaaacaacaggtctgcttcagacagtgagcctttcttacacagtcccccaatcattatattgtatgttttgacatcgggcttcactcctttgagagggaggctacagaataaatcccaagcatcatccaccttactagcattgcacatcccatgaatgatgatgttatagataccaatatcaagctccatcttactcttctctattttttcaaatatttccagcgctttttctggttccccattgtcacacaacccatcgagcaaaattttgtaggacacaatatcaggacgaacacgacgagaaaccatctcttggaagagttctttggcaacttcaagttttcccaattcacaaaatccttggataagagtgttataagtaaccgtatctgcaaccactcctctcaaagacattttgcggaagagttccaaaccatcgtcaatcagattagccttacaatatccatttatgaggatattaaacgtcctgatattaggaccgcatcctttgctaaccatcagatccagcatgtggttggccttatctagctggttctccttgcaaaacccatctatcaaagaagtgtacgtaacagtatcaggagatatgcctcgttgtatcatctccttgtgcagttcttcagcctctcgaagctttccctctttcacaaaacaatctattaacgcgctgaaagcgaccacgtctggtgtgattttccttttgatcatatccctcagcaacttggcaccatcatcccatctaccagcgtaacaaaagcctctaatgagagtggtgtagataataatatcagctttgaaccctttgatttccatttcattgaaaaggttgaatgcattgtcgaggctcccgtctttgcacagaccatcaatgatgatactgtatttgactgcatcgagcttgatctttctttcttccatctttctgagcaactccatggcaagggcagtttggccggacttacacattacttttaaaaccggtccataagttacttcattgggttgaaagccagtctcaaccattcgatcaatcaaaagcacagcatcagagactttaccgttgagacaaagtccattgaccagagcgttaagcgttatgagagtgggtttatgtcccatttcaaccattcgatcaactaattccagagcttcggaaactctaccctcgagacataatccgtttatcaaagttgaaaatgtgactgtatcaggctcatacccaagtttaatgatcttccccatagcagaaaaagccaaagagagtttacgacatcgacaacagcaattaatcataatactcagagtgtagaggttatgcgcaattccctttaattccatttgcttgcagagatctaacactagatcatattgctttgttctggcaacaacactaaacaatctactgaaatcaataagacgaggacgaggacgagacctagtcatttcttgaaacagatcaacagcatcatcttccttgatatcaacaatcccacttctcaatctctctctataggagactttccctttcccatcactgacactagaaaagactcgtccatagcaagacaagaataaagcagttcttagagtacctgtctcgagaagacgtgtctgaatcaatccccgcatgactcaagttaagaatttgaaagctctgatttaaaaaaaaaaaaattggagtcacgtcttcggttttgtgctgattcgtttgttcggcttccacaagcaccaatgtctgctcattacacctctttcacacacaataaaacaaaaagatttaagctttaagaacttctgattcggaaatttcaacaacgatgctatatatgggtaccttgaaagtgaaaacttgaaaccttccaattctagcgagttatcgaaattgtcgacccaattcgccaacaaggtggcactaaatctacagaaaagaaaacccagacacatcgatacgaagaacgaagcaatgagaaacctgaaatctttagattcgagaatgcttgaagaaccgggttgaatgtaccggatcagataaaaccgggttgtctttaaccttctgtttcattcggagttgttgataaaatgttttttttttcttctccttttaataaaatgaatttgtttttttttttctttgtcgaccagattaatacttaataggatagtttttttttatcgaccacgttgaacttcaaaaagttttttttttttttggttggttagtggttacccaatttgaaaaaggacgaatttattggattgaatttgatccttgaagatcgagctaaacaattttaccataaattaactacatcaataaaagtaaaaagagaaaaataatgatatatatcgaagcacactaaacttgtttaagatgttggagaaaacactaaacaaggagatattaccaagttgactaattacacatctagattaaattcctgataatacatctcccgtgacaaaaacttcgatattgttcatatcaacgcttctgtttccgtatgtaaaagtgaaagacttcgtctttaacattcggttccaagaatcatcacactatcgtccacttgcgagaagatccatcataatctcaatgttggatatgaactctcccaagatccaccatatctttgacattttattttatgaatgttttttttttttggttaaggagaggttaaggacgttgattcgggccgagaaattgtattttatttttatgaatgtttctcaccaagatggcatttactactgtgggtttttaacttccttccaagccaatattcgtcgaagcccgttggacaccctaattttgcattatcgttccggtggtttagcatttctaatgtagctatagttagtaggttagattttactatttgtttaacagcgatgttattatagtcgattgtaaagtatatatatatatataagtttttcttaatttatgtagttcagtcatttttctcttatatcggatatgtctatgtgatcaactttgtttgtggcattctcgtcaaccattcttaatgaatttatatgataatcaaaaccaaaacaaaattgaaccttcgatatgcatctttcaactaatatatgcgtatgcttcatatgattaatatagcttaagtattaacatatatttcgaaatatatatgtttatatgctttgtattgattatatatagcttacagccttaaatattaactagtaactaaacaagataacttatcggataaagtataaattatatatatatatatatatatatgttttttttttctttttcttttctaaatacgagatatatatatagtataaattatagttttttcttactcaattattattacaaaaataaccccaacaaatgatgacaaaaaaaaaaaaaaacccccaacaagagccaacacactttcgacaaccccaagtgagaaagtgaaagagaataacaactgtgtgttaagaaaatattagtgaaataacccttttcttgattcatttcgtatttgaatatcaatctctcactaaaccctaactaattcaattataatcgtctttacagagatatacagaacacatatctatatactgtttacctttcagttctatatatatgtggctgatggtcaccatataaatcataccaaatgtccctgatcttaacccaaaacttcttcatcttctttaattagtttgccacctcgcacgtgtgacaaatccttcttcgccacgtgtgaaaacccttctccggcttgctactaatatacgactaatagtatgaatagttcaatggcttctgccggcttaggtagccggagaaaggatccggtgtacagaggaatccggtgccgaagtgggaaatgggtctccgagattcgtgagccgaggaaaaccacgagaatctggcttggaacttaccccatggcagagatggcagcagccgcctatgatgtggctgctatggctcttaaaggaagagaagctgtcttgaacttccctggatccgtcgggtcatacccggttcctgaatcaacatccgcagcagatatacgagccgctgcggcagccgcagcagcaatgaagggatgtgaggaaggggaggaggagaaaaaggcaaaggagaagaagagtagtagttcgaagtcgagagcgcgtgagtgccacgtagataatgatgttggatcttcgtcgtggtgtgggacagagttcatggacgaagaagaagtcttgaatatgcctaatctgctggctaatatggcagaagggatgatggttgcgccgccgtcgtggatgggttctcggccgtcggatgactctccggagaattcaaatgatgaggacttgtggggctattgatcggtttgtgttgtccacgtacgtatatgtaatcattatttgttcttgttgctttttttttttccgcccttaattatttcacttgtatgatatatcaaatcatatgtttaatgttttatttaagattgtttctactttcttgtatcgttgaattagggtttgcgtttggagtttttagggttatcaactagggcttaattagccttatagtgatcctcctttagtttcgcgacttcacgttttgatttcaattattactcttattcctatttgcatcttcttagtcaagaatatatttcatgttcttaagtttgtttttgttcaatataaagatgagattatgaatatttaatataatagctactccttatatacatgaactaaaaaaagtctttgacatatatatatcttcaggtggaacataaaaacggaggttttttttttaaataacaccgcaatttaattcggcaaagtttcatgtttgtcaatcaaagatccaataaatatgatgagtataatatgaatatatgatctttgtggaatttcttctcttgtttattgagattagtctttttcttatataacccatgatcaatttgtttcgagtcttttgactttctatgtatcatttttttgcgttttttctacatacacaacatatatctatctatttttcgtcacatgttcgttgctcagatatatattcggaaatccatccagcgatctatattccatttaattcgtctcgtagtgatatatatgttttcatatgaatcaatcgattgattgatgcttattcacacaatgatacatatattatattcatctagtgttccttttaaaaagttttgatgttcctgagtttccttttttagatatgtttttgttgtaaaggttttgccatatatgtatagacatgagtggtgttttcttactgggtcattttttgtcgttttctttaaattgtgacactatcttgctaataaagtgatatatttttgtattaaaatcttagtcttaactatatactccatctgttttacaattattgtcattttgataaatttcatagaaattacaaaactcgtgaaacatttcattatgtatttgtaaatcaaattaaataaactcttggtatattctagtttttcattgtaatttggttttacttaagagtaagaccatatattgtgtacttaacacaaacatttatttatattgaaatattaagaaaaaacttattttgaaaaatagaaacgatgataaaatgatattctgttttgaaatgcataaagtatcattttatcgaattcaaatatacatataagcttttaacgtatggagagtaaataagaattcttacttgaaacacgaattagtaatattatttgtgttaaaattctaatttaagatataacgccaaaacgatggtgcaaaaggttttaacaccaatgtttttacctgaaacggacaaaagagaggttaataagagaggtgaccatgtggcttttctttaatcatatccgtcactaagttctataaactttagctttacaactttttaatattctatctaaaatcacacaatatagtggtattttttatgaaatttttaatggatttatattcttcaaaaatggtaaaggtattggtcagaccaaagaaatttgccttttgttttaaattatgtaaacgtcctatttatagttttataagaaatttaagaattaattaactaaaattaactcggcttgtctcttccgactaaacatctgcactattttttctttacaaaatttccatttccccaactctttgccacgtggcactatctcctcggatttgtttgacctaaatccctttttggttttgtttacaacacctagaccctaaactgtctttatggttttaaaaaatctatgacccctaacataaaatatctgtgatcggtattataagtataccatacaaactaaaacatccattacagggatatctagttctttataagaataataaagttctgttttagtaattagaataactaagtttttttttttgtgtgtatggtgtaattagaataactaagttgtggttgtctagtaggaaaaaggtaattttggcggttagaccatatatgcatggattctgatttcacatatggctcgatatcgtgttagtaatattggtgtagaagatgatgtttcaggacgtgacgttcccccgctatctaaaaaaaagggttaggttccaccgctcgatcgtggtagtgccgtagtgcgggttctacatcaattaaccataccaaattgtggattcctatttgtcagttaattggcttgttatatcgaaaagctcgaaagatttgtagtgcaattactatgttagtttgaaattcgtttgttttctttgataaccagctgttgatttatattgtaaatataaagattggtttcggacaaatctttatacttgatttgatgcgatagtggtccactgcagatttgtctccctacgtgtttttaatgataacccttccctctttggtatgtttactcacactcacacaatgattaaccattcttttaattttaattaactcccattaatggctgtttgttttgagcattagacattataatacactctctttacagaagaaatacttttcttttctttttaatgcttgttaactacactttattcgttataggtttcttacaaatcgtttggtactgtctaatgtcatcattcgaactcatagctagtaaaggctagtagtgtgacacagagtcacagagagcacagcaacaattgttggagtcttgttgtgtatagttgtgattttgtattgttaagatctttatattttttcctattatttatgaaaaaactatataataacagtttccttcgtcaatgggtaaagactgaatcgaacctaagagtgactggacagctatccatgtggagaacactggactaaagtctctcatgttttaaattttaaatatgtggttaatcaatttctatcttctaattcactattaaaacatatattaggaaagtgcattctacaaagttttgatcaatcgtggtctgctacatcatatttttgatcagttttcattatttctttattttaacatttctgcaatcaattatgaatttttagatctttacctgaaatatttgttttataacactcattgacaacttgttcaaaaaaatttagaaacacattttgccgacaaagtaaaaatatatagctacattagtaacatggactttggacatatacacccagtttctttcatgctttaatttttaaaaataaataaaaatcaaaaaatatatatagatttatttttttcttgaaagacaaaaaaagacaatgctcctacatttgaacttctagtttcttaaaagaacttaagtctatttgtttggattagtgtgtgtatgtgttatataaaatataaatctttgataaaaatattttccataataatgataaaagctctgatttgtttttccatcacttatatctaaaaaaatgattctcaccgatgtgaaatgaaaaaatatatatttatttgtatattgacaacaaaaattgatccgatttcaatctttatagtttcgagatcaagataaaaacaccaaaaatgtgtcttttattcagtttttcctttaaccggcttatggattttttttagggtgtctttatgggaaaaagctgccgtcaattgagaaaaattattttacgaactattgtgtgtttgttagtggggtacattgatgaataataagtcctacaacgtaaaagcaaaaaaaacatcaaacataaacactactattttttcccatttgcaatttacagttacatatttatacttattgtctatataattgcaaatccaatactaattaaaaaaaagaagtgtgaaaaataagatttataagcaacaaatacaaaaaaaatatcggtgctaaaaaatcagagagaaacaagaaccggatcggtttgtttccaaatgttacagaagaagaagaagaagctggcaagcgcgggaaacttacttaccgttaagagaagaagataactgcttattcttctttacgcggttttggtcttgaaggttttgcaggcacaacgtaactgaggagaatcaatccaacaggtatgattgttccaatgtaatatacgcttccgtaggcggtaagtgtttcgtgcaagcttaacacctgagacattgtgattgaaaacaaggttaaaaaaggcgttaagagtgattcgatcaatgagacaagagataaaagagttggtaattaccatgaaaccgacggctgagtagttgagaaccaaaacagtgtaaaggaagttgatgaagaccattatatttctcagcattgccattttcggactgatcgcttgttgccaccggtaaataactgcaaagaaaagagatttagatcaacaagaagatagctagatgccattaccaaaagagtggaaccgggtgaattgtatttaccccgtgagcctgcgatcatcaaagctgactgaacaaagaacatcatatatccaggatacagtccctgcaaattgcattagaggtagaagaaaagatcagaatagaaatacaaatgtatgttcctccatcattggaagtaattgaaaacatgaaaaaaaaaaatagagaactcacatgccaaaccgcgctgacggtttgtgtagctagtaactggaagaaacccgctttctttccgttctgcacaagtctctcatacacatctgcatttttaaacatcatgaataagttcacagatgaaccgaaatttctgctttataggattcattagtatcagaagactacttacagtgacggagccacgtgctgacttgtatgttccacacaagtggaatctgaaccgcgctcttagctagttcaacaccgagaatatctacgttcttggcacggtcccatttgggctttggtgaagcatcatcagtccaaccactgaaacccaaaccagagatgataatagaagcctctgaaattgaccagatgaagtaatacttccaacgagccgtgaatccagccatgtattggtaactaaattttctcaagaatccccattcttgatacactggttctgtgaaccgagttaacggatattgaggcactaaatagagatacagagccatgcaaatcgcagcttgcaaaatagctcggattgtagctccataaggcgatggcttctttcttttctcagtagtatcccaaatctagaaagcacaaagtttacatattcacaatctagtctattaaaacttcagagattcttgataatgataaaagctctcaagaagaagaagaagaagcttacccctttcccttcggtccattcaagataatctttcatttcataaacaggaccagcaaaatggctaccacaacaaaggcagtaaccaaagtactcaatcaaagacggcatctgaatcaatctgtttttcttctgagcttcacgtagaccttcctccttcaacatcccatcattgtaattcattgaacatgagatgactttcagcgtcaacaccattaacgctcctaacacatgaacaacaagaagggcaagttaagaagctaatcacaattactacacatgaacaacaaagagcatccaaatcaaaaggaagcaactttcagatgaggaaggtaagagttaccagtagaatcgattcctccttctttccacgcatcaccactcatataaaacacatgactacacacacaaatcacgaatttgcaccataactaaatcagggtcaatcagaaggaagacgatttctgcactaattcatagcataaagggttcagaatttagtaccagccaataagataagcgaaaccgaggaagaaagtgatgattccacacttgggtctataaatcgccattgaagcatatccgatcgtcatcggaacaaggaagtgaaggttggaggagaagccaaaggagaggtaagagaggaaagcacctgaagcagcggcatacaagtgtttaccgagtctactcgggacgattcgacaagcgaatgaaacagggatcgtggcaacgaaacagaggaggaatcggagtacggctaccgaaactccgattgaaccagccattgaactcatatccatggtgtcgaaaacccgttttttttaactcggaatgagtcacaacgaccgagttgctccgggaagctttcttctgatctcgccgaatctatagatcggtcgtgtcgtgtcgtgtggttgttggtgtcgtgtcgtgtggttgttggctttctttgttaacgaaaggtatcatgtaataaaccggtcggtacagtattttaaaaccaactgaaattgcaaaaccaacggtttaaattaaataccctaatttcctctttttttctggtcttacgatctctttacttctcgtgagttctctcgtttcttcgccgttcgttgtcctctttagccgtcgttacttgattctacagattttctctgttcaagtaagtttatggttgtggtactcttactctgttttaggtttttgtttctcgattgtgccatgcttaaattttgatttctgtatgtaactctgtttatgttgggaaatttgcatcttaaaggtgtgatctttattgattaggttcacgtgtcgacatgaaaggagctggtaagtttgaagggagctcaagtaagatagtttttgaggatagtgaagaagatgaagatctctcgtgttcatctgtgtcttcttcagatgaggttagtagctttagaataggtatggaacttaaatacattattattgtttgttgaagcatctgtttttgaatgtggaattaggaagaagaaacagaaaaagagttaacctttgaggagattcataaattacgagctgatgggtctaaagctgttccatggaaaccaaatcaagtgaagaaaacaggtcgtgctcgtgctaacaaaaacaggtatacacaacattgttttctctggttcttggtttttgtctttctttcagttgttggttactttgttaatctttggtgtttctatttgtgatgaaaacagaccaatggaagtgagttctaagaaacctgtgagtcgttatagagaggtggttcacgttccaaagaaggtaataagtcttagcattgagaacattttgaatctcttatttcttcttcccaagtttttttattttggagttgttaatagagtttgtttgtttgattcaggaggttcgtgatcctcgctttaaccaattgggtggaacacttgacgtcgaggggtataaacatctttgtcttgtgaacttgaaattacttataatgcactcattgttcttgtttcagtgaacgtaagttttgtatcttctgtaggttcaggaagcgatataatttcttttttgaggacaaacttcctgtggaaagagaggtattatttattaaatgctgaaaacgatatggttccgatttgtcacgaagctttttgtttgattttctggggttcctaaaacaggaattgaaaaagaagttaaagaaaacaaagaatccagaagaaatcgacgaattgaagaaccagttaacttacgttgtgagtgatcctttctttacctctcctgttgtaactctctgatcattagtttgtttactcacctttaaatctgttatttgtatatatatcaggagaaaatgttgaagtatgagccatcaacacagaacaaaggagcagcaatactaacagaacacaaaaagaaagaacgagaagccgcaaaagaaggaaaaaggccttactatctcaaaaaatgtatgtctcctgagtcttttactcaaaagtcccaagtttaggttgaacattacagttttgcgtttctctttgcctacaatttactgaatccttttctcttttcttatgcagcggaaatccgaaagcaaacactcatcgaaaagtacaacagtctcaaggtatgtaaatcagttttgactaccaaagttttaaatgtttgtatggaaacagaatcactgaatcagttctttttgtacaatccaggaatctgggaagcttacatcgtatcttgacaaacggaggaagaagaatgcaacaaaggatcataggttcatgccctatcgtcgagcagaggaatagagataagcagttttgctttaagacctgtctcttaccttggtccatgacaaattttgtggcggtctttgtgatactgatctaaaattcatgtttgaggtttgaaagccaaatgcagctttacattttgtttttgcaattgaaagccaaatcgaatacaaaggctgcttagtttgctgttggttctgtgaagacatgagagactctagacctttcagagggttcaaatctacattacttttcttatgttacttacaactgtttaatgtttttaagcatttagtgtttcataattcatactgttggttcttttcaagattgaatgaaaaatatccggaatccaaaaaaaggtctctagtttcgatatatatcgtaatattactaactaatttatgttaagaaatatccggaatctaaaataagattttttctagtaattaattcgatttttcaataacctttttatcagctacatttcaccatttttaatgtagtgtgtttgaacatagacgcaaatatcaaaaaggaaataaagcacattcatgtacgtaagcaagcaatttatgtgtacacacatacacatgttagacatacgttaaaataaatggtaacgtatattttatcatcataattagacagatctacaaatcctaaacgaaactcatctagaatttatttctcactatgtcatcatcacacaaatactacagcctggtttgtttttcaaaattttaggttgattttttttttttaattgaagttttagattgaaaatttattcaaaataaacattaatactttgagtcatatatagttaaatactagtatatattttattgatgaatgtcatttagatatattactattttaacatgcatgaatgtctatgtttacacatatgacatatctaattcacttaaagtcaggtacattcatgtatgtacagtgacgaagtacaaacaaatatgtacatgctaggttaatgcgcgattttgtgccataaacatagtaacatacaataaaaaaaatctcttaatatattttgtatttgttttttaaatatggaatctctagattctaaatgaattgaattagatttaattaccaacttatgcattgtatgaaaatgttaactataacacaaagttacacaatcccatataaataaaccttagttacacaaacaagcaatcacaattaacaaacactttccatcaacatttctaatattctctgcccaaaaaaaaactctctttgtaccttcaaaaaaaaatggaggacaaaagagtggccatgttagtggtgatgatgttggtgatggggaacatgttaattgaggcagaggctgttatgtcttttaaattatgttacggaggttgtcttgtggcgtgtgctctaatagcgcctccgattaaaaaacttttttgtccttttttgtgtatcaaggattgtaaacgtcgacctatgctttcttttgaggcaaatctaaatgaaattgaccaaactggttcttactgcgaactcggatgtgctaccgatcgttgtgtttcatcctcctcaattgatgataagggtaagtttgttgtttttgtttttttttctccaagttcttgtatcaataacgttcatatatatatacaatttaatcttgtgggtctaaggatattatgtaaatttctctggagtaagaatgatgattttgttttgggtgtaattctgctattagtaagaatgtttgatggtttttaagcattcaaataattttattgtgtggattctaattaattttcttagatttggttgtttgttttatatatgggcagatcatgtggagaaagtttcattatgcgtggattcatgctcagaagagtgctcccacaagaactaaaatcgctattgattttagtctatgaaaattaatctctaattagaagatagtgtcgtagtttgtatcgattaaatattctccactgagaatttatttcctgagttgatatgctttgtgttacgagcaagccaattgcaaatatataggtatcgaggcatccatctgaaataaagagactttcattaataaagaaaaggaattgtttcataataatattgtgcagactcaccaacgtatttaatttaaggtatgcatcttgaatcttattcgatgaatctcattcctatccgtaacaaaatttacaattttgatcattcaaaaataaataagtttgaaaatttaaccaaaataatgtgttaaacagttaaaaatacatcatgtgcatgtttatttgccaaatgattcaaaattgaaccaacgcacacattcttacgcttcgaaaccgaatggtcacatgtgatcgtgatcgatggagacattacgtatgtacgtaaccctaatcagatcaaaactgatcaaaaatatcttgttttacgaatatctgtctagttagctaaaaaaaacgttgatatatctttctaaggtttggttaccttcttattttctcttgaaagccataatccagtacaaatgctacttagtttgctcttggttctcttaagacatgagagactctagccctttcagatggttcagttctactttactattcgtatgtgttacttcatttgttcaattttttgaatgctaaaatatcctgaatccaaaataagatcacctatatatgttgcaatatatcataatatttatttaataatgttaagaactaactttgtttttatatgccaagattactcgaaaaatattcaaagatcaaacaaacttgttcatttattctgtttaattttgtacttcactcgatgcagaaaaaaaatattgtttgatttcttttcttccaattattctaattaatacaacgatcttatatgaatatatgatgccatgttgatcatttcaccatttttaatatggagtgcttgaacatagatacatatcaaaaagaaactaaagcaaattcatgtacgtaagcaaatatatacaaacagtctgcacatacataaacatatatgttaacgtatattttgtcatcataactaaacagatctccaaatcccaaacgaaaggaatctagaaatattaatttcccactatgtcatcattacacaagcactacagcctgatttgtggatgaatctggaaatgttaactaatatataaacttacacagtctctattttaacaagacatgataacccaagcaacattcacagcttacaaaaaaacactttcataaaaaaaaaagcatatcatctagagagaaaaaaatggagagcaaaagagtgacatgcaatgttggtggcagtaatgatagtgatggtgatagggaaccttctggctcagacagcggctcaaaaaatcccatttaaagaatgttatccagcttgtcttgtggagtgtaaagctggttcaaagtttccaaagtatcttaagtgtccatttacgtgtaccaaagaatgtcttcaacaaccttctccaccatctgtttcttcaaacaatatcgatgaatctgattatttctgcaaactcggatgtgcaacttatcattgtgtttctctttcttccatccaaaatccgagtaagtttatacttcttctaaacaatttttacattgtaaatcttacccataacggtgtttacaaatcgatgaccatatatatatagttgaaatgagattgtaacgttaaatggttttggttggtgtttgtgttatggacagatgtggaaagagtatcagcatgtgtggattcatgctcaaacaagtgtaccaagaaaaactagaagcgttggtactaggagaattcatgtgtgaaaaaaggatctgaagactgggccaaaagcccattcataatttgggttaactattgaaatttaattactaaaacaaactaatgaattatagtactttccttttttttttgtaactgtgtatcctttgggcttaaagcccattcccagtttgggttgattaataatattttattatataaaaaaagatatgaacaagtttgtataattcagtttttaaataacgaatttttttttggccgacaaaaaataacgaattttttattcaatatattttgctacaagaaatcaattgatataaaaggaaaacaaagctgagttaaaaaaaaatcaaaggaaaacaaaagctaaaatgaaggagataatactatttacaattgaggaaataaaaaaaagatgcacgtatataatctaatgatacagagtcacagagagtattataatactcaagtaatctgtataaaatattctaccaataaataaaaaatttagaatgaaagaagaataatataataaagtagttatgtaaatttagcaaattatattatgaatttagtaaaacaaaatctatttttattaggagaatggattttatatctttaaacaaaattgtttattgaatttatggaaatgaaaacactaaaaaagaatatgatattagtgtttgatttcataaaataatagtatagagaactccagattgtaaatgaatggaattaaataattacccaccatggctttgtaacacaaaagttatagcttaatatcttattgattgtgaatatgttaactaatatagaaatttgcattatccctatataaacaagccatgttaacacaaccaacttcacaattaacaaacaattacatctacaaatataaaatcttttcttctttctccctaaaaaaaagaatggagggtaaaagcctagttgcgattttggtgacaatgatggtgataggaaaccttcttcctcaaacagaggctcaaaagataccttttatgcaatgttttccagcttgtatgatagtgtgtaagagtgagtcaaagtttccaaagtttcttacttgtccaataacatgtctcaaaacatgtcttcatcctccgtctccgcctccttccccgcccccgtctccttctccttctccttctccttctccttctccttgtgagaacaattgaaaatccaagtaagttttcacttttcgtgtatatatatgtaaatttgacatttaatcaagtgttgtctttgtggtttttgttgtgttgtggacagatgtggagaaagccgcagcttgtgttgatatatgttcgaacaagtgtttcaacaagaactagcgacattttttttttttttatcaaagtaatgattcaataaccatatatgcaccaataatatgtaacgaatgacctttcaaattaaataagtattatatacatttttatttgatattttttgcattacaaacgaattaattcatagaaaggtcaacccaatagatagctaaattacacgatccttataaagtaatagtatttcagacatgaataaaagtcacgttattttaaaataacatgcttaagtttatataatgtcgcagtttggatcccacatatgatcttaagaaaaatgaattacaaaaatataatgatgacacacaatttaagtggttgacttcaatgagagacctgcgtatagttttttttttgttattgcggattttactaaaatcaaaattcgagcgaaaattaagcatatatcgaaaataccaattttttaccgcatctaacataccaataaatagctttataatgaaatgaaatgtgttcaactaggtttgttttccaaaattttaaattgatttttcgcttcgatatggtttggtttcgaacttaaaagataattaaaaataaatcaaaatactttcattcatatgtagttaaataagaaatagtactacataaactttgatgaaatgcacttacatatacaatattactatatgaacacacatatgacaaatccattcatgtatttaaaatgaagaagtatggaaagagatgtatacatattaggttactgtacgattttgtgtcatatatatatatataatagtaatataatataatataacaatctctagattctgaattgaaaaacagtcactagactagtaatgaatggaattagatttaattaccaaccattgtcacagaaaaatcacaaataattggctgctgattatgaagatgttaacgataccgacaaagtaacataattccatataaatagacccttgttacacaaacaaacaatcaaaatcatcaaacactttcaatcgcttttttctaataatttctgtaccttcaaaatggagaacaaaagaatggccatgttagtggtaacctgatggtgttggtgatgggggacattttgattgagagagaggctataggttttactgtatgttacactccttgtgttgtggtgtggtaattctgcacacgtaatcaaaacagttttatgtcgtttcacgtgtatcaaggattgtaaatatctctttatcaaaaaataggattgtatgcatcctacaccttcttcggaggcaaatccaatttttttttttactatcatttctgcaaactcggatgtgctaccaatcgttgtatttcattctcctcaatcaaagataagggtaagttttcagttcttgtataaatatatttaatatataaaaagtttactttaatctttgtgagtctaaggataccatgcatgtagatttcttaacagtaagaatgtttgatgatttttttttatgactcaattaattttatcgtgtgcgattctaattaattttcatatggttatttgatttatatatgagcagatcatgcggagaaagtttcattatgcgtggatacatatttagagtaatgcgcccacaagaactaaaacccatacctgttcaggtgtatcaccagtaggttttatcgataaattattttccatccaaaataaatagattaaaatgataaagaacacgatgtttaacaagaagaactttgcagattcaccaatgtacttcaggtacatggatctaattgtgtttaacatatattccgaccgtacattttacccattatattgacatacaacgaattactagtttcgtacaattgtattattgtaaaatatctacagtttccaattttagagaaaaacttagggagggattaatacatctaattttgattttatgagtatagagaaattgtattccattctttcctccaaaataagagtaaatttcaccttttttcttacaaagtttcattaaattaaacatttaatcatgtgaatcatctccatgtcctaatagtgaatacgtagtgaagaacgacatttacatccataacaaaatgtacactaatttgatcattcaaaactaagaatgtttgaagttttaaccaaaatgtgttggactaaaacaccgcatgtatatgtttatgtcacgcatctttacaatctcatattcgtttctatcgtgtgcaaatactctcgatggaatttttttcacttaggtttcggtccggacgccttaccaatacgtttgactattgagtttgtagagaagtatatgatatgggcagtggtggagatagaacttgtatatacagaggtcaaaatgtaaaaagaattatagtgatcaatttagttattgaattggtgtcaatttaaaaaaataagccaaaaattaagtaatttcaaaattcttcggaaaataaatatctaaatgggaaaaaaatattcatcgatcaaaatattttacacatcgatttgttgttgcctataaaaatggttatttatacagaagattacacaatccctatataaacaaaaaaacgtcaccacaaaaatataatcgcaataataaagaattgcatcacgtattataacaatctcttaattcagaaaaatggagagcaaaagagtcgcgatgttgatgaatcttatgatagtgatggtaatgggatgtcttctggttcagacagaggctaagtctagccatttcaaactttgttactcagactgtcatgccgtgtaaatctcatacgacatttccaaagtctcttttgtgtccattcacatgtctcatgacttgtcttgttcctactctaccaactccttctcctgcttctgatacgagtttaacaaacaaaatcgatcatactgaaaacctttgcaaactcggttgtgctactcatcattgtgtttctctttcttctctccaaaatccgagtaagtaattatattttaattctcatatgcaacttctctgtggcgccgctacaatcttaatttatatgatgattgcagattactaagattatgtatttatatggttttgttgtttttggtgatatggacagatgtagagaaaattgcaacttgtgtggattcatgctcagaaaaatgttctaaagagatgaaaaagtgatattattattatgttaaaaatcgacatagtatattattaaacggaatatatgaaattattgatttgtattgtgcgatattaaaacaaaatgagtggttttcctttttttttgcaagtcaaatgaatatttactcctttatttaattaattttgttacttgcaaaattaatcgatacataaaactatgaaccaaaaaaataaaaatgaatagtatttaaaattcaacagaacacagccttgacaatttagaggctccaagtatataagattagtctttgcgcttatatcttttaaagaaaattagttgttgattcagaaaataagaaaaaaacgattttttccaaagaaaacaattgccttgcttttctattttttttcttcacggctcacagctgtatacagcacaagtcaacagattcatgacacctagaaaaaaaaagaataaaacagattcatgtatttaagtaaatatatgagaataatatcatcttcaaaatgaaaatggatggattttttttttgttaccattatcgaattatctcaccataattacaccttatattattgttgactgtagatatcttaactaatatagaaaatctagagtccatatataaacaaacaataacaacacatgttaccaccagtcacaagtaacacacatctgcctcaaattttataatattctttgtagacaaaaaaaagaaaaaaatatggagagcaacagaatggtgatgtttgtgacaatgatgatagtgatggtaatgggaaaccttctgattcagacagaagctgatgctccacctcaagctcaatcttctggtttcttaacttgttacccaggttgtgttgtgtcttgtttcgttgagaagaaatttccacaatttttgttgtgtccatttacgtgtatcgggacttgtcttcctagttcttcacagatggtttcaacaaacaaaatcaataatactccataagctgtgtggattcatgctcggacaactgctccaccaagaactaatagtgatatcaactactttttgttgtaataaagtaccgatcttaatggtatggaccatttcgtttgtatatcagtatgatgaatatttatgtcacaaacaaatcggttaataaaactctttctccgtattaatagaaatagatgtatattaattctaaatatctaatttattttctcctttatgagaaaacaagacgtggaacttcttcagaaacctgaaacccccaaacaacctcaagggcacaacacaacaacaacaaattttctttcctcaaaacattcacttttctgacgtctcctcgcttcatcatcttgatcatctcgatcccaatatccacaaaagtgtgtatggctttgtatcactcctcgacgttttaactaagcttgttatcgcttgctatgtgcctaagctcatctgctgaaaagtatggagcagcttcacaagttggggatcatatgattagaagtgtactgacaccggaattgatggattgcagaacattgatttgcgggctctatgattacggagaaaacgagagagcaaatgcagttatccataagctgcttcagtgtgggaagtactacgatgatgaaatagcttggacaatcctcactgaaatagcatgttaattgttttttaacaaaactcataaggaaacgtaaaccaaaatttccactaacgtttttagagcattgtttatcaactaatattatctatactagtgttattgttatgccaccaaaccagaaaattgtgtataatcaaatatgtgcgactaacagattattttttttaatacacattagtctacttttttgtcaaaattaaaaaatataatcaatagagccggaccctgacaatttagaggctccaggtagataagattaggctttgttctattttttttagaaaattagctgttttttttcagaaaataagaaaaaatttgatttgtttttcaaaggaaacaattcccttgtttttctattttttctcggcccacagctgtattcagcacaagtgaacagattcatgacacctctacaaaagaataaaacatattcatgtaatttagtaactgtaattaaaaaaaggctgtaattttacgttaatgcatatttatatgccataaacagaataatatcatactcacatcaaaaaatgaatgggggattttttttatatccattatcgaattatctcaccataattacaccttatattattgttgactctagaaatgttaactaatgtagaaaatctagagcacatatataaacaaacaataacaacagagaccagtcacaagtaacacacaacttcctcaatttttataatattctttgtagacaaaaaaaagaaaaaaatatggagagcaacagaatggtgatgtttgtgacaatgatgatagtgatggtaatgggaaaccttctgattgaaacagaagctgatgctccacctcaaccttctccttttaaaacttgttacccaggttgtgttttgattgtatcgttcagaagaaattaccaaagaatttgtggtgtccagtttcctgtatcaagacttgtcttgaacctccttcttcacagatggattccacaaacgaaatcaatcataatgattattactgcaaactaggttgttctactcatcactgcgcttccctttcctctatccaaaatccgagtaagtttcttttgtataagattatatatggtcttttttggtttattgacatttatcaacataagattactgtatttatggtatttttgtgttgttgtttgtggcatgatggagcagatgtggacaaagttgtggactgtgtggattcatgctcggacaagtgctcgaacaagaactagaagtgatattaactacgtactctttattgtgccacagtaccgatctgaatgatatgaaccatttagtttatgtatcattacgatgaatttttgtgtaccacaagcaaatcgatcggttaataaaactatttccccatcttaataaatccaccaagaactgatatatagccatattaactacttttcccttttttcttgtaataaaatattgacaattaatttatttttttacaattataattaacactaggtatgatcgtataagatatattgaatcaatgataagataattaatgtattagagaaagagacaaggagtctttgtggaatattttacagtaagacttggtgagtaaattaatggtttcagttgttcaaaggaatatttcgctatctctctacgcctcgatctccatctatgtatatacaaggattctgtttataacaatgtattattttaacaaaataggtaaatttcaaagtataatcattctttgtttaaacatcgaagaaggtatcacaagtctaggtaatcttaactaataagtgaaatttctgatgctttgttcatatttgcaagtcttaacatgtcttataatctggtttacattgtaaggtgaaatgctgaaaagtgaaaatgagtgcacatcttgatccacaatgtcaaaacttaaaagacaatgattttgtactaatacaataattttataattgatccattgtcaaaattgaacccaggcccggcccataaaagaaacagagttgtggaccttgtggtcaactttttccccctttttttaggttaatcggaaaacaattgtttgtttttggaagcgaaaatcgaactagaaaacacaaccttttaaggctaaacatctacttttctgacaaaaaaagactcaatgttatgtgcctgatgttttaccgtataatatttgttattttcctacacattgtttcgttactgttgtaagtaacgatctggtatttgcatttgtttagacacgtttttttacttccaaaattttatgaagggactagaaacaacaccttataactccgatccaaatcggatcaatcatttgtttagcatattctatttacatgatctgtacatggtcaaagtaagagatatagaagaggaaaaaacacagaatcatatcaccaactattataacagaaaggtcactaagatcgtggagaaaccatagcttgtcgcttggacaatgcccatctgcgtttgtggttttgtcagaaagctcgacagagtgtactagtcgaggtcaagttagaagagtgttgctgctcaatggggttattggtgggactacagactctgcttctctttggttctgagatcctcacgttggcgattgcaacaacaagcacatcgaccacaccgctctcatcttcttcctcctctgtgttggagaatgaatcagtcggtgaatcagatggtatcttcttttccctgtcagctctgtttaggtcagttttctctgtgggactgcgattctggagacacgtagaagatcctgcttgactcttgtgcttcgacttgatacacatggtcttgagtgtccggtctgtgtaaaagagtatccatggatgccctgaaacaaaagtggaatattatgtcagtttagcctcgctgctcatggattccataatcaaatcagaattcatgtatttgggtcgatatataagtcattgctgcaaataaagaagctgggagaggttaaaaggcttacttagcacttcatccgctgtgattctggcagattcttcccttgttagcattctcgccaagagatcacgggcaggtttggacacagactcccacactcccgtgttgaaatcaagcttcacgtttttgattgcttcgaaaatagcatccaatgagtctcccttaaaagggagtacaccagacaagagagcgtataagaggacacctgcactccaaacgtcaaccttctctgaataattttcggaaagaacttcaggtgcaacataagcaggacttcctgccaatcctgacagtgtttgacctgtacaaaccaatgaacaaacatgtaagcacaaacttgacagctctattaagctacagagaaaaggtcaaaatcttatcacaagttcaaacttgacagctcatttaagctacatagaaaaggtcaaactcttatcacaattacaaaatgcaaaacattaacctctagtgaagaagaaagaccataacttgccagtaataacaacataacgaatactttaatcaatcagaacaagtaaagcatgaacagctgctatcaactttactcatagaagactagctttcctcatctagtttaagtcaactttaggcaattacaagttaaactaccagaggaaaagacaaacacaggacagttaaaatatcgtaccgacatgatagattttgggcatcattagttttttcaccagtattgttagacattgatgccatgacaacttatagctttacagcatcaagccgctatgttccttaaccaatggagtcattacacttgacaatttcataaagacactacaagacactgccatgaatagaagcatttttaaatgcgtacacaaattactacaaaaatagtaacgtctgaatataatttaccttttgcaattctcatggcgaggccaaaatcagccagctgtatcttcccagcagctgttaggagaatattctcaggttttatatctctatgcacaactcccatctcatggcaataattgatcactagcataaggtccttgaatatattagctgctcgttgctcagaatacctgcccacctttaccatctgatcaatcaaacgtccccctgaacacagctccatcacaagatggaaacagtctgactcttcatacacagcatgcaatgtgacaacccgaggatgaccagacaaatgttgcattatctcaacttcccggtgaacagtctcctcccccttcttcagagttttacaagcaaactcagtcccattcttcctagacttacagatcctgactgacccaaatttccctttcccaatatttcgaccaaaaacatagtcatcgtctattttattcttcctaccagtctgtgtggaaacatctatgcaccctatcttcctcttcaaacctcttcctgacgaaaccaaagatgatgcaccacaaggaggtgcagtagcaacaccagcaattcgtctcttaaaggaaccaacagactcgacagcttcagtctccttacaccgtttcttaagtctagcataaccctctagtgaaaagtgcgacctgaagttggatgatcgtgatgcagttgaacatgataaatcatctggtaaattctcccaaccctcagtttcactacctttccgcttcttcctcatcaaaccagccaacagataacgaatatcagaatcacttacataagaaaacaacaggtcttctcctgcaaaatcagaacaagcgaatcaatcatcaaaaccaactgcagaaacaaaaatgctatagagccaatcaaaagtttagtacataaaatgtagccaaaaagccaatttccaacacacacacaaaagagaaaaaccaaaaatttactccaccgattacagaaatgtttacataaaacttcacaagtacaatctagaaagcaatgcagagaagagtatgaaaataaaagacgcaacttcaatgactctacccagagattttcgcgcgaaatccataactttttttccggaaaaaagaaagaatgctagatcgaaacagcaaaaaaccaatacttaatccttgaatcaaagtacagaaagaggatcaagctcaaaaattagggaaggtaacgaacctcctttcaccgatcagaaaagagtgatggaacctaatgaatcgaatcgagacgaaatttccgattaagaaatcagagagggaaacaatagcacgaaaattgaatcaatagatgttgatgagcagcgaagatcgaagaggagaaaccctagcaatctcgatgaagcgcaatatttggggacgaaaaagctaagcccaaatcatgcagatagatcttcgtttagagatgttgagagagattgtgtgatatatatatctctgaaccggtacaatgtcgataattagaaaccggtttatcttaaaccttctccttctcgatttggccaatgagttttttgtttttgcgtctttctttaatattttgaggatatcatcaggatcacaccctttggtaaccatcagatccaacatctggttggcctcatctaggcgattctccttgcaaaacccatctatcaaggaactatatgtaatagtattaggagctatacctcgttgaatcatctccttgtgtagttcttcggcctctcgaagttttagtcacgcaaatgaaaaaaatatgtcagctaatactcagatttatggcattatgtaaattcaataatggtttcagatgttctttagtgaagcacaccaagcacaatgtatgtttcggatacatcatcagctccctaaccaatatgtatatgaactcattgcatttgatattttcataaagatactacaagtcactgccctgaatagaagcaatttcctaaataaattcatgtcattctgtaaatttaacactcgttattttcttagtgtatagtccagtacaattagtatgtttcgttgtattagaaataaataaataagaaagttctgaatttaattggttataaaaagaatctgcaaactagagtaaaatagctatatcttctgcaggacaacaagttttccatcaataaagtcacaatacaagaaaggcagaccatgttgcttctccatcttcttcactataacacttgtgattcttcacacactgtaaccaccgtcattttccttcccggccttctcattcttccagctcgatgagcatagtgaacagcatctgttggaagctcaagatcgaccatgagatcacattccgcatcttccaaaccccaagtcaagagctcgttagtcacaagtaccctaacatccctgttcttgaacttctttagaaccgatgatctccttagcttcctgagatctctattcagttctgcggaattcataccacgagcttcgattgtgttgacgtttagagatgtagtaatagtgttgcagggctaaacaaaaatcaaagtgtcagggatttggttttagagtatgcatggaacagaaaacatttaactgcaaaatttagaaaataaaagagaagagataccattttgagaagatgtcaaggcaaacggacaaacattttaacaaaggttaagctactaagcctgattttctctgaaccgcttaactccaggagatcttgtcggctctttgaacctgccaagtgccaacacaaaatcacgagtttctgagtttttagtgatcaatcagtttaaaaacctgcttagtagatcaaatattggcacacataactaacctttgctaagacaatatctgagtgttaaccttttcattgctctaagacaataattaaaaaccaccaaactgttacgaaagcatatctagaaagcttttgtccaattcaccactcaataacatatcgataaccatcttaatactggaagcatctgctgagaacccacaactcttcatttcttcaataagtttagctgatgcagttaagtcaccatctcggagatgtgcccggattagtgtgttgtatgtacaatcatttggcgcattcccatcttcctccatttttctaagcaagatgtttgcttcagacagtgaccctttcttacataatcctgaaatcatcacggtgtatgtcataacattaggcttcactcctttacaaggtaggctacagaataaattccaggcatcttccacttttccacccttgcacatcccctcgatgatggttgtatacataacaataccaagatccatcttactcttttgtaaatcctcaaaaatttccaatgccttttcaagcttcccattgtcacacaagccatcaagcaaaataccatacgtcataacatcaggaagaacaccgtgtgaaaccatttcttggaaaagttcctctgcgagctttattttcccggattgacaaaacccttggacaagaatgctataagtaactgcattggcaaccaagcctctcttagaaatattgcggaagaccttcataccatcgtcaactcttttcaccatacaatatcctttgatgagacttgtaaaagtcacgatatcaggactgcacttattcctaaccataagatccaacatattgttggcctcactaagacggttctgcatacaatacccatccatcaaggtattataagtaataatattaggtgatatacctcttgtgatcatctctttgtacaattcattagcctcctgaagcttcccttctttgacaaaaacatcaagtaatacattgaaagtgatgacattagggacgatttccctactcaccatatccttcaacaacagtgccccatcattccatttaccggctttacaaagacctctcacaagagaattatacgtaacaacactagatttaatccctttcgtctccatttccttgaaaaggctaattgcagcgtctatgcaaccatctctacaaagactatcaatgattgtactgtaagtaaacacatcagccttaacatttctttcttccatctttctgagcaaatccaaggccaaagaagtatctcctgatctacatatcccatttacaatcgaattataagtaaccacatcaggttgacatccgttttccaccatcctatcgactaaaaccacagcttcagacactttaccctcaagaaagagtcctttgatcagagtgttaaacgtggttgtgtcaggctcatacccaagcttcattacttttcccaaaacagaataagcaaaacaagttttacaacaccggcaaaagcagttgatcatgatattcaaagtgtagatgttatgagcaatcccattcaattccagttgcttgcagaaatctaacacgagattgaactgttttgttctggcaatggcactaaagaatctactgaaatcaacaagactaggaagaggacgagacctaatcatttcttggaacagagcaatagcatcatctttcttaatatcaacaataccacttctcaatctctctctgaaacagacattcccattgctaatacttgaaaagtctcgttcgcagctagaaaagaaactcgaaatggtacagagcaaatcagttctaagactacctgtcttcaagagatgaggctgaatcaatctcaaagccttcatatttgtagtaatcgatctctttatcatcattatttcttcagctgagttgtttgtttttgctctgtaacctacaaacatccatggagacggaagagctttgggagaaaaaaaagacaacccggttcaatcatcctttatctataaaccggtttacttttattcgttttaaatcaaattccggaatcgctctgatctattactctgtgaaactatacttccccaccaaatgaatgttagagcatctccatcagtagtattggtttcttaaaaactaaaaaatataaaataataataaaataggagagaggagtgaaaaaagtttctctgcaaataaactatgagatactcctcgtgtcacatgtcatattttaataggttaaattattattttcggaataattatttaaataaataataatattatatgataataattaaaaaacaatattttgagatactccacccaattctaccgatgaagatgggcttagaccataacatgtatccaaagatataaatgtaaataaagtagacacttaaatggatctgaagttaaactttgtaacgattaatcattcttaacgtaactaataacaagttataacagatggtttagtttcataaccacaacatattattacagtttgcctcaaaactcaatgaagttacaaaacaaaagctctctaaatagaagctctaactacatctatagaaggggctaaagacctgcataacaaaaaaccctgctttaacctctcactaaaccggatccggttgaaacattaaaaccgcttcaactggtctttacacgagctcgggtacacgactacagagtctagagataacccgcctttggtatgtgtacaatcgatctgagtcatcgaaaacttaatctttgtcgatgacctattcgattcccggacaacaacgtctccggcgtggtaatgaatccagtttccccgctcagttaacatacattgagatgaggaatattgaccatcttcagtccagagttgaaatcgaaccggtttaatgtcccaaccatggacttgttctgtgttacagacccgtcgaccaaaccacttgcccgaccggcctaattgaagcctgaagaaaatgctgtaggttccaaccgggaatgggaaatcgatttcaccatcaacttcaaaccaccagatttgttggagataagctacagaagaaaacctgcaagcaccaatgaatgttagaccataacatgtatccaaactctgataagaacatgacagatatctaattgtacaaaggagtctaacacatggtaataaactcagatcaccgaaaagctcaaacctgaaaccacatgatcaaaacacaatttcaggtttacaaaagcacacttttgaagagcttgtgttagacaatccaacaaacacacaagttaacgtacaaatgaagcatacttttgcaagaactgagttagtgttaagcaatcaaatcaagcaagtacatgccacagatgattcccattagataattataatctaaagacacaaaaactcaccgagattcatcagtggggatatgactccaatatctacgatcatcaatgcctgtaatggataatcctttggctgaaatggatagacaaacaccactggttcgtttatctatccataccttctgcacaatcaaaactcgtctatgatgattcttgattgaaaaagtttccaatttaagaaaaaaatcttaacttttacatataaacctggaaaaagaagaaacagagagagagagagtgtgtgaagagcgaaccttggtggcatcatcgaatgagttaatcctggagagaaaagcataaaggtgtcttttttgcaaattttcagggaagccaccaaggattttctcgagaacatctctgtaattctgaggaagtttcgattcccaaacacaatcagcccaagaagcgccgcgaaatgctctattgagctttgagaatctacagatctcaacaggatccaaattctcaacaattatagccacacacgcctctggtaaatctcctaaaccaggcttcaagatattccgatccccaaaacaagatgaagaagacaaatcattgtgaagatcagagtgagccacacccatctaaaccttaaaacctcttttcacgagatagaaaaatctcaagaggtttttaagaaaatgggtgatctagatagatcttcaagaaaaagttatgaaatttcgagacttttcgtctttgaggtttcttcgctcgcgaagaaatcaaaattgtttgctcaaagaacagagcaataaagaaggggtttttggtggtggtgactggtgacagacaatattagacggtgacgcaaaaaggcatgtggatcgtctattaaatactatatttctacattttctgttaattttgaagtttgtaataaccatcatcataataaattcaaagctgttggattggatgttttttttgtccgttttcctttttttttctatccgtataatcaaattcatgagttgtaacttgtaagaaccatattacgaaaacaattataatatccaaatcattagccatttgagatttcagttataattttctgttacacctaatccaaaatgtcaacgagaaaatctgtttatttgtatgaacatgtagattgcattctcattttaataacgttttccccatatttacacgatcattgtggatttgtatttgtaatatactaatagtataagttttttggtgtattagtattatattatgttgtatggttcataattgaattctctggaaatcttagacagctacttaaattattgtattattgttatctatacgatacacctagtgatattgttaaatttgaatagaaattataacattgtggcgatagctaatactaaactacaaagtaacttttatcaacatttgaatagtagtaccgtatataattatatatgcttcaagagatccgaacaaagtatatatttgtaatctaatcagttttcagttctcatctatctatctatatatatatatatatatatatatatatatatatatatatatatatatatggttcgaccataccattgccatcgtatgtatgataacttaaaattttggtatcttcatcttgcaaaattgatgatattcacgttccaagttgataaacaattgttgaatcttgtgacgcaaacaaaataaagaaatgtccattatgcttctcagatattttgcagatattttgacgaaaaaaagaaagaaagattatccactcatgcatataacgaatacgaaaatatccaacatcatttcatagctgtcctcttcttgttagataagaaccttaatatttgtttcctcctatcagattaatgtcaggaaaaatataacatttgttttttacgtgggtagaggacgacgcataacacaaccatacatatgataaaacgaaaaaagaaatatattaataaaattggtggtagttcgatcaaatatatagtagatgtagatgatatatctcaagacttgtgtttatattacttttaggaaaatgaatttcttaggtagctaacgaattctcaatctcaaataaatatattagccactagataaacagccataaattaatatacctacaatttctaaatagactaatttgatacaaattaacgaatcatattcatatttaggaaaaaatgtagttaaatcccccaactttcaaaaaatggccaatcaatacgtcaacttagatggaagccatttaaaacatcaacttacagttgactaacaaataaaacatgaactttgcgttgacgaggccacattatacgcgtcgttaagtcgattaacagacccaataaacgacgttttctcccgttagtatctctctgttagtcaagaaacggtgacgtttagaggttaatagaaacccaattagggctttgtcgagaagaaattcccaaatcaaatcaaattcattcttccccaaattgcttttgttcttccccaaatcaaaaaccctaaattatcgacgagtgttagtggatgccattagttagactcaacggcatcatatcgacgattgggtcaccaatggaagacgacgagttagagagttctgtacctgtagttgctccaccggcggaagtcatttcagagtcaggtggaggagatggaggagtagaggcagctgctgttgataacagaagagtttctggacgtcgtcggacaggaagtagagtcagagtcgtagaagatgatgagcctgaaattgatcccgagcttgaaattgatcccgaaccggatttggaagatgattgcgccgtgtatggtgatgacgattgtgatgttgttgatgatgcagtagctggtgaaggcaacgaagataacgttgttgaagaagatgctaacctcaacattgcagatgattttcccgaggcttatagagcagatgaagaagctggttctgattccgacaccggagatgatatctgggatgacgaaaagatcccagaccctttgtcatctgacgacgaagatgaggttgttagagtcggagaagaggcagtttgtggagatgaagacgatccagaggttttgctagctatagagaaaactttcaactctccggatgacttcaagcgtgcagtattgatgtactctttgaagacaaggtataacatcaatttctataggtctgaatcattaatggttgctgctaagtgttgctatgtaaatgagctaggtgttaattgtccgtggagagtcttatgttcatatgagaagaagaagcataagatgcaaataagaatttacttcaacgagcatatatgtgtgaggtccggttatacaaaaatgttgaagcggtctaccattgcagctttgtttgaggaaaggctgagagttaatccaaagatgacaaaatatgagatggttgctgagataaagagagagtacaaattggaagtaactccagatcagtgtgctaaggcgaaaaccaaagttctaaaggcaagaaatgctagtcatgatacccatttttcaaggatatgggactatcaagcagaggtattaaatcggaacccaaacagtgactttgacatcgagacaactgcgagaacgtttattggaagcaagcagaggttttttcgcttgtatatatgttttaattctcaaaaggtttcatggaaacaacattgtagaccagtcataggcatagatggagcgtttttgaaatgggacataaaaggtcatcttcttgctgcagttggaagagatggtgataataggattgttcctctagcttgggcagtggtagaaatagaaaacgatgataactgggactggtttttgaagaaactgtctgaaagtttagggctttgtgaaatggtgaatctagctttaatttcagataagcaatcggtaagcaatcaagctttagtttaagctttattcgtgtttatgcttcagtttgtattctttgtttagtttcagcttttattcatgctttagtttcagctttattcatgctttagtttcagctttattcatgctttgtttagtttcagcttttattcatggatcactttcagcttttattcttggtttagtttcagcttttaatgatggattcatatttctgtgatttttcagggtcttgtcaaagcaatccataatgtactgccacaagcggagcatcgccaatgttctaagcacataatggataattggaagagggacagccatgatatggagctacaacgtttgttttggaagatatcccgcagttacaccatagaagagttcaacactcatatggcgaatctaaagagctacaatcctcaggcttatgcatctctgcagcttactagtcctatgacctggtcagagccttctttcgaataggtacctgctgtaatgacaacctaaacaatttgagtgagtcttttaataggactattagacaagccagaagaaagccgttattggatatgctagaagacatccggaggcaatgcatggtcagaactgcaaagaggtttatcatagctgagaggttaaagtcaagatttactccgagagctcatgctgagattgaaaaaatgattgctggttctgcaggttgcgaaagacatttggcgagaaacaatttgcatgagatatatgtgaatgatgttggatactttgttgatatggataaaaagacttgtggttgcaggaaatgggagatggttggaatcccatgtgttcatacaccatgtgtgataataggcagaaaagaaaaggttgaagactatgttagtgactactacacaaaggtaagatggagagagacatacagagatggtattaggcctgtccaaggaatgccattgtggcctagaatgagtaggttgcctgtcttaccgccaccttggagaagaggcaatcctggaagacaaagtaactatgctagaaagaaaggaagatatgaaacagcctcttcttcaaacaagaacaagatgtcacgggctaatcgaataatgacatgctctaattgtaagcaagaagggcacaacaagagctcatgtaagaatgctactgtcctgttaccaccaccgagaccaagaggtcgaccaagtctaaatcaggttacacttcttttacgtttcagattctcaacaagagcttcattgaattatgtacgtttcagattctcatcaaggcttcattgaattaggaaccacaaggagcacaatcttatcaagaacaagcagtttcaggtcatggatcacaagaacaagcagcttcgggtcatggatcacaaggacatggttcacaaagacatggatcacaagaacaagcagcttctggtcatggatcacaaggacatgggtcacaaggatcaagagctcatggaccgcagagacaaagggcatcacaaagacaaagatcaagagctcatgttagatcagaagcacaagcacaatctcaaccacaagcgcaagcccaagaacaaagacttgctgggttagaatcatggtttaattgttcatctcagctctaattgtagtatttctgtgacatttgcgtttttttttgtcaaaaacttaagctttgcctcagggttttttggttgtttgaacttaagcacttctcttgttgtttgcttcttgttaaactttgaagaagataacctatgtttttgttgtttggttcttcttgtatgcaaacacatgatctagaaaaacatcacactcattttcattacgatagtaaaatacaaacacaaagacaaagaacaaaacgttgcactagtaaccaagaacaagcttttgttctttggtattaccgaacattatcataccaaccacaatcacaatgacaataaaaccaagacacaccaagcaacatttgatcatccgtttccaattcttgatttccctttcgctacacatagcttcttcctttacttcttttatcatagtcttcaactgctcaatctcgattgcaacctcacatttggccttcattatctcactgtcaatgctggagatttttggtaaagcctctacaacctcttcgtacacgccatattcaacccatttaaacaaatgatcctgttttcaatcggaaatcaattaccaaccaaaccaaaaagacacaaactcaattcaacttacatcttgtttcgttggacaccgaaagaatggccttccaggattcgactttgaagctgaagtatagatgacgacctccaaaccacagtgacacttcgaagctaagccacgtccccaacaacctccgtctagaatactaggataagaatttccagatttgcagctcatttcttcagcttttgatggagaatttggagaaaaagcagagaatttggagaagaagaagagaattagggaattagggatttaaagtattggatttggggttttttgacaaacaatcgggtttctattaacctataaacgtcaccgtttcttgactaacagagagatactaacgggagaaaacgtcgtttattgggtctgttaatcgacttaacgacgcgtataatgtggcctcgtcaacgcaaagttcatgttttatttgttagtcaattgtaagttgatgttttaaatagcttccatctaaattgacatattgattggccattttttgaaagttgggggatttaacgacatttttcccttcatatttattagttacgggccctaagcccgtacccattcatagcccaacaatctattttaggatacagaaatgacaagtttcgctaattcacacacaaatgataagcttggctaattcatacacaaactaatttaattaggctaaatcatacattgaacaaaagtattcttccgattagtttaccaaatatattatttggttcgtttgaaatctcttatatcacggtttaataacgccgtggtattcactgttacgactagctcgccggagaagaagaagaatgaaggaggagaagaaagacgacggagtaatggctgaggagaagccttacatgttctggatttggactttggcttctacgattttccgattattcctgatcttttccccggcaaatatcaacctatcttcccgtccggaggtctccacccctcacaccagccttcgccgccgtaccgcctctctctctctctctcatcctcctcgctctctcatacaatctctattccataatctcgattccgcttacgattctgcgtttgtttttgaatgttttcagttgctgaaggttactggttgaagcagtcatcactgtcgccatacgcaggtttgtgattgattcgtctatctacatatgagaatttgaaattccactattgtgcaagttaaaatcgtggtgtacttgtttcttcttctggtcaggatcaatgtatcatggctctccattgctactctccattctcggtcctctcacagttcagaggtagagtgaatgttaatctattcaaagttcagttcttgagcttagtttcttagggttctcgcattgtataatttgagccaaagtgacaagtttgttgttgcaggatcgaagggcaatcgagtcatcatttgtgcaggtatttatgattatacatgtataagttagattaagaaattgtataagtgatcaagagttgtaagtaactttgtgattttttttggaattagtgatcaagagctttgtagtcatgcggatgataccaacaatcttctggatacagtttggtttttgttattgcagatttacttagtgcactgcttcttcgagctattggtcagaagctccagaagtcttatagaatgaatttgaggccacttggtgttcttaggtcatcgcaggatagaggtacacttaagttattcgactatgagaacttagtagtataacatatggattacaatatttttgggaatcgatgtttagtctgattccttgtatatttttgttgaagtttaactctgtgacaatttgtacaaaatcatatttctattttttgatcagaagggtattgctgatctctccttttttctgtttccctcagggatccttccttgtggagatattgctgctcttgtgtatctgtggaatcctttcacaatactttcttgtgttggcttatctacttctccaatagaaaatttggctgtcattgtgtctctttatggagcagttactcgtaagcagttgttggaaagtgttctttgtatctatcttaaatgaaaaacctgctttcggtttgtagtacgctcatccctgtcgttcttcttctcaacaactgtcttctacccttgcaggacgagttcctctggctgcatttgggttaatcatggccacacatttgtctctttattcagcacctttagtgtttccagtatgcataatctcaattccattttcatttttaatgtatctcaaagtttttcaggggagtcagattctaattgctcttatgtttccttcagttgatctttctgttgggatatggtttagatgcccctcctataaaaaagttccttcagacaagacatggaggggttgagactggatcaacctctgatgtttctaaacaagaaaagttgactccgactacacaacttcctttctcatggagaacagtcttgcatttcgtattttgggtattggtttggtcgagctatgtgttggttttatgcagcttatcattgaaacaatatggtgggcttgaggagatgttcaaaaggtaccacttatctgtgaaatctcaatttatttgtcataacctgaatatccgttgtcatatacaggagtatgtataattatattattattacaatttcagtattaatgttgaacatttttgtgcttatgtctcctattgtaggacttatggtttcattctcagaatcgaagatctgtcaccaaacattggtgtcttttggtaagtctaagttcaaatctttattgagctatgctagtttctgtatatcttcacatattcatccgccttttctatctcatttctcaggtacttcttcgcagaagccttcgagttttccagaaattatctcctgataattttcaacttatatattctccttacttcgataccatctttaatgttccggttaaaacatcgaccctgcttccttgctttcgcttatttagccttcacttcgattcttaaatcttatccttcagtaagtaatttaacttcactatgaaacaatattgtatctttcttgaaaaagctttctgttcatagaatcttaaatcttgaacgtattccttactctcatcactaggttggagatgcagctttatacttgagtttatgggcattgtttgtcaatgaattaacaggtagtgaaacaaattccatctcatctctttcagtatgatcttgaaccgtcatgaacttttcacatctaactgggcttctgtgtaaacgttagacatggagtactcgttctttatcttctgtggatatatcggattttcgcttctcagccctgtgatgcacaatttctggatatggagggtaaagcttcaaactcaactccattcaatcacaataaaacttaaaagaaaccagaacccatttgatatttttggatttacagggaactggaaatgcaaacttctacttcggaaatgctatgggctatgcgtgctttcaggttaaaagcctaaaaccttggatctattttcgacctcattgagtcgtgaaatatcaaccaaaaggcttgttatttagcttttaagggtcttatcttagtagtttggttcgttgtttacgggtttaagattttgactgtatttatttcagtttatgtttgtggagaagagtgtaaacgcaatgctcaaccacgaccaggcgctgaagaaagctactgcagaaatgactaagaactgagccattacagtcattttttaatattcggtgttaagagtctctaactataaacttttgtggcaaaattagtggtcttcttaggccaaacgcagaagccaaaaagcgttgaacaacatgtattaggagtcgattggtttagtggtaaagtgtcacatttgccagtgattgtagttgcacagtttaaacaagacctcaaactcggacatccaaaccaaatgagacgacaattttttttacgtcgcgaccacttagttacgatttcttggttaagtagtttattgtgttaaatgtatttcatgatgttcataactttttcagtttttgcaatgaagattgttttacatgaaatggaatagaaaatataattatagagctacagagaatattattttgttagatgcaaagggtgattaaagttgggtggacctttatgacaagtgcaaaatcacgtggttttgaagtgcgaacaaaacaaatcaacacttttggagttatgagcatcaatttttttatgtatatatataaagtttaaactttaaaccaatctcatacttaatagtataaaatacaatcgatgccatgcaaatttatacgtataggttgtgtgtatatatgtgcattaataatcaaatgatattcatgtttccctaggctcctgatttatgaaatatgacgaagttttttggtcattgcttaccgcaatgccaattattttttacttcgctcacaattttcttcgcgagttgctaatatttttattctttaagaaacactaattgacatcgtgagcgtttttgaacaatttcacttataaattataatgtacataatgcgatatatcttagacatgttgtgttttccgaagtatataatactcatatatacacattccacgggaaatcctttatttttcttctaattatgatggattgtctatatgttaatattataagaatatcatagaatcttcgttgacttgtattaagtaacagcgaaattgcttacgaaacagtacaaccaaattcactttgaatcatttaaacaaatatcgactgtcgttcttcatagttatataataactccagaatatttatctaactcattaagtaattaatttatatttttatggttaatttaaataccctaccgtttagtccgtagtgataggttagaaattatttttggtcatcactcatcagacctgttattcaatttttatgtgtggtttaaaaaactaatattttgactatcttaattaatagcatgcatcgttagtataaaattttatactaatttgtatggctcaaaatttatcccgaataaaatagctagcggaaacccgacaaatcctatagaacactcgtgttaactgctaagtaacgtggctttgaaatggttaaatacaaacgaaggattaacattacgtaagtcaaaaaacaaaacaaaaaaagctataaaatgagatgtagaagtaggacaatggttcgatatgtgactccccccacggctggcgttttacttttgtgaaaggtcaaaccctatggtctatggagacaagcagacacgtacgaccaaatctgtctttttgtatttcctttaacctaaaaatgattttttcttaggttaaatatatcaaacatagtatatatatcttttgccctttcacattttcattaaccgtctttaattgacgtagccactaggagcgtctccggcttgcggttaaggccgtttagctcttttcctttgcatattctcttcatggggttagatttatggtctactttaattagtcgatccaacaaaaaaattgtcgtcaagtttgtccgcaaaggtgaattttacccttcccttggtttgtcacattcataacaaaggaggtgatattaaaataagcttataattaaattaataattaatcaaatcatttggttcgtcacattcgattatatcagagtgaagataatcattcttactttggttctttattttgtgttacatgctgtgtaattcgtttgaaggttaaaagtttaaacactaaaaaaaaaactaatatgaaagggccaaagggcttgcctcatgcgtacggcacagacaagattaacgaactttctccacaattctctcgaatcctcgtgtagcttcaatcgtctttgatcataaagtcttctttcgatttatctaaataagttttttttttaattttttttttcctatgtactatttatatatccagtatccgtaatagttcatcgacaaaaataaatttctaaaagacatcaaaatatatgtatatttgatgcagagcacctacactgggacttaccttccattttttttgttttcaatttgtccattgatgatgtacatttatttctgtattttgttagatatagaggacaatatgcatatggtatcttaagtcttaaccctagaaaaattgaagcttggaaatgttaacactgtcgtcaacaacggtttgatcaaaacaaaatgttgatttgttggtcgattcatgtgaatggctaaatcgatataaatgtgtagaacaaaatatattcaaggcttattatatatgaaagtataataagaattaagtgactttttgaatatactctttacgtttacaataccttttcaaatttgtaaacgtaaattcataattatttgtaggaaaaacaaacaaataaattacagcaaaaattacaagaaggataacatttttgcaatacgagtatcacgtggtcaactttcaaagccaataactttatgccacgttatagagcagaacatgtaggacccaagtgcactctaagcaaatacagttcttaccagggaacagctccgaccaataattaattttcgtactctttaattttaacttaaattataaactgaaagtagtttataaatactcaaatcgtcaaaatttcttgccatccaattctttttttttgtcggctcttgccatcaaattcaaaatttcaaaatttccaaaactataataacagaagaaaactttttttcgtcatgaaaaaaaaaaaattatatgtataaaaagattgcaaaacaagccaaatagaatcaatttgagcaagtagctagataatattaaattattaatattccaatgcaaatattaaatcttaatacgactaattttttttgacaagatattaagcacaacataataaggaaaattaaacaaaaacaatagctagcctattgagttgtctctatcttggtacatccccctagcaatcacatctcaatactctaatgagtctatctattaattatgttttcaagttttttttaatattaatttcactaaaaccctaacgaggttataccattttggatttttctccacccagtaagaaacctgccaatcacacacaaacacataccaatccaaccctaatcctaaaataccatgttggattttgctagcaatgctaataatgttacgttttgtctaaaccctgtgtatatagtagtttctaggtcgaaactttaaagttgtcttttttgacccaggattactgatgaaggaaccactttttgtcaccaattatgtagcactcaaattgctttagctaatggaatattgagagaaaggtgatcatagatattaacggataagtatatttacagtaacctacctagttgagtttttgtgggtaaaaaaagtagaattgcatggtttgttgcataaatcctgagcccgtggctcaatggctaaaacacatattgtcatgtgattggtttaacctaatgggtcccaagagccgtctgatgttatacgtctcacaattaagccaaaaaagaagaagataataatgataaatagtatgattcaactctcaggttaattataatctggacaagagaacttgcagaatcggtggttgataacaggatctaaaagctgatgtatgtattattttgcaagatcttgagtttgaccaatggaaaatttaagtatttgaagataataatgataatgattaaaaacacatgacaagaagatctaaagaagagattctgagcatgaatgagaacaaactgaaatgtactttattagttagtttatatttgcttccctggtgtcaaagattttattagatactgaaattttagcatagatatgggatgatagaaagatatataaacaacaacgaagtcaataatgcaaagctggaaacttctatttatccctgtttggtaaccaacaagagtctcaaattttaagttacaacatcagttttttactataatcattagtttaatatccaatctaatggtgaaaaagaggctagagcccacaaaataatgtcctaaaatgaagctgaaaacttgtctaatgttcagacttgtgttttaatgccatatgagacacaaaaaactaggaggaaagaggaaccttcttataatatttcttgaattttttttctatacttaagaaaagctgccctttcacacggataatgaatcatatatggtttctataaacaggttttaagtaacccattttttaatacttaaaaccttattttcattctgcaactactttaaatgagaacatgatgatatattatttaatctaatgagttatgtctagagacttgcccttgcctatttaagcattcatcataatgttgacgaagatgggccagcactcaacttctctttctttcttcttctttgtctctttcctctcttcacgttttcagtttctgtctaaagaacacaaacccaagaagaagtcagagaagagagaaaaaagttccatttgtagtttcatatcaaaacaaatcatatatactcttcttaaatttgtcttactgtaatgtgggcattgctcatttgggtttctttgcttctcataagtatcacacattgggtttatagttggagaaatcctaaatgcagagggaaacttccacctggttccatgggtttccctttactcggcgagagtatccaattcttcaagccaaacaaaacttcagacatccctccttttatcaaagagagagttaagaagtaagtatctcacttctctcattcaaaacaatgtgattaatgcttataatgtgtgttttaaaagtgatgttgatatgtgcaggtatggcccaattttcaagaccaatctggtggggagaccagttattgtatcaacagatgctgatttgagttattttgtgtttaaccaagagggacgttgtttccagagttggtatccagacacttttacacacatctttgggaagaagaatgtgggttcattacatggtttcatgtacaagtaccttaaaaacatggttttgactctctttggccatgatggtctcaagaagatgcttcctcaagtagaaatgactgccaataagaggttggagctttggtcaaatcaagattcagtagaactcaaagatgcaaccgcaagcgtgagtttcccattcagaatatagacttttatatatgtttcagtctataatgttttattacttgtctaacatgttagtatgatcagatgatatttgatctcaccgcgaagaagttgatcagccatgatccagacaagtcatcagagaatctaagggcaaactttgttgctttcatacagggattgatctctttcccttttgatatcccaggcacagcttatcacaaatgtctacaggtgaatatcaacgttcatgcttcaaaagctttactcacattggtactaatgcttgaaacttgctttgcagggtagggcaaaggcaatgaaaatgttgaggaatatgcttcaagagaggcgtgagaaccctcggaagaatccaagtgatttctttgattatgttattgaagagattcagaaagaagggacaattctgacagaagagattgcactggatttgatgtttgtcttgctatttgccagctttgaaacaacttctttggctctaactttagctatcaagtttctctcagatgaccctgaagtcctaaagcgtttaacggttagtcagaagatacaagtagcaaacatgacaagttgtatggttattatcgaaaaagctaaactgatatgtgttcatcttcatcaggaagaacatgagacaattctgagaaaccgggaagatgcagactctggacttacatgggaagaatacaagtcaatgacttacacatttcaggttgctttaaagttttatcaaagtaagatatcttctttagtttcaaatacaaaatccagctgatcctaagtcttaaaattgttctataagcagttcataaacgaaaccgcgagactagcaaatatagttcctgcaatcttcagaaaggcgttgagagatataaaattcaaaggtatgatttaataaaggaacaatatataacattctcaatgattaagtgcctcttttaatctttatattatcataaagagtttgtcaatgatacagattatacgattccagccggctgggcggtgatggtctgtccaccagctgtacatttgaatcccgaaatgtataaagatcctttagtctttaatccatcaagatgggaggtgagtggtcaaacctaaataagtaacttttactccaagtaaagtaaaaataataataacaaaacaaatcaaacaatacatacagggatcaaaagttacaaacgcatcaaagcacttcatggcgtttggtggaggtatgaggttctgcgttggaaccgacttcacaaaattgcagatggctgcgtttcttcacagcttggtaacaaaatacaggtttgacataatcatctctcttaagtcattattctttcaactgtgtaagaacactaaggctgattttgattccggctcttgaaattatcaggtgggaggagataaaaggagggaatataactcgaacgcctggattacagtttccaaatggttaccatgtcaaactccataagaagagagactagagaatgttttttaattagtgaataattggtaggatacatacgctatacattttccgagactgtaataatcttgaacaccctaataagtgaaaaggggaagatttgttttaggttaaaggctaagaatcagctacaaaggtgaatacacaattttgttagtagcttctgtgtctggtcagaaactgtaatgtatagtattattgatcacagacatggcatgtgctttgaactaagttctgatcaaatcctatatgtgaacttcctaaaatagtgtttctgtgcatctatatttaatgaatctatcggttttaaagttctctaatctacaaaacttgaagaatctcactaagcctaaatctactaagcagaaaacttcaatatgagtttattgatacacatcaaaacataaggattaagatgaagataaattatcatatccactcaacaaaaatccagttcaatttagatacacaggacaataaatgttagttagaaagagagcaataaatacagtaatgatgattgaaatatcaacaagaccatttagaagtaggataacagtctaggcgatgacaccatttgcaatgcttgttcccattctctccgtcgaacagcatcaccaacccaactgttaaaccggcgacaaccaaaacagcggcaacaaagaacaacacgtactggcacgggttatattttgatctagcacgggcaccgtactgagaagagttgcggaactcttcccacccagactgaggctgcatcagtaggataaacccaaggcaaaacccagtcaagagaccgccaatgtgagcaaagttgtctacccaaggaagcaaacctattgccaaattgattgcgatgatgaacaagaacgataacaaagcacaaagctggaaaaattcagaagatcgtcaaggcaatgaaaccatgttatattttcggttaatgtttgtatcttgggaaagaacatgacacagtaccttgctcttgtagatagtccagttggtgagcagctcagataacattgctcccatgagtccaaggagagcacccgaggcaccaacagagatgcttttttgaaggaagagagctgagagaatgcttccgccaaatcccgaaatcagatagatgagcccaatccttactgcagaatcgttttacaagacattttgaatacatgaatagaacaggagaatgagaagatcgcgggtaaaatgagcggtgataggaaagacttactgaagccaaactgttgctcaaggcggataccgaagatgatcacatcaaacatattcataacaaggtgaatgataccggcatggagccacatagcagtgatgagcctccatttttcatttccttgcacgactttcttccaatccaaagctcccaatttctccaatctgaaaccatcatcgggttagaatcatcgcaggtcggatagagcatggaatcacagcaattccaagagttacagaccccaatgctaatgaagctcatgtgtcataatcttaaatccaaatatgtcctcagagatacaagtttgacctcaatcatgttgtttagacaacaaaggaaaagactccgatgagctgtatctcaagaacagagtttgtttcgaatacaacatggcatgaacaaactaatcaaagcaatcacaaataacaatgacgtgtgaaaggatcgcaaaattgaaaaataaagatgaaacgaaacgaaagatactagtgaaataccccacaagccttaacctgatttgttaaggcagtaatcaaaaccttgaaacattggagaaataaacagagacttttaagggtttatgaattgaaacagacaacaaaagttcacaaaaatttggctttcgagttcttttagaaacttacgttgaagaagatggacccaagaaagggttctctctgagtggctgaaacgagaacctgcggagaagctttgcaacgcaatctccgttggctcccgtggttgtcttagggcagtcgttggtgtacatgacaacgatgaagatggagacattagccacgacaattgttggagtcagccaagccgtccactgggtgtcccctctgtgtttcctacctctctccatatctctactcctcatttttctcttctctcgtcgtatgaagaacagaattggtgtttctataaatagaaaacacagagtttgtatcaacagaagaaagacaaagaatagattaagacaggacacaaggatacatagtatctatttatcagagattcaggcagaagtttttaaccttcaattctcttctcggtggtggcaggctctttcaagatatttcctttaactttctgataaatatctcagacctgagagaaaataatcagacgtgaaatcaattattaatacattgattgattctgttaccttcgtcatttgtggagtattaatttgttaataagttgatgtgagagagaaaagtctacggggaatgtcaataaggcatattaataagcttactataatagatttctacataaaatgtgcctgcactatccattttatttatctgacaaaaattaacggatccagtcaaaaactgattttgatgtttacaaggtcaacatgaacattagctaatctaataataagtccaattacgaatcatttacaagggtaaaatggtttaggtaggatttagattcagtttttagttgtatagctgtcaactacacctgtcatgaaactttctttgaagaaaacttggttaaccaaagttcctatatatagctgaatgtagaaagcatataactctgttaaaacatcgatgaaccttagcgatctctagtttgataggtaccgcgtagaatttacctgactaggttggctgttttagctgtatcatgaacaagggactgcgaagctggagatatgattgaactccatagcagattcgcataggagagatcatctcatctcctgcagaaactttagtgcaaggcgtatgcaagtcagaatttcgtaaaaatggtaatggagagtttgagtcaggtggggatcaaaatatttccttccaatacattgacgaggaggaaactttcgacgaagatttatgattgatgtgcttccattcgttagaaaatcacacattgtctacgtttttttggttaagaaaccgacacgcactataaatctattgtaactccccatagccaagtgtgctcgagatgtcatgctggttctaggaaccaaaacagaaagaggcaataaaatcagaaaagagccaataagacaacaatgtaatataccgagaagattaaaacgacttgagtaaagcaactaactttctatcgaaaattcaggaatactttcatatatagtgacaatttcatgaagcaaattaaataactatcaccatatgcaaattaatctatgaaaagatctcacagtcacagattgatctcaaatgacctcgatacatcgcattgagatactacagcaaaaagccaaaaagtcaaaagtatatactttactacgttaaaacaatattcaacatcaaaaccccaaaacatatcaatcagacaatgaaattacaaaactgaaatcatatatcctcaaatcggtcgtcatcaaccatggttacactgaattagaaagtgctgctacatagaaatcgaacaatgaagctcaccgatagagtaaaattaggcatgcttccatctccgagagctaaaatcctagagaccaccactctctgccgacgctaaaggttgaagatgaagaagacgacattgctttgacgggccttttaaaaatattaaaagagagacacatcaatacctcgtggcccatttatatagaccccgcttaattttgtctgattgttgactgttgacttttagggaccacatgaaactattaaacgacttttcggatttcaaatattcaattgagagattatttttctgttaatttcccttaatcatcatcatcgtcttcatcatcatctctctctcttctcttcgttcctctttctttacacgcttgaaaccctagcaatttcaatttcgtttcctctaatagaatcttcatctttttatggcgtaacgttacacgaatttcaacgatttaggttttttttttttttttttgaagaatcaaacacaaagatagaaacaatgtcaacggagactaccacgggaaattcctcgttaattccagcatcatcatcatcgtcatcctccgacgcaatcgatccagctccgttgctttttaacggcgacgataatgaaggaaacaacggaggaggaggtggggaacggagatctgtcaggagacaagggttgagagaagctgcgaggtttcttagtcgtgctagtagcggacgcgtgatgcgtgagccatctatgcttgtgagagaagccgcggcggagcagctcgaggagaggcagagcgattgggcttattcgaagcctgtggtggtgcttgatatcgtttggaatctggcttttgtttctgttgctacggctattttggtgatgagcaggaaagaacatccgattatgccgcttagagtttggcttttggggtatgctttgcaatgcgtgttgcatatggtttgtgtctgtgttgagtatcggaggaggaacaggaggagaaccaataggacgacgacgacgactcctccacggtcacgttcttcttcttcctcttcatcttcttcttccttggaggaagaagctttgggttccaggaggaattcaggtgtgcaggacttgtcgcttggccacttggataccgaaagcagcaggtatgaagttttggtgtgaattttgcctcaagcttgcctaaatttcgaattacggataagtagatacttgcatgacctgtgagctttagctggtgaaagaaaatattggatgtgatagttatgatgacttaaagatgtgagttttggtttgaatgatcgaattgtttgcttattctgttatcttctccaacttgtagtggtttcttatcaatacttttgtctgcaccttttacaccaagtgtatattttctgttccttgatgttttggtatgtgttcttatttcgcttaccgtttccaaagcagtgttgctaagcatctggaatctgccaatacgatgttttcttttatatggtggatcattggattctactgggtatctgctggtggccaagagttggcacaagaatcccctcggatttactggtttgttatatgcctccatcttcaatgttaacctattcaaccacttccactactgaatgtctttacttatttcaggctgtctattgtctttcttggtttcgatgtgttctttgttgtcttctgtgttgcgttggcctgcgttattggaattgcggtttgctgttgcctgccatgcatcattgcagttttgtacgctgttgctgatcaggtacttctcataaccaattccatcttatatcataagtcgccacattgtgctatttgttttaacacaacatgataaaaatgcaggaaggggcttcaaaagaagacattgagcagctcaccaaattcaagtttcgcaaactaggtgatgccaacaaacacactaatgatgaagcccaaggaactaccgagggaataatgactgagtgtggtacagattcacccattgaacatactcttttgcaagaagatgcagtaagtatacactataacacaccaatctctcctccttgacgaataacccctagatagataattatgcttcttggttcttatgattctgcattacaggaatgttgcatctgtctctctgcatatgaagacggaacagagctaagggaactaccttgtggacaccatttccactgttcatgcgtagacaaatggctatacatcaacgcgacttgcccactctgcaaatacaacatcctcaagagtagcaacttggatcgagaggaagtctagaggaaacaactttacgtgttcatgacccacgacatttgatcaggagactttgggttaaggtaaaaaacaagactggtttgtttttttagatacgatgcattgtttgtgaaatgataatgatatctatacgaaattattacacttttgtttgtttttgatttttggtttggaaactaatcaggtctgtacatctatctgtatctatcttcttttacttgaaaccaatgttttgtagtttgtattacctctttctttctcagtcgacctcgaattgttagagatttccatcatcgtagatctttagtcatgtctcaatgacgattttgattgttactttaaagtttttccaatttgttctttggtctcttgcttaagtatagataaatgatatcatttctagctcaaaaacaccatcactattaaaattggaaaaaaaaatacataccaaaccaaatcagattagaccctttttttttagagcgtatactttgacaaaatttgaacaatacaaatcaaactcgagtcagaaaagattcaaacaaatgaatcaaattttttgagtcggaacctgaagtattttagtccgttcgtgataaagaaaaccgagaatgtaccggtttatcttcagacccggttgtttgtccggtttggtaaaattagaacctaacctttttatccagaactggagactttggaagaactatagaagtgttgttctcttcgtatcgtcctcaatcctcatggagactattatcaggtgcttttctttttcatttctcctcatctatggctttgatacgaccatttagtttcttattctcctattgcgaaagctactatctttcacatccctaggaatcggacactatcttatctctagtgttgatatctgtatgttagccatttagattgcctcagagttttttggtttcaccctgagttagaaattgtgagtctcggcctgatatattagaatgcttttggccggactagagtggggttttgttgtgtaaactgccacatgctgctaaattggcttgttaggtgatgatgcttttcatgcccgccaggtgttcgacgaattgcctcattaattttcctcggcttgtttcttaatattttttggcgttttataaatctgattcctttaagatatatctcattcgatattagtattactagatttaagaaaatcagtagtttgtctactaaatcaacaaagttgatgtctttttatttcagccttgtcggtgtatctgcgaatagtatgttcttattgctgtctaatttggattccatgtgctttgcaggctgttttgagcaaacgctgtgataaagaggctttctttcttgctagcaagtacacacgagtgacatggcggcatcaacttcaacccgattccttgttctgctcaaagatttttctgccttcagaaagatatcatggacttgtgctgcaactaattttcaccgccaatctcgttttttatgccatgttgcgaaagaagacgggtctcttactcttgcaagccttgatttggggaacaaaccacggaaatttgggaagggtaaggcgatgaagcttgagggaagttttgttactgaaatgggtcaaggtaaggtaagagcggtaaagaacgataaaatgaaagttgtcaaggaaaaaaagccagctgagatagtgtctcctttgttttctgcaaaatcctttgaggagcttggcctcccggattccttgttagacagtttggaaagagaaggtttctctgtcccaacagatgtccaatcagcagctgtcccggcaataatcaaaggtcacgatgcagtgattcagtcttacacaggatctggcaaaacattagcttatctgcttccaatattgtccgaaattggtcctctagcagaaaaatctagaagttcgcacagtgaaaatgataagaggactgagattcaggcaatgatcgtggctccatcaagagaactcggtatgcagatagtaagagaggtagagaaactgctcggacctgttcaccgtagaatggttcagcagttggtaggaggtgcaaaccgaatgaggcaagaagaggcccttaagaaaaataaacctgcaattgttgttggcactcccgggagaattgcagagataagcaaaggtggaaaattgcacactcatgggtgtagattcttggtgctagacgaagtcgatgagcttttatcgtttaatttccgagaagatatccatcgaatactagaacatgtaggaaagagatctggggctggtcctaaaggagaagtcgatgaacgggctaaccggcagaccattctagtctctgcaactgtgccattctcggttatccgagcagctaaaagctggagtcacgagccggttcttgtccaagccaacaaagtcactcctcttgataccgttcaaccatctgcaccggtaatgagcttgactcccacaacttctgaagctgatggccagattcagactactattcagagcttacctccagctttaaaacactattactgcatctcaaagcatcaacacaaagtcgacacgttaaggagatgcgttcacgccctcgatgcccaatcggttatagctttcatgaaccactcaaggcagctcaaagatgtggtctacaaactcgaagctcgtggtatgaattcagctgagatgcacggagatctcgggaagctagggagatcaacagttctaaagaagttcaagaacggggaaatcaaggtacttgtgacaaacgagctctctgcccggggtctggatgttgcggaatgtgatctggtggtgaatcttgagcttccaactgatgcggttcactatgctcatcgagctgggagaacagggaggctgggaaggaaagggacggtggtaacagtgtgcgaggaatcacaagtgtttatagtgaagaagatggagaagcagcttggtttgcctttcttgtattgtgagtttgttgatggagagcttgttgtcactgaggaagataaagctattataaggtgaaaatctaaagatgtaattttcagatactattattactattgaaaattcagagtcttgtccctttttcttatatattgtaaacatatttttaccagacgaagaacatctaaaaccagtgtcgaatttactccagttttgaccgactctgactattacgaaaacccataggctccatgaaacagcaggcccctgaggcatttcaccgaacaacttgtgggctatatcattgaaccggtttcgaccgtataactcagctaaaccaattccagtatagctttgactgaaccggtttaatcgataagtttaaggtattcttttgtcacacagagtgagtttgaagaagaagaacgattcagcttgagatggtgaggatgatgatacggagattgagttctcaagcttcgagatttgttcagcctcgtctcctggagacaggtactctgagaattgctttgattaattgcccaaatgagctacttttttgctgcgaacgcggcttctctactttcagcgatagaaatctctcttatagagacaaattgagcagtgggcttgtcggtattaaggcagatgatgctgttgatctgttccgagacatgattcagtctcgtcctcttcccactgttatagatttcaatagattgtttagtgccattgccaaaacgaaacagtatgagctagtgttagctctctgcaagcaaatggaatcgaagggaattgcacatagcatctacactttgagtattatgatcaattgtttctgtcgctgtcgtaaactttcttacgctttttctactatggggaagatcatgaaacttgggtatgagcctgatacagtcatctttaacactctactcaatggcttatgtctcgagtgtagagtttctgaagctctggaattagttgatcgaatggtagaaatgggacataaacccactctcataacgcttaacactctggtcaatggcctttgtctcaacggtaaagtctctgatgctgtggttttgattgatcgaatggttgagactggctttcaacccaatgaagtaacttatggaccggttttaaatgtaatgtgtaagtccggccaaactgcccttgccatggagttgctcagaaagatggaagaaagaaatatcaagctcgatgcagtcaaatacagtatcatcattgatggtctttgcaaagatgggagcctcgacaatgcattcaaccttttcaatgaaatggaaatcaaagggttcaaagctgatattattacctacaacactctcattggaggcttttgtaatgctggtagatgggatgatggtgccaagttattgagggatatgatcaagaggaaaatcagccccaacgttgtcacattcagtgttttgattgatagttttgtgaaagagggaaaactacgagaggccgatcaactgctcaaggagatgatgcaacgaggtatagctcctaatactattacatataattccttgatagatgggttttgcaaggagaaccgcctagaggaggccatccagatggtggatctgatgattagcaagggatgcgatcctgatatcatgacgtttaatatcctcataaatggatattgtaaggctaatcggattgacgatggtttggaactcttccgcgaaatgtctctgagaggagtgattgctaatacagttacttataacactcttgtccaagggttttgtcaatcgggaaaacttgaggttgccaaaaaactcttccaagagatggtttctcggcgtgttcgtcctgatattgtgtcctacaaaatattgctggatgggttgtgtgacaatggagaactagagaaagcattggaaatatttggaaaaatagagaagagtaagatggagcttgatattggtatatatatgatcattatccatgggatgtgcaatgctagtaaggtggatgatgcttgggatttattctgtagcctccctctcaaaggagtgaagcttgatgctagggcatacaacataatgatttcagaattatgtaggaaagactcactgtctaaagcagacatactgttcagaaaaatgacagaggaaggacatgctccagatgagttgacatacaacatacttatcagggcacatcttggtgatgatgatgcaaccacagcagctgaacttattgaagaaatgaagagtagtgggttcccagcagatgtttccactgttaagatggttattaatatgctttctagtggtgaattggacaaaagctt

SEQ ID NO: 1118 - DNA, 103157 bp, Arabidopsis thaliana
aagcttgacctaagcaataacctcttagaagggaacttacctcaagaactaggatttttgaagaatttgacacttttggacctgaggaacaacagattctctggtgggctgtccaagaatattgaaaatatccaatctctaacggaattagttttatctaacaatccaatgggtgaagaggatatggtgggaacaaattgggggaagatgagcaatttggtagttttggacttatccaaaatgggtttgagaggtgagattcctacaagtctaaccaacctgaagaggttaaggtttcttggtctgaacaacaacaatctaaccggttttgttccatcgaagaagcttgaagctttgccttgccttggtgctttatacatcaatggaaacaacctaacaggtgagcttagattctctacaaagttctatgagaagatgggaagaagatttaaagcttcaaagaatccaaatctgtgtcaacctttagagatggtaatgtcagaatctcataaacatttaagtcctcttggagtgaagccatgcacttaagagaaggaagaaggtaatttggtacaataacaaacttgaaaccaggagtagaagtcatcaatgtgtgtttgtgagctcatcaagctatattttttttcttacattttggtaaatatgtaagaatattgtttaatctcatcgagatttctattattgtatttgctataacggtgtgaatttggcccacgaatgaatatgtagacgctttaaaaacaaaggtcttattgggccgatattgtggtgttaaaatcaataaataaaagacatattggcccatgcaggtttcgaacctgcgaccttcgcgttattagcacgacgctctaaccaactgagctaatgggccattttgttgacattatgtattacacgtttaagatttataattttgtggagaagacgaatgatgaaactatgagactcaaaacaaaacaaaacaaaacaaaacaaaacaaaacaaaaaagacacaaattttgtagacaactatttaatacagtgttacggagtgaagtacgagcaagatgccaacatatagacttagacttgtcacaaataattgctctctccatgtctcataaagagaggatcatatattatataattaaacgtgagataagataaatcatatgtagtgttatgggaaagaagaacacaatgtgaaggcacccggaaagaagcccaaaatattctagaattgtggacagaaacaaaaacaaacaaagaaacacaactactatatgaggaaattaataattagttggtttgatgggacgaatagtgtctgaatgttttctcttccaaagagataatgtcaacaaagaaaaagtcacaaaaaacttcttaaacgttacaaagactccaataaatcaaatagttgatttgttgttgtttgagacatcgtaggccatctcatgttcatctttcgatacactgaacttgtttaaacccaacaagttggatcgacctggtggtgtttggagttccaagttggaaataagatgaacgatggatcggatcagttcacttaatactaatcggttttaaattgaaaacacataattcttattagtcatactcatcaatgttcatgattagagaaagatcgtagatcctcgtcctgttttagtgaccagattttgtttcatgtgggaaatatgtttttaattagggaaaagtttcaagtcgttgcttgtgaatgtaacaaggtcggaactcggtctcaaatttatatgagccaatcaatagtaaacattattatcgaagtagcaaattccctcctttttggattttagttgaatccggaacatatatatatctcgaacatgattcttggtttttttaatttatatcttgtccaatctcatttccatcacaagtttaatcaaggaaaaaatgaaacgagatttcttttatggttaatgtgttaacttttgtttggccaccctaaaccaatggagaacgatttaaaacaattaagaaggaatgttagtcatagtattgaaaaaaaaatgaacgataagtacaaaagaagataagttccagaaaataaagaagtacaaaaaggaaagcataaggttgaaaggtgagtggctcaattattacaactttattaattagggcaaacactaaaaattcgtagcccgagaagaagtgaaagagacaagagagaagagaccggtggtgatggtcacgacggcgacgatggtaggaccgccgcacgtggcctgccttacccatgtctccatttgaccagtcaacgtacttcttctctaattattggagttcttcagtacatatctaaaggactaacaggtttattaattcaagttcaacttattaacatgactcttcttttgacaacaccgttctaatataataaggtattacaaaaaaaaaaatgaaataaattgggtaatgttcaactttgatagtagattggtctgcaggttttcttgcatcactagttaaatggaaactttattttatcttttgaatactttactttcctaatgttacaaatgaaactttagttgttctattaactattagttatactaaaatcatgatgtcctttcaaaatcggaaaacggctgattatagaatataattattttagcacctaatggctaatgataacgtcagataaataagagggaccaaccaaactaatgattttgagtattgtgtcccttggtttatatacatagtcgctcacaaattattgaattatatcatccctctcaatacaaatgtattttgagtaatttacctgttatagtatagataattgcatagtataattttagactgtaatgtcaacaagaaattagtactagtgttatatgacttactttgataactcacttgtctcaacagttaatcaccacaaatcataaacgtttgagccaaaccatgggacatgtcgaaaattgtgtggtagctctcccaagaactaaaataaaagtagactttttgttgtcagaaataaaatggattagtttaaccaaccgatccccatgcgtggggcagcgataatcaacaattaactaacgaaatctttattgattattgctttattgttgccacctttgaatcatacatcataggaacagagagttgttggtttgactaaacatatgattaattaattaaactgcataataggagtatcttccacaaaaatacattaattagaaaaagaatagtatgagcactaagggcatcttcattcatgagaaacccacaaaatttctcaaacaaaaaaaatattaatattatattacaatttgattatttgattaaaaaaatatttttgttaaaaaattgaaccaataataaaatgaaaattgtcatgatgggttgtaaaaagtatctcaagtgagaaactttctacactctctccttcattttcattatttttatttttttaattgtgagaaactcttatgaaatatcctcaatgaagatggtctaatattgaaattagaaaaacttaattaacccaagaaaagattagatggactatagaaaagaggtaaagaccatttatgcatttaactgttgtaaatcatttaatatttcaaatgtcatagaacaaagccaaaagctattacaaaattttgtcaactctctctattataccgtcaaatatatttacaatattgccctctcctccactaaatcattgaattttccatatttgctccaaagaacaagaatctgctaaacgatatagagaggtctaatcaaaaacaagtcaaactcttaaccgattcatccacaatctcgcgtagaatcaaacccgatccgccaggccggttaagctccaaacatcacgactcttctccctccaacacacgaaagccttttatacataaagattgatgaggatgaaatctgaagacagattgaggatcaatcgtgccaacaaagaagcatgacgacacatcttcgaatgatgtatagcttagctctttgttctttaagaacagctccaagtcctttgctcgatactcttctctttgaacctcccatcttcatctttgatatatcgattgaatttggcaaaaacaaagcaaatttttcttctcttagggtttgagagatgtattgaaggattaatgaaaatgaggatacaaagaagaagagagtcctttttatagaaggagataaatattgaaacgtggccctacacacttcttattcactacccacttgtgtgttttttgcgttattgcaatttattatcattgaatattgaatgatttatatggtcacaatttcacaaaaccccccaaacatctatgccctatttgtccccgttgttggtatgtatcatggcacacatgcacgccacgtggttgatttattttaattttttggttgtaattctaatttattttttatatataagaagttgcaagtctctcattactacgaggatttttcaaacagacgaaactgggttgtcttcttccacctatagatgttatattgcttctagattattattttctctctgggaattaggagcaactaataaatcttgcttctagatcttagggtggtaattcgcagatccaactatagtttaaagcgatcaaaacaaggttttaattaactaatgctcacaagtcataacaatagtggttttattattttaatattttctacatatgttttattatttatatacagaaaattttgtttctaatttggttttaagaattagtgcatgacatagatatatataggcttatcgcaatgcaaatatttgtcgttttagaaaatagattttttcagtgacgccttcttcttgtttctttctgactctgcagatgcaaatggagtggggcaaatcattctttcttttttgtaatatttttaaccaaacaaaaaaaactcttttttttctcttgtaacaaccatatttcttattttacaactaagtttcttcttcttcttttttgtcgtggattacatcatcgtcagaaaattttaacttttatcatactattgtaacaaatatatttcaactttttctaatttcggtagaattttatggcggtttttttcatagcagaagcttctaaaaaaggtatgttccgcgaggccgggaaaaagattgaattcttcaaatataaaatacttcgagaagaatatcaaactcggatcctatacatgcaaagatgatcgcactgtacttcaaataaaagtcgtgcatctgactttttaatgtggatgtccatttcctacacacaaaaaaaacaatcaggatagtttctaaaaaccagacttctcaaatcactagaacaaaaagggtaaaaagtaactaaaaacatattgccgtcgattgataacgtctcatggatatccaaaaatatcagcgagtgaaggataatatattaattaggttgtgaccacagtcaaattttgtggatgatatgaattgttggggttatcataaatcatttctattatttattttacaaacgggttggatccacgtcagtgtaccaatctattagaccttccacgcacaatttcagattctatggtgtgctgtgatgtaacaatataaattgtcttttacttgctattattatttaaattaataaattattttcattcacacaacttactcattctagacgtattaattttcttattatcatgtacattacctgacaaaatagttagtgttatagtcaaaataattaatttcaataggatgcatgcatgtacgtatttgactattgtctatatagtagagtttctctctagaatctagaatcttttttttcgttatacaattcagttttcgtgagcttgttatcaaaacaaagtgtccaacgttaatgaattatgacttcaaaatatttgtcttttcagatgttttaactcttgtaaagtgtccatgacgtggcatggatgttgagattcgtttagtgagaatgtgtcattaatcacagaatgcgttaggtgacgattactataataacttctaactaattggtcttctggtggcgcacgaactaatttatgataattataccaaatacatgatagagcatatacttttcacgtatctgtccgtgaggattgatttttcaaatattctctttgttttgctaattattgatttaaaacaaagtttggatgcattttaaattcaagttaaattaattagaaacatttaagaaaaaactattgatggaagatagaaatgaagtagaattggttcaatattataagaaaataatatttagagttgaaaataaaatcttttaatctacttaaaaatcgttgaagtatacatgtgtagaggccttactattgatcaaatattcaatagaggccttcatttgaaaaaaaaaaaaaaagatcagagtcaaagactcaaagattgaaactctgctataagactcacaaacaagtaaccaaattgttaagaaggcgcaactaaagtgattgtgaacttctcagcccaaaagaataatgtgggcttcttggataaaacataaaacgaatgcacttataagtgttcttagccttcttcataacctttcaagttaaaatcggccccaatgtccaaaccctatcattggcccactttcatcatacaccaacaacttatgtttatatgtttcaatataatgttttcgtttacgtgagctcagagaattctgttgaaaaacgtggttacttttccgtaaattatgtcacactaattagatccatacaatcaatttcaaacacataatacatttcaatcgatatgaaccaatctccggaacgttaccgttacacaatcttaactcttctagttcactttcttcttttcgattacacttggcctgggaattctttatcacatgaatggttatacaccgtccgatcaaaacctaccacctcttcaatcatctggcacgtggcttgaccaacgtatttattacgaccgatcaaaatagctttattccacgtcagcaaaacacggtcgtgccttcctccaccgtccgatgttacaatcagctatcagagatcaacggtgaataacgaaacaaatcataaggagcccataacgaatccaacggacacggtcgtctcgagtcaagccttagccatggtttccctttcccgctccaatgcaacaaactcaccggacctggatgcaaattccggcaaagtccttccaagttatcaccaccaagaccatgctgattccacctatgctccaccggctcaacatctccggcgaaaacgagcagaaacggaggcaaagatcccaattcgtaaatacgatgtcgtttttgaatcctcatccatgtctctagcttcaccgtgactctcctttctctccattttccgagatcaatcaccatcactccggtgttgaaataacacggtttcctatctttcaacgccgatttgtaaccttgactcgaccagaatcttgaagtgaagtagttagtgaaattcgcgtgacagtactccggagctccgacgacgtgccgacgtagatcgattctccagagtttagccacgtcatcgacgactacgagatcggagtcgaagtagattacgcggcggacggcgattgggaggagatcggcgaggtagatccgagcgtagtttaacggttggtctaaagcacgacgaatagaggaagatattttgctgcggacgaggttagggtcaaaatggtaaatgtggtaggttaggtatgggaatgttgaggagattatgcggcggagatcggcgctgcgacggtgagtggcgatgaagtggaaaacgatgttttcaggacaagaagcgtgttggagaacggagaagacgccggcgactgagccacggaggtaaattgcgtcgagagtcatagcgatgtggatgattgatgggttgtgttcgtgatccgaaggtatccatgtcgttttggagcattctctgccgtttcgaaacgccggagcttcacgaaacgcggggaggtcagtgagagtgactgtgacgcagctaattgtgataggtaagagtagaagaagacataaacgcaaacgcagagaagacatttttttaggtctgtgttgtgtagtctgtgagtgagtggagaggcaagagagagtgaactgtgaaagagatggaggttttttgtgtcggtgttaatggcagattaggggtagtttcgacattttagactttttgtggtttatgcttaagcgttaattgatgattgtcgttacttgtaataaaaagttaagtcatgaaagttagtgaataagtatgttttgggataattttaacaataattatgaagtctttcggtgattttgaaaatgcgtacgaaatgggtaaccgactcgtgagggtacaatcgtctatttccacgtgttaaacatgttgaccatgattttctaatcatcggacggctataaatcgtatggagattttaacgatcgattaaaaatttaaaataaataaaaattactacagagaaactgaatatctcaagaacattgatatcgattgaaccaaaagcattcatgttatcatcattttcttttctttgtttttacattgatattggtcaattggattttaaatacgccaaacatatctgatataaactgattaaagataaagaaaaacaggagatacagataggctttatcactcaaaatgataccactcctcagttagatatcaccaccattaatgcacttctctcagctaacttatatgccataaatgataccaaatctaatttggttattgcagaacggtaaagccattttttttttatcataagtaaaaaagtaaagttgtgaattttcaaaatgtactagtaaaatcttttgttttttcattcgaagaaaccacaagacttaggtatattggtccttgagttgaatattgaacatgatgcaaaaaataaaagatgaaagttgcaaacacaaatgtttggatgtttttgctttgttaaaggaatattatccttcatagattcttctttctcactcttcccaattttcatatccacttaaagtttgtcttaaactgtaatgtcatcatgattttggatatcccatgtctacagtgtaacgatacaaattcttggattttcaaaatagattttgagaatgttcaatatttcatcaagactacgatgattaaggcgcagttttgttccctccttacaagcaatttgtatcaaatcaagctaaaacatgtaagaatacaaattaatatatcggtatagaatggtcctccctactcattctatcaacataaatgaaatcgaggttctatgaacacgtttgaacccattgtgccatagtgccatagtgccattattatttttaaaaatcaaaatcctccgaatgatgtagaaaagtcagatcccaccgacacaaaaacacaaatccctcatcaattatttttcatataaaactagggacagacaaaagtggatgccctatcaattttatgtctcattagctttacaacaggttcaaattttaatatttccatttggtttactattactaactaacaaaaacttaataaatggatcaaatattgccgtatttagaagtagttgaataattaagagagaatagaatagaagcaaaaacgatcgttctacttctacaaatataataagaatcttttaatgggagtggtgattctttagaaagattaaaagagaatgcaaattattcatgggataaatattgaatattatcctccgactcttaacgaaatggcataagaaattggaaaagtattgtgtttgaaaatacatgtaatgaatatatttccttctgtgtgttatgcatgtgtgttgtccgacttgaaacttaaaataagcccaatcctgttatatctgttaagcccaataagttttatatacgggcccattatttaaaattcgcgtggattcaaatagctcttacaagaggctgatgaacccacaaaatgactaaagttttagtcattcttgtacgcgattgcgaatctacttctatgtacgaaatatttttttcattgacttcaaaaaaaaaaaaatgctacacctaaattaacatagttatgtgcacccaaaaaaaaacaattagcgtagtcttttctactatagatttgactttcttctgtcgggaaatattcagaaaacaagtctaaaccagaattgtaatatcgttttaagtaattaactatttattgtatgattagatggaaaattcgtccacgtgaagatccttaaatgcaacaaagaaaagaagagcaaaatcgtttgacgaaatttgaaaagtcaaacggagtgtacaagtggcatatgcagagagacttgagagaatgaggtttataggtgaccgggaacgtacaagtcggtacaactcattcttgcgtgtattagggtttttatttagtatgatttttagtcgaacaaaatctagtgtgcattacaaccgtacatgttttagtttatagttattccattaaaaaaatgggagaatgaatgattctactaaattattatgcctacatggttttcttatcatttacatattatttttggaaatatcgatcttcatattttttgtacagcaaatcgattctatcatctatatttcttatgtgcaatggagtttttcgaacaacgaacccacaacgtttggtaagtgaaaagattgataaacgagaaaacagttttctaacagaaatggttaaaactttcaaatgcttgtgaagaccatgcaaacttgtttttgttagatacttatcgtagaatatggatagtaagtttaaatccttaattgtcttctaataagcaaatgttataatatcaaatgactttttttctcttctttatagaaatcatttatctaactctttctgttgggactttacagatgttaaaaacagataaacctatgagaattttccatttatatacacgtatttatatctatccctacagggtacaggctacacatgcatattaacattatatacatttgtatattggtgaattatcattgagaattgatggaatggggcaaaaaaagtcaaaaaatatacatatgcaaagctggcagatagactttgatgcattagaaggaggacttttataaagattggtgttatgtgaaaattataaagatttgcaagtgggtactttctttaagaccaatgacccatcctcttattttgttttcaataagttgtacttataaacaaactaaaatcacatctaaaacatagcatttaaatgatctttatccaggctctgtgtcttaatcatactgatatgggttggtcccaatttattaaatagtaacaatatgattatttaagtctaatgagattatacctttatatctatgtaatataatatttaccaataacaatgtatagattgtaagtttacgtataaatggacacagggaaaggttccatggatagatagagaccttataattatgaaaatacttggaaaactatagaaattaaattgtaaatttgttatttgttcggttgaaattcatgtagatatatcgaaagtaaaaaagatatagaaaatatttctagataaatcagtcaagaaaaataaataagactctagatataaatatcgaacctcttcaacgtcgctgaaataatgttaattgttaatatgtcgaacgttctttaagttattgactcgtcgtgcttttggtttaatttgtcaactctatcttatttctatttcatttatatagctgaaacttttctgatttatttatcggtacttttcatgggcatatgagtacaaaaaaccgcgactttgcttttgacgtctccgacctcttctacgtttgactattcgaagattataaggttatttagctcgaggcacagaaagcaattaataaagtttattacttactttgctcacgacacttccactatataaagtgaattatttgcttaattttgtataaataaatttgatattttcacttacgaactattattaatatactccaaaactcacatgtacttagcttagctatagctatttacgataaatgtcaattctgaaacaaatacttaacttattaaaataagtacatttacgttatcatatcagccggagccaaaaccctatattttaaagggccctatttagataacttatttggcattttaacagcgacttgtgatgatggactccgtcaaagtcaccggcggaatctgtaacatcatatggtgtcttaaaattgtcggtccgtgaatacgtataaagatatgtctctaagttcttaggaaaatatatacatgatatcatagatatataatcaacattgtgttatgcgtcaacgagtgatgctgaacatataattgtttgacttccaataatatccatgcaataattgacttttgtattgcaaaaaaaaaaaggtagaaaacacaacttaatagtcttaatttgacgatggaatattagagtaacatttactacttaattttattgtaactccaactccaagtagcctgatctatatggaattattatactttatacaacttttttaactgcatgaatataaataccagtagaattgtactaaacattaagtgttataactatatatgtgtacaatatacaaatttaaggtaatgatgaagtatggaggaatagaagttgtagtacagaattgcggtacagtatcttactggtttaattatctgcagtccgaagcagtaaaagaaatctacaaaatttacagtaaaatatatatttttatatataattttcaatttattaagttttaatattattactaattaatatttcaagtcgttgaaccattgacgacttcttttaattcttgctattatagtcaaccagtttttatttttatccttctcttttgttgacttggtcgcatattttcatgggtttcatgttggagtctgtctattaagccattttacaacaaaataatattttcttaaagttactgagttctgattctgtgaaacttattagataaagtggttatcatacaaaattataagatctggctcagccggtttaattatattggataatccggtggcatttcccggtttagctcctaaggacaataacgtctttcactgtctatagtcccatatgatatcacctctcaaccaatgggacgagttatgtgcacacagagattgtagagcctacctacatctttcgtttttttatttaaatttaaagttcgtcaacaaaagcaacttcgaattaacatgagaaaagatactagctcgtgaacttaactataaagtattatttaaaggctaattgtgcatgttaattactattagattattgtttattttattgacatgatctgattttgtgagttcaaggtttttttgattcgcaataaagtaactagatcggacagaaatatatagttttcagagttttcttatgatattaactaattacatctttgatcaatgagtaatgtcgtataattttatatacacaaactacgttttgactaaaagggtttgttttatacctttttcttttttcttttgtcgaagaggtttgttttatacctaaaaatagaaaatatagcaatgaccaaaaacatcttggtaatagtatattttttgccttcttccattattatatttaattcgaattgtctattaatcttttttcaatgaaattgcctatgaatattattatagtatggacatatatattatcaaataatgaaatttttgaattgcatttgaacttcatagacattgttatttgctgatcacgaactttcttctacgccaatgtttttcaattcccacattattaaagtccaattacgatcagttgatgtattaaattagtcgtaggagattacattgtacgtgtataaaagttggtcttgtttggctccaattggcgtggtttacgtgtgaacagacacagacaacttgacgaatcaaaacgcataaaacgcgtggcagaaagtttctattgctccaaaaacaacttttttattctcttttttttttgacaaagaaatacagtaacttttttttattctcttaaagaaataaaattccagagtactttagttcagtgtatatctctgatttatttaattactattataatgattacatacaacacacctgctactgccacgcttttattcggtaagagagatctttattttcaactatcccaaatatctataaatttaaaaattaattttctgtaccaacaaaaaatatctaataataagcattttgggccgccacttgtgcccgagacgttgaaaccaaggaaaatatttgtggtgctggtgcagctaaattccaaaaatgaatttatgggttcattttcagagttttgttttctaggaccgttgtaataaaaaatcttttgttctcgttaagtataataagaatcttgataatagctctttgtagttatagatgtgtatctattagtcttggtcaataaggcaaaactaatacatactactaagttacatgaattgttcgagaaagtcttgtcttataaactcgtttagttttctttgagagtacttttttctttctttactttgagagtactatggttacgtagataataatcatcgttatcggcttctaatttgtataagataataacttttatgcattttctaacacgagaacttatcgagttatctcaaacgtcacgaaagaaaaaggacaatgaacataatatattatattatccatttgtatatttagacatatattttaatttattaactaaatccgttcatgtgacaagatcgacccttataagaaggagagattcgattttgtcacgaatccttatctgtccgaaattgtttttagcaatatgcgattatcgtaataattttcttctttataattagtgtcataaatctattactttctattttgctgtttccaaaatctttttgtgtttatgaactgaacactcatataaaaaaaaaatacttgtaattgcaaccgttaaatgaatgttatattagcaacaaactttggtagttgttggaatggaactaagcacgacattatccacgcacttcaaacattttttccccgacataaatatatctctaatactactatgtatatagctaactaccaaagctgagagagtgagagtaaccacaatttcttgaaattttgtcacaagttcttgcatatatcgatatgtccacacaaacaatcaaaacattcggatattcataattatgattgtatatctacatgacagaatattaagcaatgcgtaacaatatttttatgactagttaattttgtttcagttcctaattccaacggtgtcggccaaataatacctgaaccggccggtttttaaagaatgaataaataatgtgatatatgacgtggcgtgtcgttggtagtgggggattaagatggcgcagccatggcccatgagcgatcttaagtcattctaattaaagttaagtaaaattatattagttcatctctaaccgaaagcgcgcgttctatgtggcaccaaacatagattcttattttaaaacattatcatactgtatatatctcctaacgataatcgtgatggatattaattaatctaaaatatatctatgcagataaacactcgcttttaagaaattatttgctttacaaattagatatagcgttttgatgattcgaggatttacttttctttaaccaaacgaatgttcctaaatacatcaccaacgaaatgttacatacttagttgactaatctcgtaagataatgatgtggaaatctaaatgaggatatataaagagccgtaattgttaaccgataaggcgataaccacttgacatcatcgaaagttcggttagtggaacaataaaagattaattagatggtagcaatcggattttcacgtttctttattattgccgctcagtactgtaattcatgataggacaatgaatctatttataaagtaatcaactacattttcgatcgagtgataatgtatttttatgtaaatatttaataaactatagcttttaattattttagataattacagaaatcatttaaaatataagtgtgcgcaaatgaaaaagtctattaagaacttaaagcataatcaaaacaattagtttaactttacaattatgttcattttatatgccgtcatttctcttacgtgattaataaataggtaagtaactaacgactaaaccatcagcatttatagtccatataaaaaccatcaacagctgatccaattgcggaaagtcaatgatgtaagcagatccatcagcaatttttccaaatcaattcagattttaatatcttcttcattctcgctgatagatattcgtttagactacgttttctatctttggtcgcatacagtatatagaataataacagaatctacaaaataatatattccccgcctaatcttctggacatcatcagtttattgcatccgaagaggaagaaacctatactttgacgattatcagccatcttctattgtaatttgatttgaaaaagaactacttataaagcgttttgtatattctatagttttaatttatattatcggtgtcacagggttaatgtgaaatttccagctcaaagactcatattcttttatgagtataattggtagtatattcatgagttatagtgggtatattgatgagattattgaacatatgcaaatatatactgtttaagatagcatgcagagtacccaatatcaaaattaaaccatttataaaaacacgtttttctcgaggctccatgtaatactaaatcaggactcttgtcttgttttctgagttagatgaatattgaatacccaagcaagataaaataaaataatttgagccagcacaagaaatggaatcgttgagttggatacaggtaggaatccgaataaataattatgtttgaaatacatgagcaagatggagaaaattaaaaaatttaaaaagatggagaaaattattcttaaagaagagttacagtattacctaccagttagtatcgtttatcaaatatatatttaatattacttatttttatatgttaattcatgaaagctcataaacataaagggggagaaaaatgttatagttgattgcattcgtggtagcataaactatttcaaacctaattcttacaataattgatataaatattatagttatgttaataataaaccgttgtaaattatttacatcatcatctttagagtcgctataaaataatataaaagttatttacattattaaaaactaatataaatatataaaataacttttttaattgtcgtgtctgtatattttttcttcagtgtgtgtatttttaaaattaagaaagacgaaaccatgaaaaagttacttcaacacattcaatgtgaaagctatatatgaaataaaaaaatatcccaacgcattataattcaattagacaagtcgagttttctggttgagaaaagaaaaaactttaacaaaaaaaattgaaaaaagaaaagaaaccaaaatcgttttttccgatatatcgtgtgttatacgttgacaaaataggtactgatggaaattatttaccgacaagaaaataattaaatatatcaacgaattgacaagctaaataagctaaaggaccaagttgaggaaaaatgaggtccacctgcggaccaataacaactcgtccgtactaataatatctatttatacctatgttggatgtttcaaaaaaaaaaaaattagcatcataaatcagatactttttcctttagcactcttatctattttgtttctctataaatcacattctaaggtcttctacctcctttgctcaaaaaaaaaaaaggtcttctacctcttttttctaaaaacatacagtatataattgtagttttcttataaaggagtaaaaatatgataaaaagttctgttactcttttatcatataacaaaacaactttcactatctttgtaatatctataaaaatatgcaatgatataaattccaaacaaaatttacaaaacgtatagaagaaactaactaattctgatatgatcaaatcaaaagtataaaacaatgaaagtgtactggtgaaaatgtctctcttttgtaagcagaggttacacaacttcaataatgtatcacttacaaaaccaatttttcaatttggagctcaaatacttagaatcataaaagaaacatggatgagcccaatctctcttacggagacaaattccatgagaaaagaaagctgagttagcaacaagtgccacgtgacaacatactcaatttcttctaaggaaaatacaaccatctatttctttttgtcgcatacccacccatatatgatatacttagaaccattttaagtttttttaaaacataaaaatacgattttaaatttgaaaatttgattagagtgtgattatctaattattgtgttgtctataaatctacacagtcactactttctaccacactgattttaacaaaatcaattaaagttgatcagcacttatttctttcatatgggcttaaatgccaatttacttatatatattttgatgaaaatgtgtggtaaaacttaagaaacaaaaaaatcctaacactaattagcgcctaggtattttgagcaatgcctctttaacttaaaaagaaaaaaacgaaaaaagacaaaagtaattgtcctgctgtcaagaaatgcccatattattattcatccacacaagacacgtacgaccatgcctcttagtgatttgtcattggcccacttcccatcctagtggatcaaattgataataaatactataataaataattacaagaattcaaatagaaaccggcaaatcaattaatagatataaaaaggagatataaatcgttaacattttctattggagcagggagagccaataaaagtcgaatctcacgatatttcgcagttctctaattggctctttgcataaaaaatgaaacctaactaatgggtagaagaatacttttgcaaagcaacaaatatatcagataagatcgtaagctatccacatcacttgttaattgtcctcaaaccatattatataatgcaaacaatttatggcgttaaatccttacgtatttattctctataagagtaaaacacacacactgaaggcaactgatttaattggatttctattgaccagtagaaatacttgttatgatgtcggtcgctcgttggctaagtatttcttataaatatataagacatatttaaaatctttttacattacatacacccacttatgagaaacaaatataataaaatgttgataccaaatatatatatatatatataataaaatgggataattacaagaacaacaaaagagagattttttatgaatttggaattggaatctatcgagtgcatatattatacggacaataatcctcatagcaatacacattttttctataaaaagaaacgtaggataagattatagaaagaagaataaaaacctggaaatggaaaataaagaagatatatatcatgagttcatgactaaacaactatttatagctttttcaataataatatcattcaagagtgaagaataacaatcagatttggaagagaaaaaaatttaaagagagacaccatttaacatcggtaggatctgaacatggttatcaaatctaatactttctattttattatttttcatatagttattatcgttactatagtattatagtgaattaaaattttaagcatcaaaactcaggggggatgaacttcactaaaatgatgtcaatatctcacgtggaccctttatccattccatggcccacacatgggtcccacttccccatgcacacagcccacaacatattcatttctatatttgttcctatactctcttttctctttttcttacataaataaaatactaacttattataaggattattattgcttcgtgtgttttcttctataagttacatcaacagttcatgaaatagaccctaatatagtaacctaaattaaatgccgtatatttcattatgtttccacgaagcttcctttgtgttctttgagttgacccatacacacccatcttacttcccatgcacctgcacatatactataattactcccctcaaacacgcattcttacaaatatattttttgttattaccaaataaaaagtgaaacataaaataataatatcagaagtgacacttgctgtttcttatttccctccccccaagctctttctccttctttctatatatattatacacacacacgtatacatatacacaacataattcacaacacaacacaaacacatttctgttttctccattgtttcaaaccataaaaaaaaacacagattaaatggaatcgagtagcgttgatgagagtactacaagtacaggttccatctgtgaaaccccggcgataactccggcgaaaaagtcgtcggtaggtaacttatacaggatgggaagcggatcaagcgttgtgttagattcagagaacggcgtagaagctgaatctaggaagcttccgtcgtcaaaatacaaaggtgtggtgccacaaccaaacggaagatggggagctcagatttacgagaaacaccagcgcgtgtggctcgggacattcaacgaagaagacgaagccgctcgtgcctacgacgtcgcggttcacaggttccgtcgccgtgacgccgtcacaaatttcaaagacgtgaagatggacgaagacgaggtcgatttcttgaattctcattcgaaatctgagatcgttgatatgttgaggaaacatacttataacgaagagttagagcagagtaaacggcgtcgtaatggtaacggaaacatgactaggacgttgttaacgtcggggttgagtaatgatggtgtttctacgacggggtttagatcggcggaggcactgtttgagaaagcggtaacgccaagcgacgttgggaagctaaaccgtttggttataccgaaacatcacgcagagaaacattttccgttaccgtcaagtaacgtttccgtgaaaggagtgttgttgaactttgaggacgttaacgggaaagtgtggaggttccgttactcgtattggaacagtagtcagagttatgttttgactaaaggttggagcaggttcgttaaggagaagaatctacgtgctggtgacgtggttagtttcagtagatctaacggtcaggatcaacagttgtacattgggtggaagtcgagatccgggtcagatttagatgcgggtcgggttttgagattgttcggagttaacatttcaccggagagttcaagaaacgacgtcgtaggaaacaaaagagtgaacgatactgagatgttatcgttggtgtgtagcaagaagcaacgcatctttcacgcctcgtaacaactcttcttcttttttttttcttttgttgttttaataatttttaaaaactccattttcgttttctttatttgcatcggtttctttcttcttgtttaccaaaggttcatgagttgtttttgttgtattgatgaactgtaaattttatttataggataaattttaaaaagggttacttagatatgtctcaagagttttattagcatgagatgatgaaaatgttgttaccaaatcttaccttggtttcttttcattttatgtgtatgggaactcgtatttatatgtatgcattagctactgcttatggtatttgctgctttttgtatatagatttgaggagttatgacttatgcgtacgtaattttataaaataactccaaccaaaagagaaaaagtttgcagggtctgtaaacgtatataatcgtatgatgatatgatagaccatactccgatacaaataaccaaagagaaagatattttaaaatgaatgctatttaagcttttgcaagatattattttaagcttcagaaattattgtgttggtagagagattcatgttgctgttaaataatatatatgtatttataattctatctactactttttcggcttaactcaatctagatatttgtttctaaaagtgttttagttttctttctttcgctggctgcgactatgagtatcttcagattctctacaaacttaggtatatatagctatttatttcgaaggaatttgatggttaaaacgaataacattaaaactctgttaatctcttacgaaatggtatatagtatatgcgttagagtttgaacatatgatgataatagtacacctgccgcatacattactatgtacctacataaaggaatatattgaccattgatctaatgaatgttccgttcatatgcactttctttcgatacaattcggtggactataacattattccattatagcataaaatcctattatacaattaaaaatgcccacgcaattttacgtatacttttgtctataacacacatccacacataattcaagttgtgttcaaatagtaacacagcagtagctttagtgaaaattattagacttgttgataccaaagactagaaagaaagaaaataaataaatgtactagaaaaaatccaccatcataatcgttattgttgtttgatttttgtggatccatttagatatacatttatcaacgactaattctcaatctaacaaattctataagataggaaaattttgaaaaagcacgatcataatttagaaaaacacaagttaatcataaagttactaatttaatagctataatttcttttagttacaagaaccataaaaatgtcgtcaaatatcttttagataatcttgtcataattcaaaacttcaagcaaatcatatcttcataaaccccatatggcctaaagtagcctatacttgatcgatcatatacaagcccaatgggctttaaagtccattagtttgttaattaaaatatcaagaaccattttttttttctcttcactgcaaattttgatattttgggttttagcagtgaagtttgcgaaaatggcgtcttcggtttttctatccagtttctcgtcatcgtcttctttgcaactctgctcttcctttcacggcgagtacttagctccgtcgagatgctttctcggagctccggtcacttcctcttctttatcactctccggtttgtcatttttacttgtcactgtttcttcgtttgctctgttcgttattcaattattgcttcgtttttcattggaagatatcgaaattattggtcatctgattggaaattttgaaactttctccgttgttccgattttgaatgttgtataattgaagaactttggtgtatgaagtttatcttctctcatatctgtaggtaagaagaactcatattctccgagacagttccatgtttctgccaagaaagtttctgggttagaggaagccattagaatcagaaagtaattaactttgtttaactctcttgtatcataaaaatgcaatcttgaaaaaagaattcatcttttggtcatagagctaatagtacattaatttggtttacattttatagaatgagagagcttgaaactaaatcaaaagttaggagaaatccaccattaagacgtggaagagtatcgcctcgtcttcttgtacctgatcacattccaaggcctccttatgttgagtctggtgtattaccggatatatcaagtgagttccagattcctggtcctgaaggcattgcgaaaatgagagctgcttgcgagcttgctgctcgggttttaaactatgctggaactttggttaaggtaagattttagtttccttgtggatcttttgttttcctatgttatggatatgtggtctgagttgttgtttatatggttctgcagccatctgttacgactaatgaaatcgataaagctgtgcatgatatgattattgaagctggtgcttatccttcacctcttggatatggtggatttcctaaaagtgtgtgtacttcagttaatgagtgtatgtgtcacggaataccagattctcgccagctacaggtcctcatgtgtgctttttactgctttaagctgaatagctttgaaggagttcatttgtttatcactaactattaagtcttaatgcagagcggggatataatcaacatcgatgtcacggtttacttggatgtaagtcatttgcgcttcttttgttaatttgcagacactttcactttgtttgatttctacatacaacttgaaacatcgacagggttaccatggagatacgtcgagaactttcttctgtggagaagttgacgaaggtttcaaacgacttgtgaaggtagtattcttcttcttcttcttcttcttcttcttcttcttcttcttcttcttcttcttcttcttcttcttcttcttctcttcactgtgttttgtcttcaagttcacaaaaaaatgaattctgttttaatatgctaactgttgtcggtttcttgttctgtaaggttacggaagaatgtttggagagaggtattgcagtttgtaaagacggagcaagcttcaagaaaatcgggaaaagaatcaggttgcaaccaaaactattcttgatttcaatataaccgtgtagaaatgtactatttgaggacactgctagaacaaacaatctcaatgctttcaatttccaacagtgagcatgcggaaaagttcggctacaacgttgtggagcggtttgttgggcatggtgttggaccagtattccactccgaacctcttatatatcattaccgtaagtaatctcttccttagcaaaatcgttcttatgttaggaaacatcaatcaaaaacaatagttggctgcatatgcatatgaacctggacttacggttgaggaattttaatccaatttgcaggaaatgatgagcctggactaatggttgagggacagacattcacaattggttagccattttttccccttccatgtcatggctttcatttgcttatgattaggtgattactatataataaaaaaccgatgaatacattatgttgcagaaccgattctcacgattggaaccacagaatgtgtaacatggccagacaactggactactctgacagcagatggtggcgtcgctgctcagtttgagcataccattctgattactagaactggttcagagattcttaccaaatgctaaaactattcacattgatcatttccatttcaccttttatttgctgatcatttaaggtccatagtataaattcattatctttgagaccatagtctaacaatttgtgttagtgccatcttttaagatctcaagattagtttgctattagaaattttcccacatgttccctcaagtctttctttattccacaaattcccatttcacaacaattatttgcgactttttttgtttccctgtctttttgtgtttaattcttagttattttagatgaagctagagacccactttcccatatttacgcacatggctcctcatcattcatcatcacgataaaaatgcatagtacataaagtatccattaaaacgtagatctagtctcttcacaacacttcaacagttcaactaataacgcaaaaatcagtttctctttgagtaagtgtttattacaattaaactaactcaggcaagtctatgatcatggcttcttctgctgctgcatcgatctctatgataactctaaggaacctctctcgcaatcatcaatctcaccaaagcacttttctcggtttctctagatccttccataaccaaaggatctcatctaacagtccaggtctctccacacgagcaagatccaccacttcctccactggaggtttcttcagaaccatttgcagcagcagtagcaatgactactccagaccaagtaagtaaaaagttaacctttatgctcacaactaagtacccatttcatgatttgagaaaattagcatcaaattaggtataagaacaaaaaaagaatcaacctttaagctcaaaatcaagtacccatttcacaaaaactgatttttattttgtgaaaaatctcagctaagatccaagagcttaacgtctacgagttcaacgaaggtgatcgaaacagtccagcggttttaaaactagggaaaaaaccagatcagctttgtctcggagatcttgtccccttcacaaacaaactctacacaggagatctcacaaaacgcataggaatcaccgcaggtctctgcgttttgatccaacatgttccagagaagaaaggtgatcgctttgaagcttcttacagtttctacttcggagattatggtcacatatcagttcaaggaccttatctcacttacgaggacacgtttcttgctatcaccggtggctccggcgtgtttgaaggagcttatggacaggtcaagcttcgtcagcttgtgtatcctacgaagctgttttacactttctacttgaaaggtgttgctgctgatttacctgtggagcttaccggaaaacatgttgagccgtcgaaggaagtgaaaccggcggctgaagctcaggcgactcagcccggcgctacgatcgctaactttactaattgaaatctaaatctttgtgggtgtctttgtcatggatcttattgggctgttgttcattgtgtttacattttaataatgggcctaaataatgagcctttgtattgggccgttctcgtaagcgtaatgtgtcccgtccctataagctggatttaagcgcgtgaactccaccttccgatatttttttttgatagattatatcaaatccatggatactttctatatttggaaagtttggcttagtaggctcgtggccatgtttgagctaaaactcataaacgaatctttttaatgttctttcaccgaatgcttattttgtatttttcatcccctgaatcggttttaaacatagtaattttatctggtatacactttttttcagaagaaaaccaattttgtgtagcataaaggagaaatctatttgcaactgttcattaattaaggactttgctagacgagaatagttttgatcttttacaatttttattcttacaaaaaaaaagattgtagtagaataattttttctaaattttatgtacttgtttcagtttgcgtatatatatccatagactttggtcataaacttatactttaatgaagtcatgttgaatggagtatcagtccaacactccttcaatattcatcagtttgcaatttccaaaacgacatttatgactcccgtaccttcgaggaccaaattattcaaagtttcaaacgaaatatttttacttgtaattttttttttttttttggaatcgagatatttgaaatatgacaagtagtctgacaatttaactatttagctatcttagctcacgtagattttttttggttgtagagattcgaacgaaatttatgcttcctccaattataaatagaagctgcagttatgcgactttggttttatcatatactgatatacatcatgttatcacgactttttgcacgaataattttcgacatatccttttggtttaaaatttagagtggtagttaacaaaaactgaaaaacattcatagaatgctactttcaatctaagaatttattttcttgcatctcaacttctaaatggaatactatagaaataaaagaaaaatcagtaaaaaaaaagagagatagagagagtggcagagaaactgaagtaacctaagagtcgtgaaatttctctctccaagtgtaagatagacaaatgtgtgtaacgttagacatcactacataaagtgacaacagacattttctgtctttggataaatcgaactgccactttcgataatttagttaccattatattttacctccattatttatcaccagagatgcgctctttaggagtattcagtattcactactagtctactacagcatatttattttcttgtattatatttttcttttcctagaactgtagttaaacgatttttgtccttgtgtgaattccaccatgcttaagacttaaatgtgtgtgagtgttaattatgatctttggtctctatcaatgatggtaatttcaacgctagatcttcagttcagtaataaaagcatattgtcggaccttgatcttagatctcttggtattaattatatacaaccaattgatttttttttgggtctgaagatttaccaaaaatgcagaaattgcttgttggagacaacgttagaggcacttatataatccaaagccaccactacatatatttttcggaaaaggttactttaagactcactagctaacttgacgaagaggtaaatacatatcaaacatacctcacttagataaaccctaatagtacccatcgatcataaaaatgtcccatttatttagtaattgtcatcagaaatctgaccataacgacgaaagtgatcatatctaatcccatagttcttctctccacgaacattttcttcatgagcatcttcttcttctacatcatcttcttcctcttcttcctcctcctcatcatcttcatctgcgtccccaatgcctacaacccgatcacttacagtgtgagccgcatgaccatcaccgaaagccctaacgtgatccttaagtgacctcttatgcttaaaatctgacccgcaaacgcaaaaccacaacttcccacaatttttctcatgcgttctccaatcgcctctcaccgcaaacgttttttcacatttcttgcggcaacgaaaaggttttgctccgtgcttccgcttgtaatgcgtttgaagcgttctaaagtctttgagaggctttgatcttggatggtctatgttgttcttacaaccttcagcacaacagtaacatggcagccttagtatcgaagatgacgacttcgtccctctgagcgactctgggccttttcggtattgcgaaccatgaccccacatatgcatctgcaaaagatgtgatcgaataaaacacttgtccatttcatttttcacgttaaatttacatatcctgaacattttacttaattttgaacgtgactgcaagattacatatcacgaatttttttttgacactttaattcaaaaatacatttctataacgatcctaaatcagcatggaacatatatcatactagctattaatgtggaaggaaagggaaagtcaaatcaacaaaactttgtgtagatcatttcaaacctgcatgttgttgaagcggttgaaagttttgttacagacagaacaagagaactgagtgggaccgacaaggatctgcgaaagtgaagggatccaatactgtccctgcctcgccgttaaaccctcttggttgttcccgccgctaagggtttctttgtcggaactcggaggaccgatatgaagagcaacggtaacaccattagggtttgttaatgggtgattaaactcatgatcagaagaaggtttagtactggtaggtttgttatggctagggtattgttggccaggaggtccaaggctgaggacgacggagtcttcgtcaccggagaagctatattggttattattatacattgagtagagagaaagagagatgagagagagagagagatggggttttgaggaaatggtggagaaagacaatggaggctggacgaactggtaactaataaatgattctttttattttgtacttgctttggctttattttcctcctcgtaaatttacgtgttacgagtgacaagcccatgtttggttccaaatatctatatagctattcactttttacaaatgatatatacacattatttagttgcagtgttttgatgctactttaacttctacatttttttgacctgtggatatgaatttgatatatattaatattcggttagtctacatcaatgttttttcttgacatacaaagaatatattacaatgtatgatatatggtttaagaataatataatttgttatcgataaccaaacttatatccttttcattaatattagtttctaaatatttttgatatgaacgtttatgcatgtatatcttcgcaatgtaattctcattaaaaaaaaatgattcttatcatcttataaatatactagatcattttttaattttatttttgccagcagatagattatttaagagaaaaaattaataaagagaaggggatacatatttaacttatgaaaaaaaaactatacattaaagttgacgtgggcatctctcaatattagcaaagaatgtactattcacttggaactcgctctcctttctaggatctcaaaaccattctttgtttcatgacttctctctttcaatttcttgtaatatattttataattttgagtttgtatttatatctgagtgatcatttactctcctcacaaaccaaaataaaaggtgagagagtacactctgatacaaaagaaaagcaatagacatgaagaaacgtggcgttaactgtatatgcgaaagcttctctttctccccactttcatcatctgagttctgaacaacttactgagatagtgatagtctcagtgatgatgatattattaaagttcccatttatttatttttccctgaatctttgctgccaaaagttaccctaatatcttctcagactttttactttagtttaaatctaaggaaagtggagaagtttgcttatttgcttattaatggaattggaatgtatagttggctgaaaagtgtacattttgttttgctataatactacaattaatggtaaaggcatatggttttaggtttttctcttttgaaagaggtttccggttttttagtctcgatcagttttgctcttagatttttaaaatagaacattatgctgcgatcaaatatacgtttctgaaaacgttccaccggctttcctatgtcgttaaaattttgagtattttaggtcaagttcgatgagattttgccgttttggatttcagaaagcgtataggtttctcttttctaatttcggttttgaatcttcagttttgctgttaacatttaaacagaaattatatgtttgacataaaagtacgttgattctatcatacacacaaacacccatagatatgtttttactggcacataattgcatgttgttaacaaaaataattatcaaactttgaaatatatatcttctctcctatgtagattgttaacaaaaatggattgttaggtcgtatgcaacaagtttttggatcttagactattcgttagacactaaaaatatatatatatatatatatatataatgctaaattaaccagatttgcatcaaaaatttgattttggaaaattatgaattgaatcgaataaattatggacccttttttattttatttttccagtttttgtcttctaaaattgttgagatattaaaagtttgttaattatcgaattatgctactagaacgaaacatttggagtaattgcaaccatttaattaggtttttagctattgctacatgaatgaataggattagattactgttcaaacagaatcttcgagcatcgactgttgctttataataggctacaaggctttcaaccgaggtactttctattttgattagacatatcgaaagaaaccttaaaacaatgtcgtagagagagaaaaagaagttagcaaagaaacacacaaacagatattatatgaaattttggtccgagcaaagtttttcattgttttggttggttgaagcagttagattcggaagctttaaagggtccgaagaagaagagcacaaaatagtacgactgaaacaaaactgtagctctatcatctcctatatctctctgctctgtcacattatttattttaaaatttaaaaaaatatgaatcctatttttttttttcgtatgaatgcaaatttttggaattgaacacatgaaagtaatttgtcaaagtttccttttccttcgtcttgtaagttgtaactcacaactctaccccaacattttcttactctttttacctttttttgtatcaaatatatttaaaatgagtgcataatactaatattaatgtcattttatttgatactcgagtgagaaaataaagggttactgtaaactatgacatgtccgaaactactcacaacaatttatttgatttttttttatgtcacatgtatcgaaactttaaaagagtgtgtacttcgacaaaagtaaatgttgtggaaaaggccgaaaataaactggtaggtcttacgcttgaaagaatactcatgagcctattgggcttgaaaatgacaagtaaaccggcaatggtgtaaagcggtgtcattttattgatgtggtcgcatatggttttgatgtgagcctttgatatatttgtgagtatgacctctcgagtctctgaagggacaattagaagctaattaagggcaattaaaagccaattaggtacaattaagagccaattaggggtagatacatatacaatgcgccaactcatttcaaattttcaatctaatcaaagacaaattgactcaataatcacaaaaatagatcattaaaggtacacaactagatcattcttatttttttagcgatttgttttggaatttttctaatcttctggttaacgtgcaatttaaaatatgatcgaacaacggaatcacataatatttttagttatttaatatttacaattgaagaatattattggtattattgaaaaatattaatgaacccaaataatgtccgatatacatcttggaatattttaataaataccagaacatgtatacacattagtttcttttttggtcgagaagaaacctttcttagatagtacatactataaagtcatagctcacactgtattatttaacattccatgcatccaagaaaattaaaaatccatgcatcgaggtcaaaccgtattagattttgatctctctcgtttttcatgtcaacgaagataaaaactacatttattagtaccgcccaatttgcgttaagatctgactaattgaatagtccaaaatgcattagaaattacggatatttgtgatcaccactctttaggaggccccaaatcatcgacgataatatttgttctattaatccggtagaaatatttaaacaatttacgcgctaatttatttgttttaggtacgctagcaattagcaaactaggtgctcattagacgtcgttccttttttgttccttggcaaacaatatcgttgaagtgttttttttttttttttactgtaaaaagggtattttcgtccaaaattataacgttttaattttggggttgaattgaaacagaaaaatctcaatcactggttcctctcaaaattgcaacatctccagctttttctccgttgattaataatttaatatcaaatatcggagagaatttcttagctagttttcgagttcaagctagtcatattttcggatttgatctagttattttgtttttcctattctatgaatatatattccctccttatgttgtcaatgtcgtgttttcatttgttttgtaaattttttaacacaatgttcaattaacgtctaacgtttattattaacaacggccactctttacttatattagtagaaatgtacaaaattttgggcgacaggaaagaaacttaattaagtattaggtcaattttagaaaatactaaactatttactgattgtgaaaggcattggcacgccattatctataaaagttggaatgatgcatgaggatctttgataatacagtccaacacgttatgtttttcatgttttacttggcaatacgaataatacaactaattaatattaccggccaaaattcaaagatattgacacatgtaagatagatacaattacacacacttaagtaataattatagacggatacggataattgaatagaactaatttaacaaagtcaagattctgtgacattacattttgtttttaaaaatatttgaatcctaatggataaagggctaaaaacttcaatgaaggtgttattagtagtgccccttttttttgtttcttctcccttcgcttgttttggcttcttcagtaagagacatttggcttttgagtttaacgtcatttggtagtgatcacttttcctttaacgaaattaagatgagaaaactgcaaattaagtacagtattaattaactaagatatactgtatattataggttactgcatgctacacttttcttttcgggggcttgtttaaactaggattgtgctacaaaccagatattttattttaaaattaaacattaaaatatcatttatttacagtaaaatatatctcattatagaatggatgaagtataatagcatatggtaagaaaaaaaaaacctcaacggtggatatgtttattctctctatctcctttacaaaacttcttctagtttgtatatattgtaaaaggttgtctgcatttacataaggcaatatccacgcggatcggagattaaagaatacttcagtcgcttatgtaacacaaagttaatgtaatgaagttcataactcatcagtcaccagtcacaagttaaattgattagattctagaccaataagtatccatctcctttttctttttggtcgtctaataagtatccagttctttgcattttgacaaaattaatttattacctaattaacaaagaatcacattgcggaatattcaccactcaccatctactactagctagctagccacaacaagacataaaatcaaattggttttataaacatataaaaaaataaacgcatgattcgtcttgtaacgcgacgggccgacttatgcatttttaatcactcaaaatactgatcctagaggccttatatatatatatatatatatatatatatatatatatatatatatatatatatatatatatatatatagagagagagcctgatatatatgtattgatccctctctctaaagcaaaaaaacaaatctcaaaataaaaaggtggattaaaattaagtccctaaagtatcatcatgattaaaaagttcagcaatatggattacaaccagaaacgagagagatgtgggcaatacatcgaagccctcgaagaggaacgtcgcaagattcatgtatttcaacgtgaacttcctctttgcttagaccttgtaactcaaggtatgtataaatatacaatgaaatatatttatctataaaaacatatatttgctacatcaaatgtaaaatttgtgatctatttttttctaaattaaataaaaattacaatatatttatgaaaattctagtatgtatagtaacgtacattttaccatttccatattatttcttaagcgatcgaggcatgtaagagggagttaccggagatgacgacggagaatatgtacggacaaccagagtgctcggagcagacgaccggagaatgtgggccggtcttggagcagtttctaactattaaagattcatcgacatccaacgaagaagaagatgaagaattcgacgatgagcatggaaatcacgatccagacaatgattccgaggacaagaacacgaaatctgattggcttaagtctgttcaactctggaatcaacccgaccacccacttcttccaaaagaggtaatacattaaataattaagatcaaagctcagacgaatcttaattatgagtatgcaatgctatagtggctaatttttaacatgttattatgttcttaactcctctccaaaattattggttaataaaaaaaaaagtctcaaagaaaacgctctaatatttgtgatttgcgtttcaggaaaggttgcagcaggagacgatgacaagagatgagagtatgagaaaagatccgatggtgaacggtggcgaagggaggaagagagaggcggagaaagacggaggaggagggagaaagcaaagaaggtgttggtcgtcgcaattgcatagacgcttcttgaacgctcttcaacacttaggtggacctcatggtgcgttttgaatttatttatatgatttacattgttttcaaactatttgaataaatttgttgttgttatatagggtttttgagattttggttagtatattgatttttagtaaatgaattttgcagtagctacgccaaagcaaatcagggagtttatgaaggttgatgggttaaccaatgatgaagttaaaagccatttacaggtaactatatgtctatattaagcacatgcaaataagatgttcatcttaagttgtttttttttttttttttcctaacttaaaatctatgctatgcaataattatagaaatatagactgcatacaagaaggccacgccaaacagtccctaacaacggaaactctcaaacgcaacatttcgtagtcgtcggtggtttatgggtaccacaatcggactactctacgggcaagactaccggaggagccaccaccagcagtaccaccacaaccaccggcatctatggaaccatggccgcaccgccacctccacaatggcctagccattccaattatagaccgtcgattattgtggacgaaggatcgggaagtcatagtgaaggggtcgtggtccggtgtagctcgccggcgatgtcttcttctacccgtaatcattacgtcaagaataattaatttgtttttactgtactctaatgttttgtggtcatttaatactattattttgtttattctctctatactgtattagaatttgatgccgggattaaagagtgtatagagttttgcaccaaatcaatctttctattttacttataatgtatttcatatttattttggagttagttaatttccatcttctttttttgggtaaaatgtacaagtagtaatcatcttaccgttgttttttttcgtttcatttttcaacattgttgacttgtcatattcttgactaagtacgcaagtggaagaaaaagaagagcgtttggtcgtttatacatatataaatatgtattaagagaggttatgatattatataaactaactgatcaattaacaaacaacggatctaactatctcaacaacagtaaattgatattattgtggctgctgtttttgcactaataattattatatatatatatatgctgatattatatcgcattttatatgcctatatattatatatacatatgtataataattaataatgtatacagcttgtatatatgaacatggcggccagagttgagcaaatggatcagtatatactaaatatttgtcgaccaaattatataaagataattatatacacaattcacatgataacaaaaatgatttgattatattacaataagactcggagtagaagttattgaattggttgcattcatgggacgaatatgctcgaatccaaaaagcataacttactatgagtataatttgacaattttatattatcgtcttaatttaaatttgattctcatgttgcttatatattaagacaaaattgcacgttagctacaatgtcctagtcgtaaagtatattctctgcctccggtttagagaagacttttattcataatatagatagggttaggtcacttaatatatttgcaaatttggacagtatctctcagaatcttgaattaatctaaagattcttttaatcaattgtttatctaaagattcttttatttaataaatttgtacaatccctaccattaggtttagctttccaggtggctctatacatgctatgtggcctttagaatgtctctaccatattatcggtgtgtacaatatagaaataagtaatacagtacatctaagatactaaataaatatggggtttaacgatatttattttgtttttgataataaatatctcttcaagtttttgtccattaccatttttacgatagtagtcaactctactagaaaggtacttaaaaacttatgctgaattgtttttggaattatttgatgcaaatttcttatttgcttccattaattaagtagatacattatttcttaaaattatatatagttgcattttgagatagattttcaatatgtgcagatttttctaaagcacttatttataattaagatgatctttcgttttcaagatcggatcaacctggctagtcattccatgtgcagaataaacaaacgaattaattaatgtaattagtcaagtattttacttttgaaatataatagtaatttatatacagagtgttttgacgatagatccaaatgaccaggaaccggattaggattcattaggtataaaataatatagggatttgttaagctttaagcatgagttaacgtgacctttcacacaagttaaaggacaatatggctcttgatacttatttaaagagcagtaattatgattaaaacaagggaaaatacaattcattaactaagttcaatgcttttattggtctgtatatgtctaacattaacaaatcagatacatgggatattcgaattgacctaattaagtcgctatactaaactaataagaactaagaagagatagtacatttttttttatacgaccatacctttatcaccttctgtaccacacatacatgtcttaagtacgtgctaatcttgtcttaacccttagcaaaatgtttgacattgtgaaattaatttttgactttataatatgaaagctttggaaagattctttatgactagtaacttgatagaaacaccgaaaaatgtatttttgaatacgtttgaaaataatgagataattataaattaaacgatgtgtagtcattacattacatctctaaataagagtcattatagatttatatagtttcagacaatctgtttctgtatattatttgaaggtcatattcactaccttaagacatcagaaaccttagtatatattatcttggtactgacttctgacttctaagttctgatgagttttggaaattaaggcaacaaaaatgattttccaacatttgaggttttgggcttaataggccacaaactaattttgggtaaccccatctttagaacctaatgttaaatggaactacatgcattttttttattaaagaggaaaatatgttactaaattcaatcgatcatgagatcaaagctttttttgtgtgtggggaaaaacagagtatattattgcacaatcagacaaattttatctgatggcaaataattgtatcacatatcagacaccttaaatctcttctccaaactcaaaagaactaaacaaaagaattaatcatacagttattagatcttcttctaagacttaaatcgaagttctcgtaccactcttgtgggagtataaggaatgagattaacaatcttctcaccttttggaaaaggtatctctctatcaattggaatcttctgtaacatcatagaatcgtttagcttctcatacttagccatgtttttagctacatcctctctctccttcttgaatattgctatccacttgtcatctttggacggcgtactcttcttcgccgctgctaaggcacgccggagaacccctaccgcatcgcctactcgatcttcggattctagcaattccgctaagtatttttggctctttagttcgtgtaaagctcccattgttgttacatactcctacattatcatatgatcaatcaatcaagtagagatttttttacttcatctagcttctgtggaagatctcaagcaaattatcgttatacattcaaaaaacagaggattaatgcatatgagtgaactaaaaaagttacttgtttttcacgtaaagttaaattttagggttatgcgacttacgagaaagcgggtcgataggtctttatattctcctgttagtctagatgacaaaagagcataggcttcagaaagaaattgaaaaattccaaagtgcagtttcgacaaaaggcttgcacttttgccgctttcttcagccttctctgtagttacagccttattacaaaaaatgtctcaatagtagcatcaaacaaatatggatttgaggcaagaaccaagagtggtaaatgaaggtaaaagccactaacctgaccttcagctaaacagaggagactcaaagcagagcaaagcggaggagttagttccggaagcttccctggaggcagacaagtttgtaataaaggaagaatctcatgagacagatgatggaaaactccagatgcttctcggtaaactgctaccgctttcttagaatctgttgcaatcaggaggaagaagattttgagttaatgaaagcaaatatatagaagcaagcaactacaaaaaaagactaacctgtggatactagttccattgctctctcgcggagcttaaccgcgtaaatgaaaagaaccattccaaactcgaacattatgttatcgacttggaagaatttcggacatgtacgctgaatcaaggtctgagagatcaaaccactactccatcttatcttaagattcgaaacccgtttaatcttatcagtgtaatgcaccaagttaaagagtaatggaaggtattctccaagtttatgaagatcctgaataataataatgaaaacatctaagcaacagtcaaaagtttaaggttacacaattggtaaagttttataatatacctgctcacaagcagaagttagtcctctggtcatctctcttgtagttgaatcaatgactttgctggttttgtttacagattcttcgataattttacgcttagaagttaactctttaacttctcctagagtaattggaccagcagcttgtaacgttttctcgtacaaaatctgtttttaggtgacaacaatatcacaaaaaatgagaaggctacaaaactaaataacttgtttgaaaatcataattctacaaaaaccctaaaatcagaatgtggaatctgaattgttctattcacaaacaaactcaaaggaaaactaattaaggttacctcttttgtttttggttctggaattaggtactgcatcatcgtcatcgttcttcttccaaactcttggttacgtaactattaagccagaatcataaacaacataaataaactgaagccgagaaacaagagaagactctataatatttgtgttgtcgtttaaataattcagatattatttgtaatttcctaatcctattgcgagtcgaaaactgttggaagatcaaatagaaatattaaggaaatttcgtagagttttgaaatagcgagagaggtgtgtgcaagagtggtgaaaaataatcaacaaaatttgtaaataatcaaacagaaaacgtcaataacacatatatattgaacttttcgagggaagttcctaggtcaataattctccgtaagtgccttctacgacaaggttttgacttttgataaaatagtcttctagttaaaaagacaacaacgacctgaatctgatatgtggagtataaaagcccatgggcttgaaaacgactcaataagttggttgaccaattaaaatattccagtggtgaccaattgtacactcatgcttcgagcaaaaacgttgccgaatcacttgataagtaaattatttggactaaacaaaattaagcaccaaaaagcaaatacgcccaacgaacaaatcacagaaaacatgaagccaacattaacattagtagcagagagaaacaatggtcacgtacgtgtaaagtaaaagacaacacacgacaaagtatcgtttacaaaatctcatgagaaccaaacacaattcgttgctgtcttctttacctttttttagctagacatcatcacattgtcaatagattggagagcttgatttgcgaaataccgaacatcaacatctgggtcttcacttagctccaccaagcatggccgtatcatgttctccacaacctttcacaaccaacaaaaatgaaaacatttgaatatatggacgtttagattccctgatgaggaggataatgtggaatcataagctgtttctttacttgtgagagccaacaaagaatgtatactaaccgcttggtcgactatcggaatgagagattgcatcattttggccacgttaaatttgatgtttggaactctgaaagaggaggagagagtggttcttttagttagctattgggaaaaaaattgagtcaatgagatttcatgttaagagagagacttgcctgtctttagatgcagttattaccgcaggtaagagtttggaacatgtgatctcggatcccattactggagcgagaagcgatactgcacgaagaatcgtcatccgatatagatagtgtgggttgttaatcatctctagaacctgaacaagtaaatatactccaataaccaatagctaaaatgctcgatttgaattgaaaacatactatatgcttaagatttctacacaaacctgaggaactatatgctgcattgcccattcaggaccaaactcttcagcaagacgcttcagattgtttgcagcagcttcacggattgagtgaacctgacaatttataattatttcaaaatttcaagcagtagagacgacaaatttatttatctggatgattcaatgaaggtagagaatgagggaccttgtcttgtaaccattgcatgcaaagagcaccaagcttctcatcaaagaagcctacacctaattgactggccaacaagggaatatactcgattatagccagacgtactctccagtgcctgtcttcagcaagttctacaatggctggcagtaacgattgtgatagtagatcaatcccaataacctggcaattttaaggaaaaaaaatcgaatcattatgaaaaatggatggacaaagaatttgctgtcaagtagtcattgacttgaccaaaacatgatacagctcctttgaacatgtgggaaaaaatagaaacccaatgtcgtacaaagagatgagtaacttggtcaatagcaaacctggttcacttggtcaagtttgctgataatgtttaagcgtacatcaggaaattcgtctttcaatagagaaagaaagattggaagaagatgctcaattgttgcatcctgaaatgaatatcaatgccaagttaaaagctgcaaaatccaactaaatatcttgtgtagaaaaacatagtgaggttttcttatatagattattgttgcgagaaccttccaggcacagttaaaaaaattcctaaagatgacagtgactaggacgaagaagatatatagatggtttcaaataaaagaaaaaatctttatctctaagatgctaaatacatagaatattatgagcttacactccaaactatagagccaaatgaatttttgtatagatgacagtattcatgatatgagaggcaaattgtatcggtttttaattctgcttaccttacccaagactggagccattcccattataactgatgccaatgcagatctgacgtgctgagaagagtctgatgataattcctacgtgtagatttataggtaagcttagcaaacaccgacagtattttggtcctttgcataatatgaaatcaacacactcttcttaagtgtgtacctttacacagggaagaatgtgctggatagcgagttcagggtttaaaatgcgacaaaacttggtaacttttccagcagctgctatccgaacttctgcctcattatcacaaagtagacgagcatatgcaggcaccagatccgtccttaatacataaggcacatgagaaagtataaaaaacgactcaaagaaatttattaagatgactcaacaaacatggacttccaagtaccaaatacctctgaagtcagtaatctattgtttgatatagaattgcatactaaaggtcaatactacattaaaccataactaacttcaaccatcactgcttacctagttggctccggtcctacagcttcacaaagttcatagagctgatttgcaaccatataacgcacacgccaggacttatcctgctcaaagacgaaaaaaatcaagataaagcagctcatacatatctgccttacagctttcccataaagctcatcaatagaatttttttatcatattcacacatttatttacctgcgagaaattgacaatcacaggaagaatgtgtgcaacacagtcctggggctccaacaatttcccaagagcagcacaaccctcaacagccaataatctaaccgaatcttgatctgatatcaatgtcaataagatacttaaaatctgtaatattataatataaaaagacactgaagctgagatgtagacaaccgtaattctgcttaacttcagctaatggtcagtgttcaatgcagtaaccctaatacttgcctattacacatcagccacccccataactaggcttgatgaaaattgtaagagtatatgctggaaaaacgaaacatataataagggagagcataccatcttgcgtaagatcctcaaacatggacataatgtctgtcttcaaatgagctgattcaattgtagcagcaaacttccccaaattagttgctgcagctctgcgcaccattggcatgtcatcttgacaaagctgaccatatattgatcttagctccgtctttagcacatctggggcacttgggtatgcaatatggaaaatcccacatgctgatactctggctgtgaaccattcaccagctgaaagtcgctgttacacaatgacagtgttcagtaatgcttaagtcggtttcacattacgagcacctataccgaggtatgtatggtcacatacacaaccacaacccaaaagagcgctaaagccagagcgatgttctcttagatcaaccaaaatggatgtaaacaacttcaacctaccaatttcccaaaacacctataaggggaacactgaacaagaaaagcatatttccaaactttgggggacaattgacaaaggaccccaaaaaatctatgttcttctgttttagtggcttaataatattaagtttgacagagcatggaaaggaatcaataaaatcgaccaaagagatttgataaaataagtaaaccagccttatctaaccttagccagaggagtgaaatgctcaaccaagtcactctccctcatctgagcaccaattctacaaagtgaatccacagctttctccctcacgcaagtttcctcaacagtggatagagtctccaaaggtggaagcagaacatatgcatactcaacccctcctacatacagaataaaaccccccaactcttccgccatagccaaaagcacctcatcgtcatcgtcattgttctcactaagaaatggaatcaactcttttcttgtcctctcctctccaagagcacgagcaatgatagaaagccgtttaatagagttcaatctacgctgaatatcatcgttttttagctcgtcgataagcacagcaatcgggtataaaggctcatcaaccatagacatcctcaccaaaactcaaatcactccctaccttcaatcaaacacaaatgtacacaaagtcagaataaaacacaatgcatacatagacaccatcaatacaaaagacgataaagttacaaactttaaactcaattccgcctctgagataattcaaaggtgacccattagcctctaaaaaatgattagaatggagaactgaaactttgtgccgtcccaatctagagagaaactattaccattcttagactaataaagagagaagatctaaacaataattcgatttgagattctcaatatacaattggaaaatgtttcgaaattgaagaaatgatcgagaatttaccgattacgctgctttccaagttccgagcgatctatcaatcagaagaacgagaaatgagaccggagctcgtctttcgcagcagctaaaccatcttcaagctgtgtccatataattgggcctgtcaaagataagaactaaatgggcttatgtataatacataaaggcccatatatccaacaaatacgacttcgtttaatatctctctcgtataaaggaagcttctcagtaactctcttcttcttcctcagaaaatatcggaaaaggaaaaaagttgctctcgcttcaggttttttatttcccgccaattatttcgacaaaaatggctcctaaatcggataacaccgaaggtataatgatataatctctgaaaaaaatctgctagttctctttgatcttattcctcattttgatttctctcttatttacttgtttcctgaattttttatttctgcagctatcgtactcaactttgtcaatgaggtaagcacttctctgcgattctacatttttgctttaattctaaacggagatcacaaacagatacgaccataaaaattagaattcgaatttgaaattgagtctaggttaaggtacgcagtgatgttcacatgattctgaatctgggaatttaatcacttgggtttcaatttgtgctataagtttacacatgaatttttcgtttgaagctattgatattgactaggttttaaaaattgattgatacaggttatatatatatatatatatatatatatatatatattgcaagttttgtttcaatctgttgtattattgttgttagattttgatgaatgtgttgttggtacttttttgatgcagcaaaacaaacctctaaacactcaaaatgcagctgatgctctacaaaagtttaaccttaagaagactgcggtgcaaaaggcacttgatagtcttgctgatgctggaaaaatcacgtttaaagagtatggtaagcagaagatatacattgctagacaagaccagtttgagattccaaactctgaagaacttgctcaaatgaaagaagacaatgccaaacttcaagaacagcttcaagagaagaagaaaactatcagtgatgtggaatcaggtgtgaaaaaactactttttctcagtggttttgaggatgtgatatagctgcttggataatgttatgttctgtgatgttatttgcagaaatcaagagtttgcagtcaaacttgacactagaagagatacaagagaaagatgccaaactaaggaaagaggtatatgtttttcttaccttttggtttttgtctttctttgagtaaggttgttgatagcttataaagtgatttcaactgtgtaccaggttaaggaaatggaagagaaactggtcaaactacgtgaagggattacattggtgaggccagaagacaaaaaggctgttgaagatatgtatgcggataagattaatcagtggcgcaagcgtaagaggatgttcagagacatttgggatactgtaacagagaattctcccaaagatgtgaaggaactaaaggtgcaaactcatatttcttcaggagttttttcttacagactacatcagcttcgccataatttttgactactgttactttgcaggaggagcttggaattgaatacgatgaagatgtcggtctaagtttccaggcatatgctgacctaattcaacatggtaaaaagaggcctcgaggacagtaattttcaggtaagttcttcgaatttgattcaaagttttctagaaacgtttcttgtataaacacacacatatgcaactgtacaacatcattgaaagcttatatccataaagaacacaataatcttacatctttgaccacaaaaagaacatagaaaagtacaaaactgagtgattacaccgtagatgcacctgaaaaacttataacatttgtacttagtatccacgaacctgtcttgtcctgactgaaactggacccttcaaacctgctttacgcataataggatcttcaattgaacgaaccatgtggtccacatgtcttgtatccgctctattcgaaccaaccatacgattttgctcatctttagacttactaatagtaatagtctcaacactaggttgggtttcttcttcactatcgtagataatagtatccttctccaatagcttcacagggtcttctctgaatgacatcactgggacatcaataatatcttctgaatctgacatcgaccttttagattctgacatcacatccccttccccttctgaagaatcatcattaccttcttgttcttgttctgactctttgttttcagaaccatgaaatgaattttccccaccaatgttacccggactgtcatgtccacgaggagaaaactgagaaagctccacagccgcttgtgcagcctctgctgcatgagctgctgactcaaacgctgcttgtgcagcatcagccacatctttgtacttcttctttcctctcttgaccgaatcagataaaccataaccttctcctctgccatctttacttgttagcttagtcttactaacatctgatgttccctgcatatttgttgttccctgcaaatgttacaaatttgattagaacatgattttttcaactttttgttatcttggtggttaattgcagatttctatacctcagtggacgtagaagcttggtctagtttcagaacaatgttattctctgcagcaatctccttcaaagccttcattctaacttctttcggtggaggtcttgtcgacaacttctgaattatctatagtaacaccaaaagaaacatggaactcagtaagtattttgttctatcaagagagatatataacataacgtattgaatatagtatttgttgaatcgagaacttgcttactttgggatcaaccccacaattactgcgcaactcaatagaccgagccgcgagatctttgccaaaacgcgaaatcaaaacattacgaatctcttgaagctcagggaattcaccgattctagaagctgcaaatagcaaacccgaaacagcttctagaagctcttcaggacaatctctgttgtgttcaaagaggtgaatacgatcgagacagagagtgaagtagccatggatgaagaagagaacgtcgagagtgttttggtctttgacgacttgatcgactctatggtaagcgtgctcatgttggccgagcttaagaagctcggtgacatcagagatggcttgagagagtctggcttgacgctggttcttgagaatagagagccttgtgagagctaaggtgataagagacttgaacttgttggtcttgaaactgcgaccaagcaaagcgtcaagcttcttccccatggccgagttgcagagaagagaggacaggtagagaataagagtttatgttgtcttcctttgaattggaagtgttataagagaggaaagaggagaagacgcgttacgacatacgaagacttcttagcaacgaagttttcagaagttagaaaaaacgaccttaaagaagaaaatgtggtacgaattacgaaataataagccaaataataataaaaacaaaatggaccgctatttaatattgcgccatcggattaattatttttagaccaaatttaaatccattgttgaaaaaaatgagtatcgtatctgattaatccaaaatgggtagcatatccgaatacgctatatccttaagaaacgttttgggcagtttcttcaaacatctagatcttattactctttcttattttgaattttctttatgtccacctaaagttattagaatatcttgtgaaaattatttgaagaaaagctacatgaaccagtctcaaaacatgaaactagtaacactttgattaaataaagagaaatagtcatcggtaccagtatccacatctgaaccggccataacttgtaccagtctagtcttaaaacatgaaaatgcatgtaagattcaggtttcccctataaattgcagtctttaaagtttgtaatttgtataatgtgaaccatggacccataattattgtctcatgacgaggaacgttcgttctgttctaatttctttaagttattagaaaacaacagaaaataaacgtgtaagagaatccctcaggtcccaatatttgttcgaactttccttacaaaactataaacggaacactcataacaaagtcgtgaaaaagacttgcgagaaatgtcattgttacggctcttactattgcaattaatttaagaatgacaggtttagatgaattattaaagcagccattagaaaacacaccatttcatctttattaggtgtgactacaatatcatgatcaaaagactactacaactcacctgcacgcaactttccacgtcaaaaacattagtaacaaaaatcttgttattatgttgaagagagactttttcttctgttaggtacgaaaaaaatggaaagaccttgtttatttaccaatgcaatcgtttctctagacataattctcccactcatcagaggtgaaccaaacagattataaatattttgtaatcacagatttgcaaaactaacttcaaatgctacctactctttcgtaattatacacaagtcctctcaaactctgatatacttgtatagttgcatgcacgtgataataatgtgaaaccgccaactaaacaatggccaagaacttagattatggaagactgaatcacatgaatctaggaacaacatcattaacaatttctttagaatcttaatcaaaaactaatcgtttaatattcaatgtacatgtatctagggtaacaacattatgagattcacttgcccgtgatgaatgggtgagctaatgcctgtgacactgtaattctcttctgaggatcaagtatgaaaattctgtctagaagatccctgaaatgaaccaacaacttgctatcttcatccttataacgttgtttaattactgaaccaaattcttttggctttatgtttaccatcattctctttgttgtctttctagtaacactatcctcctctgtagcatagaagcataagtccttatcaaagtgctgatcgataaatgctcccttgcgaagcatctttttagggaaggcacctttcagttccatatgcaggcgtaacatttcattgtttgtggagccagggaacataattttcccgctaaaaagctcatacagacagcaaccaactgaccatatatctaacggatggtcgtagggaagtccaagaactacaatgaaaaaagagagtacagctttagttataatagaacatacagccatgaaatatccaagtagatgattaagacaacagcaacagtggaacttacttatttctggagctctgtagaagcgactaacaagatatggtgtaacttcgtttgtaccagcaaacattgcactaccaaagtcacaaagctttaacgtgtttcttccctcattcacctggataatcaaggaacgaccagaagttaaaatttatgtgcatcaagcaggagaaaaacacagacaagtatagcttaccagcatgttgtcaggctttatatcgcagtgaagaaccccacagttcttgagatgtttaagggatatgaataactgcgttgcatacactctaacaccagatagttgaataccaatgttgcgaccatacttcttcacaatctcacggagattcagatgaagagactcaaacaccaagcaaaggtggttcctatacttaaaagttgaaagaaaacgaacgcagtggcgcttattctctgggtcagagccagctagcttcttcaatatctgaatctcagtctggccggccttatgcctacacaaaacgtgatatgatagtgagacattcacaactcttaggaagataaatcaaacatcacttgataagaattttgataaaatttgtccggtcctagagaagaccacttacattgtctcattgttccgaataatttttatagccacttcctcaggttcacctagttcagcttttgtgtcttttgcccgcaccacggtagagaagacaccttttccatgagtagccatgatttcatatctatcatcaagtagttcccctaattgataacctaaaattaagagaagatctttcattgttaagacttaagatgacaaatattagaaggccttttccagttgaatgataaaacacgagcaatgaaatgttcatggaattatacacaaataggtcttcaaagaatttgaacttaaataatacatagacaaaataaaaacacttactgtaataaccttctgcatcatcccaattatcgtcgagtccactccttacaataggaatgccattccctttccctcgcagatagccctaaaataaaataatttacgaaaaactccttagccaacagacaattattctccacaaacacatgtcagaatgaaaaggcaatgaaagaagtttcaggagtatgaaggcaacagttgactagtgtacagcaattgatgaactactaccaaagcaggatagaaatgtttctaggaaacgaaagaagagaaaaagctcactacaaaaatgtagtggacaaaaggaagtccatttcttgagtatcttgtcagatgatgtacggggaaaacaaagcagatgaaaccagagttagaaaactctataaagacaaggtcaataatttgagtaagagtacataccattttctgactatcagctggagactccccaaagatatcatcagtgaacatgtcatctgatattttatcctaaaaatatagcataatataagaccggggaaaataaaataaacaaaaagcattccccaacaaacaaatttcctttgcaaacgcacctttgggctgccttccccaagccctgtggaagctagtgtcctatctgagtctgaaattacaagctgtgcaggtgattccccaactgccgatgaaagcttggcgacttcaccatctacggcatcaatatccaacccagctttagcttgattaactgcagaagtaacaggccccagagtaccacttccaagaacatctgccacagtagaggactgcttgggaatgtttgctagctcaagatctggattcataaaatatttgtgtaagtaaatgtgggagggtgggccaagaagaatgacactttcagtgacacaattaataaaatctaatgactattctactaatcgaattacaacccacagatactaacttgaaaggctcaagttgctcataagtgatagtttcggtacacaatacaaaagatttgaacaaaatgactactcccatgtcgactaacagaaacccaatgtaaactaaatgtaacaagtacacacacaaagtagagaaagggcaactttgaacaacacccatatactaaatgagcaaatataaattcttcatgcatgcgctgttcagagcaatgatcattaagaaaactgataatccccttaccatgagaagaaaatccgttttgctgctccaactttttcttatatttctccattatggcttgcgttctcctcctgctttcctcgattaaatttagctcttcatcttcttgttcaacttcccaaacaacaacgtcacctttatcatcattatcaattctggtcctgtttcaaatataagacaatcaaacactattgtaaaaggtgttgcacatttataaccaacctaaacattcacaagacaaagttttttctgggtgaatatacctttcaacatttccccgagtttctttgacatcgccactgttaggatcatggccatttacagaagttgggcttcttaactctaagtcatcttccgcatcatgtcttgagtgtccagaatgtttatgcctcacttcaccatatccatcatcaagacttttatgcttctctctatcactctggaattctcgtcctttatccctatctttttcactccgtctctctctttcattctccctccccctctctctactactatacctggctttatctctactcctacctctgtcgttgtctctatcccgtaggtaatctttttccctgtctcccctgctatctctatcaacgcttcccctctcttttctcctttcacggtcaggctctatctcttttcttttctcacattctctttccctccgctgatttctcccctgcaatcaccgccacaacatattaaaagactggttacaagagaaatatatggcgtagaataaataagcatgagcatacatgacatttatatgaaagatagttataaacgcgtatccagctcttacaaatcaagggaaagccatcatctccattgaacgcctagtgcaactgcttttgcatttcttacaaatgcatgagacattcaggttatctaatcccacacacagaccaagaacgaacttcattataataagataaatggcacaaaaccacatattacgaaagaaaaatctagactttccctactttcaattaaaagccttttgattccaccatccgagaagaagataagctagcaaaccggaaacaataaaatgaagtaaaagggcgaatagaacagaccagattattctcccggaattgaccagattttatatccccaaactcgtcgacggactctaatttcttcttcaatgtctccccaatcccttcttttcctaatatctcaccttcttccatatcaagatcaccaccgttaacattctcatcatcgttatattgaacttcctcatcacgatgatgacggtggccatgcctgcgatggtgatgacgggacttgtgccgcttcggagatttaaagacctcgtcggacggcgaaaacgaccgtcggtgtttgcggtggtttgattctacatgcttgtcactcaccatcagatcgtcgaaattagggggaaatcgcaaaattagggttaggttcgattttgtcgcgcgctctctctcaatttgtgtatccgtgaaaaaagacttaccagatttaactgatttgtatggttacgcggtagccttaaccggatatataaatcaacgaatcccaggtttacttatatttccagttaatttgaccggttctcggatttaatgattttatttatacagattgaacagttaacttgaccaatcttttaatctggcataatcggttagacccaatccttaatttgtagttgttgttggttttgggccttttgggctatataacgtatgattcatgggccatcttattcacaccagtctgaaaatgaaatcagacttaccgttcgatatgtgaaactgaacgtataataaaaactgacaaagagagtttttcattctgaaatttcacattaacaaaagctatgaaaaaaagatctggaagaacaaacaaacgaattcgctaatactaatctagcaaattacccttacaaaatatttaacttttcctaaatcctaataattttagttaatagatattaaccatcgggttaaaaaaaaaagcgagggagagccaaacgctttaacaaaacgatatcgttttcatttcccacctaattaaaaaaaaagtttgttatttatttattccgccggtaacgactccgaccgccacgaaaacagatcgccggagtcaaaacaatcgtcggaaaattcaaacaacccctcaacagccacgtaatctccaccatctccgacgccggaaccaaaatctaaaccaccgtaattcgacacgtgatcttcaaatccccaaatctcgtcgattcctgacgaatcagaagacgctcgtaccaaatccgttaccgtctccgtcgttacctcctccttcgcgacgggaaccggagaaatcgatggaggtggtggtaaaccaagctcatcatcggaagcttcaagaagatatccgagatcaggctgagtttcgccggcggtagaggaaccttgcgccgtcgtggtggtgaccgttgataactcgtcttcgaaacttttcataaccgagtcgagatcttgactcactggttcaggatccgagtcatccaggacatcgaataaatcatctctcaacctcttcacctccggcgagtcaagaaccgcttcgtcgaatgactcgtctctgactcgctttttctcagccgagtcagtccgagttatatccaacaacttcttctccatagctttggcaattacgtttttctttgtgtgttcggtgaaacgtatttttttgaatcagtggcaaaatcgaaataagtgggggatagaggtgcagaatgggaagaagggaacacgagattatatagtaggggagagagatagagagagaaagaaggaacgcgtgagatgtgacggatactgaggcgcgtggtgagagcgaatcctttggaatcacggatcccttgccttttttattttctttttattttaaagctttttctgggttttttactatcatttttagaaaaaaaatattaattagttttgaaaacttccagatgtcgctttctagttttaaaagcattataaattgatttgaattcagatttgaagtccggtcacgttgcagtgcacatgcccagtcaattacgccttctcgatatttcatttcttattttaatatccttctctagatttttcttcaaacataattatctcttaacctttttttaagacttatagatttttctagaaaatatcgcatgtaataataaacactgaatattgattttttgtggcgacaaaatattgaagaatattttgttgtaattatttgtctgtataaaaatagatgctgaaacaaaaattatgtcaacaattttttttatatttttcttgtttgccatggaatttaaacgaaattaatgggaatgaatgttatattaacgaaattaatggaagaaatactgtaagcacgtaagaactgttttaatcaaattgaaattataaaattgttagtggttgtatatgtccagtggtcatagatagacttattactttgggtggtcctttagcttactactatattcaacttcatctaccattgtacaatttaaacgaacgaaaaaggaaagaatatatatgtataaatatacaataaactttttatctactgttttctttttttgatagaaaactttgctaactttttgtatattatattaaaaccattggtccatgacgagctatgtgaatgcattttttatatgaagatttcattccatatatatctatgctttttgatcatttacacgtaaacgtgaaagttttatggggcacaaatcaaattactttttcctatgttcatatttagatatgataggacgcagacaacatttccactacgagtttcctattgtctaataatatcattggtcgagtttgaagacaattcataataaataaacaacaagatgaaccacttcgaaaatagttagattttacttcatgatatgggaaacgctagaacaatttgcaaccgagttaaaacaaaccttaatgtaatgattttgctaatttttttattcttgtggtattactatagggaacctctattaaaaaagtaggttgatgttgagaattttgagtttggaataaggtgtggatttagacaaaaggtgattgttttaattggtggacaataggcatcttagtgttgccaatatacgtggtttaagcaaagttgtgattcttgggtaatacatttatgtatctgtgcatccattactttcttcttctttttcaaatcgaaccattactttttttttaaagaatatgattgtattatcaaagatgcacgtttctcctcttttttcggtatgacatttcgagcagtccatatcaaacatattggtacgattttttggtggtgagtgacctaaaatttatttgctagatataagcaaagaacatataacactatattgaatatccatcgcactaacgttttctcttttctttaagggagtagccaaattatttttacttagaaacttgtagaatgatcataggatccaaatgatcttatgactgacctaaatttgtgaggaaaataatcgtgtcaatcataaatgctaatacgttttgaatcattcaatatatcgtgtcaatttgacaacaacgattttacctctaaacattactttattgtagaatgattctacatgcatctgactgtttttctatgtatcatacacgcttttatttaagctgattcttttgcatttaacccttccttgtttcaaaggaaacgtacatattatgggttttacgaatacaaagatacaataatacatacattgctccagaaactgagtttaatttcgagaaataaaaaagttagatgacaacaaaagtaggtacagaagacaaaatgtacctcttcggatatttggatggttttggttattttattcagaatttatctatatatcaatttttttgtgtcgtccatctatatcgctaagtatgcgtatacgtaggcctacatgatgttggcctcatcgtgcgaatcatacacgtatcaagaaataaatatcagtaaaccctttgtcaaaaactaacaaaaaaaaactgaaggtccactacagatcaataaattgacacttaataaaactctacacgtatttatttacatactctatcaaacctagaaaacctctaaaatgtcaactaaaaaccatgagcgaaacaaataacctattcacaaacaattgatattggtagaccaccataaagagttctttatatttgttacaattgacaagtaatgctgatattcctgaatgctggtacatattaaaataaaaacactgttacattatgtataatcatagttaacttgaaatattatatgttatcagtttttttacattaatacaaatgtaatatttatatttaactttgtattaatacaattgtctttaaattcacttaaaataagtatatcgatttgggtataaaaaaagggctataaacagtataatgtttttaatcatcttatgaatgactactcttaattaaaattatgtgaagtacataattgcttagatagatttacaataaaagataaataactatactttatttttttggtcaacaattaaaattccctaatacagcatagatacgcagatgtcttcttgtatatattttagcaaaaaaaaaaagccttcttgtatagtgattttaaaacaaaagtaagatatattgtaaaaactaatcaaagtggaggtgaagcataattgtgttttgtgagtggtatatatgcgcatgttggatatgaatatcaagctggggacagtttcagtctatcgggtgtttttctaaataacaatatacccgagcatatatactaaggttttatatttatacgtttaaatcaaatgtagtggaataaataagtaatatatacatttacttgatttattttattgtatttttcattttgaggccaattcacaacgcatcacgtgagtacgaagcaatcaagtacagaacctcacaaagtaaattacgtggtcccccaccaacgttccatgttatctattctctaataatctttttaattgacattttataaagattatttcacaaaaatattataacctatcaatattttccggattgacattttcttacctgacatttatttatttaatatctgttgatgaagttataatcgatctgttcatattttaatggtgtcaattcagttggatttagttaggggtttgaatggttatatacaaatttgcatttagataacttagaaagtagtgaaataaaaagtggtagttgataaatttccatgtgcacaccaaatttttagtacggcatatggtagcatttaaaaaggtactatatatatgtaaattaattatcatctgagttttggctactctaaatgctaatgaatttagctgtgaattatagggggaaaatatagattcttatagtttctattttatgtaaacatattctaattggaaaaagtatatatggtacctttatttataataataatattaattaaaaggaaaattaacccatcaaaaagtattaaaatctcacataaaatgttttttttaaataactgtttgagctagacccaatttaaacttaacgaaatcctccatatagtccatcgagtaacttatctgaataaataaacaattccataaagataattcgtaaaataagttgtatttatttggtgaccacggaaagaagagttataatgtaaaaattagctttcctattctttttacattttttttattttttttttatttttcatgtggtccaaggaaagtaatttttaaaacgacaataattttatgatttggccttctattaaatttctggccattggttttaggttacatcagtatggatatggattatagtaatcaattcagcaaaataaaattttcattttctgtggtaatgggagatttggaaaaggagcgcaacacatgacacgattcaatatttaaaaccatataaatgacaggttttctatattaaacatttaatatatatatatacacttatatatccttttctttatatatatacgtataacatttatcgaagtaattttaaatatgaaattaataatcaattaaatatgacatatgaagctactagccgacgacaaaaaaaaaaaaaaaaaaaaaaagaaaaaaagaaaaaaactactagcctggactaaagttttgcagaatgccagaatcaattaactgacgtttagcaaaaaaataactcgtgaatccttaaagtcttcccaatatatttcacttgtttcactatgattgatgttttaaattaatgtgtgctgtatgcaaataaattttaattaagcatcatttaattatattgaaaattattactacagagggccaatgataatttagagttgtgaaaaatacttcgtaagaatatcgtatattgattcgaaaaaacttgaaaaatgatatcacttacacttacaatattattatgaatttgattggtaatataaatccataaagatatttagcaacaaagaataacaaaaaaaaaaaaaatgacgaaatacttataaaccaattagataaacaatatataattgcatctattaacaaaaattggcattataagtctgttgaattttgacaaagcaaaccctaaacctcataatgccaaacctaaaccctaaacctcatacatataggttaataaaaataaaatatagaaaaaggaatctacatttaaagaataaaaatactgtgtttaaattacaaaaataagaaatactttagaaatgatgtaattaaaatttgtcgagttcgtttagtttctctaaataattcttctaactatatctacatatacatttttgcagtcactttgttaaataaatcttcaaattaagacttatttacagtggctgccattgatatttaataattgtttttgataattaaaaagtaaaacttagaattaaatgtttgcatttaactaccttcccacaatctctccacattaactacacaattagttactaaaataaaacttccaaaatatttaatatcatttaaacactataaaattattattttttaaattcctttttcatgactataacaattcgattataagcacaaaccgtaaagatatttgataacagttaattactacaaagttacaaaatatttaaacaatgattcataaacatatcataaataagatcaacattaacaaaataaataggtttttttacgagacggattggcggaacgggtttggcaggacgttacttaataacaattgtaatttataaaataaaaatattttatagatatatacaatttgtaaacttttatatataataacttttttaaaaaaaaattattcccgcggattaaaatctagtagacatacattttcaccaaaaaaaaaaactatataggcatacaattttgcaaaagttgaaaaatagcgttgaagtgaaagtcttttcgcctaatggcagagtctaaaacatactatatatatgcaactttatattttagtggtttctgttcgataaaaataggatttcgtgttatgaaaagagaaggcactaaaagtaactcattctgtatacagttctttttagctttcaaatttcatcaacttcttttaatctacaccaggtatttgacatttccttttgagtatttgttttttcatatgattttttctttctttttttggtttattccttttcaaagatatggttttaaaaggttgagaatttgcttctcattctattcttctagtcctgttttctgatagaaatttccacctaaatattttgatgaccataaactaattcaggaaaaacacaaaacaaaatctcctagaaatccatatgcgatgggagaggattgcatcctaaaattagtcacaatatttttttccattaaaactaaattattattctagcttattgtaaactttctaaaatcagcatgttaaagtgtgtatagtttttaatagtactaaaaataaataatgcatgaatataaaaagaaatacattgtttattcttttcttttcgtgtcaacagccaatatatatatatatttgtggcgtatgtatatcgtcgacataaaaaagatgggaacaattaagctaaacgagggaccatgtgttgaagaaccatcgatgcaagggacgtatagttctgtaaatggcctaattgcaaacgatgttaaactatttaatattccataattcagatttcagattgttcaaaacataaaaaccgtaaaaaaaaaaaaactaaaaaaaaagctctgaatgatagatatttttttgagccctaatttatgccaatcgtgtcatcataaatcagaatcacaaaattttcttgagaacaataataatatatatattatgccatgttgaaaattgaattttctaatagagaatttagaaggatggttaaggtgcgcgtcgctttcatttagtgtcgtcttcggtcagcgccacgataattgtctatgagcaatcatcctctgcttctcgaccttactctattacaagttacatacaatgactcgaactttgattagtaacacattgatatcgtggaaaacaattaaattatgatttaagattagtgatctgcgaaaatccttggtattttttcgttgtttattctaacaaaagttttactaaattatgttacaaaaacgaatgacttttgatcgtgaaagttatttgtttttgtagaagcacatatattgttttcattcactatatattcacgtaaaagatataaaacaaaatataaaatgagttatgtaaattttatttacctggccgattttattttttcaacatccctttgatgttgatgttgcttcgtcttcatagtaatgtgtcagcattttttttttcttttttttcttatcatgatgatgatggcttttgttgattccggaaattactcaatcaaagttaatcgtaatagtttaaatcagtcatcttttttgttcaacgaaaatacctagaattgtctcgtttagttggaggcgccgcagaaattatataaaaaatgtcttagttttttatataaaaaaaaagtcgtgaaaaacactatcatttatcctttaacaaaataaataaataaattttgctatttgtcgtccgataatgttttagccactttaagcaatactatttaaaaccaaaatttgtatttcatttgaattttcattctggcgtgtagtaaaattccaagccgacagcgtaaggcagacgacgtgtacatagaacgtgccacgtgtatcacaccttacacagcaatctgaccgttaatttttcccgaccaatccacgtcatcgtcacaaccgccgttggatccacgtactataatggatatgattaattgtttagaggtctcacatataaatttaatactagctgaaacggtaaataataataaaaatagttgttggccatatgtccattacattttgtaacgtctgaccagaaatggaaatggttgtttttaaatttgaccagaaaattcaaactaattaatggaaagttatgtttttggtggattttagctgaccattaatgatagttttggtgtgtacttaagctacttgacaaatggaatatagtgccaaacaacaaaaatatttggcgaattaattagtgaacaaaaaaaaaaaaattaatttatgaaatatttgaaaatgctcaatatttctgatgtaactttataagtaagagtatttaaggttttgcttttatagtttatgataaattctcaaagtagtaatatttgtttacccatttatatttaatatttaaaaatgatgatatatttctgataagatacgtgaattaagattatataaatccttactttggatctagatatgtaataatatgtcaactcttaaatgttataacatttcaagttatttgattaatgaccatttttacctacgttatataaatcatatacatgatattatagtataatcgattatgttacgtacttacatatgactcgttaatagaaaagtgattgcgtgattaggctggacaattgtttaagataggaatttcaaatgataaatagtcctagattattcattatgttatgagaaaattcatacgatattgacttaaggctctattgatactttagctttcacggaaaaaaaagaagttgtatccaatttggaaaagtagagaacaatttacagagaaggtcccattggcccctttctttattcatcgaattttcaataatcatttttagtctattcttttaatttctaattttttgctaatatcttttatacagatgttgaatataaagaaattgccaagcaagcatatcttattaaaacgtaaatctaatgcttgagtgggtatatttttggatatagttcaaaagatataagaaatgtgatgacctaacacctaacccaacaaggccaacgctattttattttcgaattcacgacgttttggtaagtctattatattggcttaggttgctttcacaactaaacctgtcaacctattttaattctgtaatcagctttttaaaaaatttgattcggcaggtttaaccaaaacggcacgtaaatcgtcattaaaaagttgtgctggtaccgtaaatctttaatttttaagaacatcaaatataactaaaaatagggacacacaaaaaactctatttcagattaaagataacttagctttattttattttccttacaagaaatacaccttttttgaagaagataaaattcgattgaacaattttgtatggaaaatataaaagccacgtcaattgagcctttttttttccctgttacttgggtttttgtttgtcccatttgccttatgattcgtcgtttttattttctagcttctgattgtttaatagtgagtttgataaatcagttgtgaaaggaaaaaaaaactacaagccaaatccattcgcaaactgcaatgacgtaatagtgatagtcgtgcaaatcactaaattacaaatcctagtttttagtttcaatggcgaaagtttcaaatttgcaataaatttgttttcataggtcaagaaaaacgattatgaaagttaaatatttgctgatatttaataaataataataaataatttatacaaacggtttgatactataccgagattcaaaaaccacttgcgtgggcctaaatttaaaaagcctttttatgaagcccaatacgctttatgaagtcctttagactctcgtgtacgttacaggagctttattctcggaccaatcatcttgaacctgatgattggttaaatttaggttgacatttttgatttggttttgaagataaacaaaccgttttgttttggttttcagtaaatctctgttcggatatgggccaagtcaatgaaaatataggtctataaaatttgtgttttattgggcttgtatatgctaccatcattacatgaagtggtactatattaggcctgattattttacgacttaattaacggtgccgttagggtttgattttccttggcaattgagaaacaaattcaaaaacagtgatttatcacaccatcaattcgatctagaaaaccagagtaataaaggtttaatatcataagcaattcatctctcaaagagaatgtgacataatgtatttttgttaaaaagcgacaaagcaaaaacaatcgaaaaccctaatagaaaaaaaaaaatactagttcatatgaatggattaaattctaatttctaagcacgctctgcacgaatccttcttgccaattgaacatctttaggcataatggtaaccctctttgcatgaatggcacagagatttgtgtcttcaaacaaaccaaccaaatatgcctccgcagcttcttgaagagctaacactgcatggctttggaatctcagatccgtctacattgcaaatttccaccaattatttatcaatctttttcatcaagttaggtataactaatcagtatctagggtttcgatgattgaaagacaaaatctttttaccttgaaatcttgagcgatttcacgaacaagacgttggaatggaagtttacggttcaacaactctgtgctcttttggtatttacgaatctcactgattcatcaaacaatagtcatcagaaattgaagacgatgagaagattgtgattcgaaaagaagaaaacgtgaaagttaccgaagagcgacggttccaggacggaaacggtgaggtttcttgactcctccggtagtcggtgcagatttccttgccgccttggtagcgagctgcttcgtcggagcttttcctccgtgtgattttctcgcggattgcttcgtacgagccatggcttcttcaagaatctgagagcttagaaactatgaaaagattgaatcagagagaaaaatcgccaaagcttttaatgttgtgttttgatgtagagaaaagtaaaaaagattagtgaattttatagtgacgaggtgtgagaattaggtcggttaattttggggagaggagttgatagacgtgcgattaaaggcatgttcgacggtccatatttgattttgattaagattatgcatatgtggcgatctgcgctttcgattcttattggtccattttcttgttgagtttgttgaatcttcttcttctttggtttaagtaacgtttttgttgcagaaaaaaagaagtaatgttcttaaaatgagtaggctttatatttgagtctacgggaggatctataatccagtttaaataggcccagaagcccattataggatgaacattttgcattgttcacataccttttaaaatatgtagttaaataacaatgattatgacaaatctagtcaatacaaacatccattacttatgaccgaaagttgcctattgaattgagagcaaatagcgaaaattttcataaataagtaagagatatataagcaaaagatataagagtaaccaagtgttgtaacaatgcaacaatctctttcctttcttacatctacaatgcaaatgactaaccatttcctctttttgacatttatgcataacccgccataccaatattggaactagagcggttggctttgtgagcaggcggcgaagagacggacttggtaaaatacatgtagtagtagacattaagaaccatagtagcaactataaagactgcacctgcaatgaaaattcctttacgcaatgatgcacacgaaaaggtttgcgaacttaagtactttgtgtggtatgcgttcttggtcgctcctgctattacacaagcttctgctaccagaaatgtcatcctgaaattgtcaaatttgaatatcaaaatattggttgagaaatcaaactactaatccattgatatgttcaaagcttcaaaaacagaaatcaatctaaagctctttcaatatatatcactctcaagatgaagctaaacttgaagatatatacattgctttagagatgtttaagataaagggactcaccacgaagagatgaaatagataatagaccaagcacggtcacttccaggggctaagggtcttccaaaacacatgcatttggtaacactcataagcaatgattcactagagaggaggaaaaggaaagctccaactccataaccagtggctacatcagagtcataaacgcagaacgttgtgtttgttattgggtcttgaatagatttcccctgccacaaaaacagagaaataatgaccttaaagaagtgtcacaacagattataactcaatgtctcaatctataactaagctaagtcacttaaatgtttctctagtcttcagctacaaaaacatgaacatagctctgaaaaatttgttctttagtttcaagatttcccccaatttactgactcttgaagaatcttgaattcaaattagaggcaccaaataacatgttcgctgaaaattgcaagtaattacgaaacaaatccagaaatagaaagattcaacagaatcatactattgactattataacctaagaattcgaactagagttcattaaagaacaaaaaccctaaatgagaaaaaaaaagtgggacagagagagaagagtgaatttacgatgctgcggcggcgctcggcggcgatggagaagccgaaggctactaaactaagagcgacgacgaggatgaaaaccagagtggaggccttcccttctcccattatctccggcgaaagagaaatagagagtttttgcagagacgacagaagtgaggagtgagagagctggaaaacgagttaaagtgaaaaaacacacacgagcagtgagtgtcgttaaaataaagaacacgctagacatagcgcgtgcttgtcacgttagaataatgatttgaagaaaagattcacgcggagtgtgaggcgcgtggggaaagctttttgaattttgtgtttcctttttcgaaaaagttaataaagggtaagagtgtaaaggccattttataaagatatgggcttgatgggctaaagagcccaaatatatccctttttaagttaaggccgcctaataggtttgacttttacgagagtcaatttaagagggattttaagaataatcaaattgtttcttattgcaaaaattgtgattgatactttgatacaatcttagcgtagtacaatcttttgtcttacttcaggtgaaagttacatgtcatgttaattttgatttgagatttatctctttgtttgttgtcgtcactaatttagataaattgatacttgaaattcagcaaattaattttaaattaaaaaagcttgcgagatttccggccacaaagtttgacgaatcttttggtttgattgacacattaaaagcgaaacaaaataaatttatttatatttatataatttacaagctgtaagcaaaaggaatcgaaattaaatagatcaggagacaaagaaataatgagttgtcctcatgtcacttggctggtccgtaccctaaccacatccatgtatgtacattttcttataacgcttagtttattggtttatgtacatttgtttagtttcttttgatataatcgtaatatatttgaagcaagttatatgaccaaacgagacatagttttttatttataatgacgacaatctacttttccaccggggacggttgtttgccatgtcttatgttgttctgttctttccatatcgagtaaatattattttgaaaaacataccttaggataaaaactttagtgtggtcatgaactttatttgtgatcagctttttaacccccgtaatgtttgctaatttgtattcagttaaattgtccacaattattaatgcaaatctttaaactcttgaacaattatggttactttgtctacatattatattccattaagaaaactatagacacattaatcaagtataaaatattgttgatacttgtattttgttaaattatctgaaatattttggtatattacaaatacaaatcatcttttgaataaaatatgatctttaaaatttagtcgaatcatttacttatcatatgtattttttttattttagacgaacgaatttcgtaactaaataacttttccttttatgatattagttctttaagtttacgtaacatcataaatggtaaaaaatagtaaaaccacggtatcaggttttttttttttgacatcaaggatatatttcattaagttgcaagtaagagactctactactctacgagaagctatataaactattgaacttatatgtgagtaaaaagatacatgaatcaaaattttggtttaattactgtcttatgattccttgtgtttattctttttgccttgtaaccatatgtataggttttcagtattttgattgcaacttaaactgttttcatatatatgcaatagtaacaatttagcaaaaggaaatgaatcgatatatttcttgcgaaccacaacatctggtcaaagagacggaagcgaaaatagtataactagagatggttgtttcactccagaaataagtcactcgaactgtagaaaagctaaccgatgatcaatcgccatctaccttgagaaacattgccactaaaaaacaacaagatttcgagccacctatcttgagaaacatggccacacaagaataacaagatttcacggtatcacgtatactgaaacatatgaacttgaaatatgaaagtatacacaaatcatcacacaaaaagtgacagtaaaattcatcactaatgttagccacgatataagaactaataagactccaaaactgatcaactcctttgaaatttacatctgttcaaaaagaggcaatgatatatacaaaaataaaggcagagaaatgatatctttacatttcaaaactctttcgagcctttccttttgttacaataaggaagattacactacgctcttatttcccactaaagataccaaattaaccactctctctcccccctttttaattacaaaattttagaaaatggacacccaaaaccaaaaccctaaatttataacaatcccatttataaatccccccactttttttcaacatatttacacattttcaccaacaaaaccctcccacataatcaatacctaaacctttcttagttgttcttttaatactctctctgttatatatatatgcatattggactactcttatgcaagagtcgaaatgctcctgttgctgctgcgtctgtcacaatcaaaccccacaacacgaaccacaggattgttcccgaaactcgtcgccgccataacacaactaccgttccttggagaagacggtggctgcggtttggttgctcgtggagtcgatggactcggagaagccaccatgagaagctcttctcgaaaaagcgaatcttttgttaatgggttagaaactctacttggaggtgaccctgtaaagaacagaggtggcgtcatcaccgtcctcgtctgatcttgctcaccaccaccaccaccaccctgtaaaaatcatcacataacaaataaaaatctaaactttagatatcaattcaatcaaacaatcatcaacaagcaaaagggttgttattgaatcatatatatacctttgtgaggatgaaatccaaaatctcacttcctgaattcgattcacataattccatctgatgactacaaaatcaaaaaccaataaatctgattgcttcaagtgatttgcctcaaaaaagttttgaactttattacaaaaagtatcttacttgagttgccaacggagagatcgagaagagtggtgattaagagcaccaacacgacgaggtttaggacaaatcacggcgtctctccgatcagaaacggcggcgtttctcctcatctcttcaaaagcgttttgttggattccacagctgttcatcatctttggttgctgcttcaaagaatcaatcaaaccacaaagaaaaagtgaattacgagattgaagaagaagatggcaaaaaatgatatataaatatataaaaaaaaagataagagaagagagaagaggtggtcaaatggtaacgtgtttcttatggagatctggtcataagagaatattatattattttaaggttgattatttattaattaagacagaaaaataacaatggtaaggaattagcccacttgacaaaaattacttttaaatatttttttaatacgtaatgtttcccattatagtgaatgatgtcaagatcatagtggagacagatttttttcttctttttcaagaataagtaaactctaaccaaaaaaagattatgagaaaaagtcttaattaaaacagtgacaagatgattaagaataacacaaaaggatcaagaattcgtagaaaaattgtttcagatcaaaatactaataaaaatcaaaaacacaaaccaagaaggatcttgagagattgttgagatctagatccgagattcaaaagaattgagagagatacctgaaggtgaaagaaagagcagagatggttcttggcttgtttgtgctctacgtgagcagaagaaacagaagaagaagagagatctgaaagagagaagaagagtctaaatggcttttgaggttaagggaaagagagaacctgcagacaacaaatgctatggaatcagtatttatttatttgtttttcttaatatctctaacaaggtataattgtttgtgtttagagcaaaacgcttattttagctaaaaatatttaattctctgcttatgaaatttaattttaacaaatgttttataaattgtattttgattttatggtgttggatacagctttaagtttcaatgtttagatatttgccttttttggtacaaaggaaggcggtgcctaaccagactctgtcctcgtaaatatctatcaatggttattaatgtcaccgacgatatatatcaatattttaattttacattgagatctctttttacttttaatacactaatcactaatcaccatttggagaaatgaaaatgtagattttagattttataatatttgctaatagaattgatatttgtatgtacattactaattagagagatggattcttcttttcagtttactgcatgttgacatttgtctattgaaaatttatggcatatctatgaatagattgaaaaaaagttaaaaagctttataaactgttattttattgcgtcataattataaagattttaagaaaacaatatcttgctttcaaatacataaacagtagttctatgcttataaataaaatcagaactaattaaatgttagatgttacatttacagaaatattacattttgagggaaatattgattgtaatttctttctaactatacaaatttcttctttatttttaataaattttaataaatattatgaaaattacttagttgcaaataaaaaaataagaaaatataatgaccaaatttgttaggaatataggaattaaggtgatgcgtaataaaaagattagagaaataacaatcacaatagttattaagtttaaaaaaacagcggtaagtgacaattattttttaagtttataaatgatggtgatcggtagtaatttaatcatggaaagtaacaatggtaagattcaacgatgcgtaataagaaaatttgaaaaataaaaaagataatctctattagattttataaaatgacggcggtgtaaaatgataaaattacaaaaatatcaattacaatattttgaaatgtatagaaataacggcggtaggtataaaaagaatatggaaataatattgacaatatttattatttataagatgatggtgttgtgtaatataaaatttatggaaataacaataacaatatttgttaaaaaattaaaaaatataacggtattcattagggttataaaaatgacggaggtacgttgtatatataaaagaaaaaaaatgacggtgatgcaaactgacaaaattacggaaattaaaattacaagatttttaggttttttaaaaaatggaggtgtgtagcgacataattagaaaaataacaatgacaattggtttataaaaatgacgggatactaaagaaaaaataacaatgagatattttgggtctatgtatattatggcggtgtgaatgattatattaagaaaataagaatgacgagacattttaggtttctaaaatttacgaagttgcaagatgacctagatttttttaggtttatgtgagtcgtcctctctcacgctactatgtaaagcgtagctcgtttgaactagttgatgaaagtctttgcctttcaagccttgtatcatgccctgtttcagctcgcattttgattttttcttcgatttagtatgtaacattttgtttagttttgataagtgttattgatggttccaattccctcggtgtgcttttgttttgttgatccttctgctgcagcattgtggtgctattaagtacttcaagtcgaattttaggagaaaaagatgtttggacttcgtttgtttgaccaatctgatgtttggtcttggttcaactcctcatggtcaagttgagtcaaattctggttcaatcgtggttctacacttctactagatattagctattggactagttagccattgggcctatgggctctgcaaaacatatttatcaaaaaagaatggaaagaaaaatctacttagattgacattttcccgtactacttgagctgtgtgtatccaaagctgaggttctagcagtttcgttgttcttttggcaaggcaatcaagttttgatctcaaaaatagtatccgcccttaaatatatatcttgtaaataaatagaaggtctacaagagtaatcaaataaccagaatttcacggtgtattagaagcgataattacggattgggtttgcattttgcaaagcttctacagtgcatgttccacgacaaaatgcagtattaattttggtgattgttattttttgggtattgtatattagtgaagtatatttctgaggggaccaatgtaacaactatctttagcatcagagatcataatgagtaatgagtaatgactactgcctagctcatctctacatattagggcttctcttacatttctttgtaacttctatttggctttgaaggagtgagtattaatttataggcaaatttctttctttggtatgaatgtgagtttaaatgttacttctttctttccaagaaaattaggtggtctcttatagaaaatacattttataagttcgcataacctcaagtactcatgtttaataacttcatttaaagagatcatttagtctatatttcaaaatttcaaattacttgaatataataactagtttcctttatttgattgagtagtagcacgatactgtgtatgtatataaaagaaagacaaaacaacaaatttaatctgaaagattcgacgaaaattaaaaggacttaaaattgaaaatatttatttttggaactgtgagattttgattgaaactcgtactgactatacagttattatatgtgaattcgacagtgacttgagaaaagataggttttggaatttgatctttagcctaatatcaatttcattacatattttagtgttactcatttgtatatcctatgtttagtctttatttattttattttagttttgttgacagcgattcgttatgttattatattagtgagaacctgtaacaaactaaacttttggtccaagtacttaccgtctgatcgttcaaagaaaaaaaaaacagaaatgttaattaaaaagtagagattaaaagaaaattaataatagagtaaaaatgaaaaatcaattggatataacatcacacaaaattattaacaatacattttcatatatcggacttgttatatacttatatgtatatgtgaatatgaccattatatacacaaagggataccttgacacataaagtcccctcaacctatagtcctcttgcataaaagtcacaaagccctccactttgagttccatgctcaatgttctcatttctaaagagataaaaaagagagagataaactgattaaaagaaatttcacaaagctctctttaatttatccctccatcttcactctctcaactctttatccttagtttcgtctctcctgtcttcttggtaaccatgtatgttctctctctctctctctcctgtcctctcttcatgtctctctcattatttctctaactaaatctgattctaaaattttaaactgtaattttttttgcaggagagctgatgaaaataacactttagatcttaataacttacctgatgatccttctagagacattttcccattctttgaagaaggcttctcttcatcttcttcttctggtacacactactctcccttttcttttaattatttgaataaagttttgtaaatgattaaattaatctccccaccttctgctttgggtgattgtttgtaataaatatgatactagagtcaacatcataatagtaaattaaggtttggaaaccaaaaaagttttgatctaatcattagacgtacatttttgtattaatttagataaatctaattaagctattaatctttattattgagtaggagggtttagagagaagcaaacaaaagatgggaaagagtatgaatgtagattttgttcactaaagttcttcaaatctcaagctctcggtggccacatgaaccgccaccgtcaaggcaagatcccattattctctatattatgtatatacactaatacacatatcttattttttttggggttggtgaaatagaaagagagacggagtcactaaacaaagctcgtgaacttgttcttcgcaacgatagctttcctcctcatcaaggacctccatcgtttaggtacttttagtttctattttctttaacaatgttttactcattttacatttgatatcttactataaatattgatgtaaatatatagttatcatcaaggagatgtgcatataggagacctaacacaatttaaaccaatgatgtacccaccgagacatttctcactccccggctcttcctccatcctccagctgcaaccaccatatctttatcctccgctgtcttcaccgtttcctcaacataacaccaacataggcaacaacggtacgcgtcaccaaaccctaaccaatagcgtttgcggtggtcgtgcactacctgactcaagttacaccttcatcggtgcaccagtggctaatggttctagagttgctccacatctacctccacatcatgggctataatgataataaaaaattgaaacaaatgtatttctcttttttggatttttcttttcaaatttggttgtttattaaatgttagactttaatttatccatcaagtgtttaaaatttatctatagttcaatcaaatagaaagccccgagggcgccatattctaggagcccaaactatgtgattgaataaatcctcctctatctgttgcgggtcgaggactccttctccttccccttttggcgatattgaaagagacatgacaaagtaattgaaaacgacaaaaaagtgaaatgcaaattggagagggagtgtttggggttatgtaagaagattgtattttgtatgaatcaaggagcagcttttatctatttttattttgtttttttcttattatataccttttgtcttggagctgttttgtgagaccacatagtgtttataatcgttcaatatatgttttttgattattttttcctgcggtgaaaaaaaagatagaactggagtgactagagagaggagagatcaagttagacctggacgttcagaagttgagttctaactaactcgtccactttttgctgtggggattaatctttttttttcttttgaaacaatttttttctatcgcattatatttgaatttaattagttttgttagccaattcattgttagattatacgtaatggtcttgtggaaagaaattgaatttatttttatttggttactctagggactatatatagttcgtgtgaacaagaaagaaaaaacattcaaattacattgcaaacctaacaaaatccaaaacccaaactaaaaaatcactttgtatcatgtaaaccagtcaaaagtagtgatcaataagagatagagagagaagagatatgtatgatatcaagctcaagcatgtttgtgtgataaaaggagaaaaaaagagtcaaacatgaaaagaagaaacatatcatggttttgtgaaagaaggctaaaccctagagtgtatttacagtcttcccaagaggcatatatatgtatatataaaaataaataaataatcagaaagcgaagggagagagattgagtggatcaatatagatatgtgtatgagagaataagttacgattattaaaaagttaaattggtctgagtcatagacacaactgtggaaggactcattgatgcagttaagtttcttttgtttcagtctgtcgattacaaaccctattcccttaaatcagcttttaccatttcatagctttactcctcaatttcaactctaccctactcctatatatgtatataataatatgagtgtattcacacatgtacccattccttttacttgtgaatatagtgtgaacaaactatagaggtaaaataagtaataactctctttgttccttctgagaaaaattaacatgcatgtaaatgtaacaatgtgacaagatgaatctaataaacatatgtagtgatcatcaatcattcacatcaaccttgatatatatatacatcagtgtgttgcatataaacaacaaaaaaacaaaaataaatgcatactagctccctatgtaagcacatacataaaaattaaaatcatttaagcagtgacataacatcacatgatataggtgtgcatctatctatattctagagcataccaattcaagtaaatatccctgaatctcatgaaaatagcaaaaatggaaaacatgatacttgtttaaataagagggaaacgggtaagtactaagtaggggctaagaaaattagatgtgtttcaaaaggaaagcaaaacttttactatttatgccaataaaaagaaagttagggttcaattaccgattgctatattattagaataggctgcatctgctgttcctaaacaatgacaccgcccatctctattacacacctctataagcatacatttacttaactttttatagatatgtatagggctgtttattttaggtatgttttaagtaatgcaatttcagagttccctaggctggatagtttgggtttagtataagatacgcgtagtttcggtatacaaaagtattggctaatctctgaaaaaaacacaaaactaaaaattggatatgatttggacagatttaaaattttatggaaaattgagtaaacacacatatcaatcatcaatccattgaaatcaacaagtgataataaaaaaattaactctcttttttctcgttagttagaatcgaatggtaaaaaaatactactacacaatttctaattttcctacagaaggagcaaataattacctaaccttctaagtaattgagaaggtattgactttgtcttcaaagcctccactttgggaatctgattgtgaactaaaggcgccaaatcgaaacagtttcattgggagctttcatcaaattctctggggaaagactcaatctttttgtattttctcgtgacaaatctgttacgtttgttcctgaatatcgaaaattgcgagagtttctctagtttcagcttctaagtcaccaaagaggctattggaagaaaagttcatctctttcttggaatcatgtaaaacccagaaacagcttcttcaaattcaatctcaaaccgtatgtcacgagttactacagaatgattacgtcgctccgagactcgtcgctgcttgttgccgaatcacgagaattgattacgcacgccaagtgttcgacagaatctctcaaccaaatgtttctgtttggaatgctatgtttaatgggtatgcacaaaaagatttgtcttttgaagttttgttgttgttcaagagaatgagaagctttgatgtgatgcccaattgttttactcttcccgtagttttaaaagcttgcgtgatggttaaggatcttagacagggagaggagttacagtgtttttcaataaaaacagggtttaggtcaaatgcttatttaggaactaagttgattgagatttactcatgtgcaggagtgatagcatcggcgaataaggtgttttgtgagatggttgagaaaaatgtagttctttggacttcgatgatcaatgggtatcttttgaataaggacttagtctctgctcgacgctattttgatttgtcgcctgagagagatattgtgttgtggaacactatgatatctggttatattgaaatggggaatatgttagaggctaggagtctttttgatcaaatgccttgtagggatgtcatgtcgtggaatacggttttagagggttatgcaaatattggagatatggaagcatgtgaaagggtttttgatgatatgccagagagaaatgtgttctcttggaatggtttgatcaagggatatgctcaaaatgggcgggtttctgaagtgttgggttcttttaagagaatggtagatgaagggagtgttgttcctaacgatgcaacaatgactttagttttatccgcttgtgcaaagttaggagcttttgatttcgggaaatgggtacataagtatggagaaactcttggttacaataaggtagatgttaatgttaagaatgctttgattgatatgtatggaaaatgcggagctatagagatagctatggaagtcttcaaaggcataaagagaagagatttgataagttggaataccatgatcaacggtttagctgcacatggacatggaactgaggccttaaatttattccatgagatgaaaaattccggaattagtccggacaaggtaacattcgtcggtgttttatgtgcctgtaaacacatgggtttggttgaagatggcttggcttatttcaattccatgtttactgatttctcaataatgcctgagattgagcattgcggttgtgtagtggatttactatcacgggctggatttttaacacaagctgttgagtttataaacaaaatgccggtaaaagcggatgctgttatatgggctactcttcttggagcttcaaaggtttataagaaggtggacattggcgaagttgcgcttgaagagttgatcaagcttgaaccaagaaacccggctaatttcgttatgctctcaaacatatatggagatgcaggaagatttgatgatgctgcaaggctaaaagttgctatgagagacacagggtttaagaaagaagcaggtgttagctggattgagaccgatgatggtttagtgaagttttattcttcgggagagaagcatcctcgaacagaggaattacagaggatcttgagagaactgaagagcttcaacatccttcgtgacgaagaacattttatgtaatcttgtagagcttttgtcaagcttaaactttttccattaccggaatttgttgtgaagaacattctgcaatgtggaagcggaaccctcacactgttgacgtataggaatttgaatttcttaaagcagtttacaaagagccttgtgctcagctgaataagcttgctgagttcttgagttgtccatttaccgcaaaagaagaagaggttttatacttttgtaatctgagcttttaagaggtcaacaagatcatgaatggaatgggtcacaagaagtatatgactactgaaatggacaacaatatcggcgagttaacaaaagatcccatatagcacactagttaaattttcttgattgccaatgttttggattcgttattcgacaagggaaaactttttttttttttttttcaaacaatccatttcaatattgtatatattagtaaatttcttattgcgtaacaaaattccgcagtatcacaaaaaagctatactcatcataattgctgaatttatcgggtttaaatttcaaaatccggcagtagaaaaccactttttagtttcaaactttttaattatatgtctttcgatattgtatagattaataaatattcatgattttacaaaaaacatgttgtagcacaaaggctaaattcatcttcattgttgaacttattaggttcaaaggcagtgtaaaagtttttttatttaattttaaattttctaattatctgtctctagttattgtatatattagtaaatatgtatgatttaaccaaatatccgctgtagcacaaagggtaaatacatctttgttgatgacctttccgggtttaaagcccggcagcagaaaatcttttagttttaatttttaactgtttagttatctgtaaagctaatttcatcttcattgatggggtaattagtaaatatgtactgtattagtaaataagtttacactagtttaatttgtcgtgattgccgaacttgcaagttaataatccccacacttttgctctttgtgttttgtctattgctagctgaagcgcttcaaaatacttcttgttgaagaagaagaatttcaagaacattttatgtaatcttatagagaagttttttttgtcaagattagacttttccatcaccgaaattagctgtaaacaactttctgcgatgtagaaccggaaacttcaggtcaatgaatttgtattaaaagaaaaaaaaggaaagaatttgtagtagttaacattttcttacaacaatttacaaatcacgttgccagtttcgaattgctagaaatcgtttcatgccaccaacttcgatcactcaagatttcaagatcactttattggtatacaaaacaaaatgtcttatcaacttgatattatgcctcttatgccaccaaatacaagttttgtttttgaggctaaaatccaaatataagttagttggacttttgtatgtttgtaatttaacaatcttatattacgggttgaaaaaaataaatcaaccaccacgttatttcatgaacgttataaaggatctctcaagatatgaaagatcacatgttttgtacacatcagctttcaacgtgtgtaacgtgagtgtttgatcaactactacgttaacatccaacactataaatagtaattttgcgattgcaataagtcacaacactcgacacaaaagcaaaaacaaaaatgggtgagaaagatattccaaggaacttgaaggaagaagaagaagaagaagaagaaaaccaaagtgaagaaaccaaaagtttgatctcttcacttccttcagacatagattgctcagggaccaagttgtacaagtaccaaggatgttggtacgacaaagatattctccaagcaatcctcaatttcaacaaaaactttcagccacaagaaacggatataattgttgcttctttccccaaatcgggtacgacttggctcaaggcactcacattcgcactcgcgcaaagatcaaaacacacttcagacaatcatcctctgctaactcataatcctcatgagctagtgccgtacctcgagctcgatctttatctcaaaagctcgaaaccggatttgaccaagttgccatcatcatctccgagattgttctcaacccacatgtcctttgatgcgcttaaagtaccgttgaaagagtctccttgcaagatcgtgtacgtgtgcaggaacgtgaaagacgtattggtatcactttggtgtttcgaaaactccatgagtggagaaaacaatttaagtctcgaggctttgttcgagtctttatgtagcggagttaacttatgcggtcccttatgggaaaatgtgttaggctattggagaggaagcttggaagatcctaagcatgtgcttttcttgaggtacgaggagttgaagacggagcctcgtgtgcaaatcaagagacttgcagagttcttagattgtccattcacaaaggaagaagaagatagtggaggtgtagacaagatcttggaactttgttctctaagaaaccttagcggtttggagatcaacaaaacaggaagcttgtcggaaggagtaagtttcaagagttttttccgtaaaggggaagttggtgattggaagagttatatgactcctgaaatggaaaacaaaatcgacatgattgttgaggagaaacttcaaggctctggtttgaaattgtagagttcatatctctatgtatatgtgtgggaacaggtttaatctcaaacctaataatgctggtttgttcttttcttgtatgcaatgtaataaaagttactttgatgtaaggttaagagtttaagattcttagtgatgtgttgttgtttttgtttcgtttgataatgaataaagctagcggcttttcttcttcgccaaggcatacaacaatcatttttctttttttttaataattgaaaagttggagtccaattgaccttaatttcataaaacatgccatgtgcgccggtttaatagcagttgacataatgagacttttagttgaacggaaaagccacaaaactaactcaattatcataaaaaccaaaacaatggtttcggtataaagaaccttataaaaagaccccatgcatgttcgttggtgaagtgtccatgtttacgatatatacaatggactagattcctatatactagtattttttaatttcttagtgacatgattggttaatatttgttagaaaaaagtcgaagattataacattattttgttctatgtatataaggtcaataatggagcgtaattttatattagtaaaatgctgcatttaagtttagcactttaaaatcaactaaaatgttcacttaacaaaacaagaaccaaaaaaaatggatgagaaagatattctaaggaacttgagggaagaagaagaagaagaagaagaaaatcaaagcgaagaaaccaaaattttgatctcttcacttccttgggagatagattaccttgggaacaagcttttcaagtaccaaggatattggtactacgaagacgttctccaatcaatccccaatatacactcgagttttcagccacaagaaaccgatatagttgttgcttctttctacaaatcgggcacgacttggctcaaagcactcacatttgcactcgttcaacgatcaaaacactcgttagaagatcatcatcatcctctgctatctcataaccctcatgagatagtaccgtacctcgagctagatctgtatctcaacagctcaaaaccggacttgaccaagttcttatcatcatcatcatcatcatcatctccgagattgttctcaactcatatgtccttggacgcgcttaaactacccttgaagaagtctccttgcaaggtagtgtacgtgtgcaggaacgtgaaagacgtgttggtgtcactttggtgtttcctcaatgccaacaagggagtagaatggggagattttagccaaaatgaaaagatcattcgagcggagaattattctttcaaggctatatttgagtcattctgcaacggagttaccctacacggtcccttttgggaccatgcacagagctattggcgaggcagcttggaagatcctaagcattttcttttcatgaggtacgaggagttgaaagcggagcctcgtactcaggtcaagagacttgcagagttcttggattgtccattcactaaggaagaggaagatagcggaactgtagacaagatcttggaactttgctctctaagtaatttaagcagtttggagatcaacaaaactggatccttgggtggagtagattacaagacttatttccgtaaaggacaagttggtgactggaagagttatatgacctctgaaatggtaaataaaatcgatatgatcgtcgaggagaaactcaaaggttccggtttgaaattctagaattatgcgtgtgctttgtgaagaactgcagaaaaagtgttcttgaatgcgttatttaataataaaagttacattgtcatatatataactttgatgtatcattacaactgatgtgtggtttttgttctctttgatgttgcaataaaaaccttctttacttctatgttcctttaataactagcgtgtgatctcatgagtaccatttcaatagtggcatgttactcttcatttacgactaataaagtaataaaataatcgtattatcacatgcaataacatgtcactattgaaaatacgagtttcctattaactttaaaagttagcatgcaaataaaattataatatcaatcattttacaatgatgtcaaccaaaaaattggatcttcgcaattgcaaggaaatactaaattccaatttttgatcctccgtttcaacaaacttggctgattcgttaaaaaacaatgtggcgatgcttatcaaccaataaatccgtctcagtaacttttgctttcaatcgaagatgattgacctaatgtgagctatatgactaggaagaaccattttggtggagaagctcaagtacaaatagactattaaaaatacgagaagaggacgttcaatgttccagttgccagttgggtttgagttagcacgagaaagtaatgaactaaaaacttaattaacataaaaaaccaaaccaatggtttcagtaaataaagcagggaaacattaagagaaagcaaaaagacaaaagctacaaactctcatgactgcgcatggaatcagtgaaaaaacataacaactcgagttttcttttctccttttttttattcagaacagtacgaactcaaccacacacaaactctcgccggtgtaagcttaggcctttgacatgtgaacgataaggtcaacgacacgagaactgtaaccccattcgttgtcgtaccatgacaccaacttcacaaacttgtcgctcaatgcaatcccagccttggcatcgaaaatgcttgacctataaacacaaacccaatatttcaattatttgctctcgccatttataagatcagaaaactgtatatcactctacagacaatattttttatacctgttgtcaccaacaaagtcggtagacacaacatcatcctcagtgtatcccaaaattcccttcattttgccttcagattcctccctgaaaagttttaaccaaaatcttttgtaagtacccaataaattctaatatgatatggttaggactgagggtccttgatggttctcacttgatggccttcttgatttcgtcgtatgttgcagctttctcaagtctaacggtgagatcaacaactgagacatcaacggttggaacacggaaagacattccggtcaattttccattgagggatggcaacactttcccaacagcctatcaacaaccatgatacaaaaatcagattcaacataatttctcaatcaaaatcaattaaaacaaataagaggctgaaatgataccttggcggcaccagtgctgctaggaataatgttgaaggaagcagctcttccacctctccagtccttcattgatggaccatcaactgtcttctgagtagctgatcaccaaaacaacagttactattgagtcaaatatacatattttcaagaatcaacccaatgaaaccaaatataaatacgtaccagtgatagagtggacagtggtcatgagtccctcaacaatgccaaacctgtcattaataacctgcacaaatagattgcaactgtaagagaaatgattcaacttaaaattcagaattcagaacaatttacacaagtttatgggttgaaacagaaaaagataccttggcaagaggagcaaggcagttagtggtgcaactagcgttggaaacaatgtcaaggtcagacttgtactcgtgctcgttgacaccaacaacgaacatgggcgcatctttgcttggggcagagatgacaacctttttagcaccaccctgaataacaatgaaacaatatgatgatgatatagatcttaaataaacaagttctcgactattatataaaagatccaagttcaaaccttcaagtgagcagcagccttgtctttgtcagtgaagacaccagtagactcaacaacaaagtcagctccagcctcaccccatgggatgtcctcagggttccttcaaaaataaaacaccacaaatcagaatttcacaactctcaataacataacagagaaccactataataaaatcatccatgattatgtacctgatgccgaaaacagtgactggcttctcaccgaagagaagagttttgtcatccttcaccttaagctcatggtgcttccactgaccgtgaacactgtcatacttaaacatgtatgtctgcaacaaatcgataccatatacacaatcagtcaaaacgaatttacagagaatcaacatagaagaagaatacaacaaagcaagttctcagatctatatgataaacagcacacaccatcatgtatattaacaaaaattcagataaaactattaactcaaatccagatacgaactagtatcgaagagaagaagaaacgaaccatgtactcggtggtgatgaaaggatcgttaacagcgacgagctcaacatcatccctctgaagaacaactctagcaaccaaacgaccgattcttccgaaaccttcacgaagattcaaaactcagcttctacagatccaaatcacttaaacctaaccaaaaaacttatggaattcgataagaaaaacactcaccgttgattccgattctgatcttcttgtcagctacacaaaccaaaattacgatcagattcaaaaagtatcaacgaaagaacaataaatcgaagaatcgcagatcaacaagagcgagaagcttacccattttgcgaaattgagatcgagagagatttagatgatatcgagagagaagagaatgtgaaaatagtgagtgagggtttgggtttggtgaggatttagggttatttaaaagagaagaagaacgtgatgatgaaaattgaaaatatgatcgagtggctgagattttttcttgggaaaaaggctaatagattagattcactaattaatattactatattgtactttactttctttcttatttaccatttttacccatcgtttatgggtaggattaagaactgatttggggaaactaatggcgcttggattcacgcgcaggctgatggaatattcgaggtttaatactctaatcctatgggctgggccggtgcacgcaagactgcaacgtagcagattttgtatatattccttttgacagccaatgagctttgccaatagccaaatttgtttttctttttatttaattttcataagattttgtattattgttgttgtcaaaccataattttccttaataaatccaaagtaactgcaatagtatgctcattttttaattttgcgtaacaagtaacaccactgtcttctatacatgtatcttgtgataccattcatggtaaattcaattattatcggatcaactttatcatccagttcattatagtgaaagttactctcaaatgtcaattctcactcaacattcagcaacattactccaaccattgttttagaataatcaaggtgaagatttgacttcataaacactatatttaaaggtgttttgttttaatcaatttagatgtgtagatgcttgtagacgtctttatcgaattactggttgcttactgtttcaaatatttataatttgacacaagtacatatggtgttgtatatttatctaatcgtgactctataccaagacacaatagatgctccactttgagagctttggtaggtcagatggaatgtgacagcaaaaaaaaacatcacaccttatgtaatagactaataggtatgactcttggcttttgccaaaagtcttcttcttctcctcctcttatttgctctcttttctttttccatttcatttttgttaggtgaatggttataaaactccttcttttggtattcatatggatctttatacatccaataaatagctaaaatattatctgaggtcaacaatatatcataaattgaagtttgtgatctttctataactcatgatcatttccaagagtccacttataagttataactgacccgtcaagtgtcagccattctcttcgactgaataagttctatgatttaaaaacgattttctaattcgtttttctttgtaaaatcaatttactttggtttgtactttgtagtaaaaaaccaaatttatttttgctgaaaaccatatttgagaattttataacataacgtacatgtatttttttcattatctgaattatttgtagtgattttgtggaattttcatatgttatttctgatcttatcccttttattttgaagtgtcattattcacaatgttctaaagtaatcgtgaagtgaaaagaaccacaatatatcattatcaaagtatatgttaaaattcgattctaagagaaagaaaaaaaaagatagaaagaaagatgcaataattgatgcaaaccttctcgacaaaaacaattattgacgcaaaactttaactattggaatcttatcctgatgatctgcttataaccaatgttattccacttacgtgatatttaagatctagaagttggtttatttatgcataaacatttcaattaactcagtttcatttgtatgtttgtgatgtttatgctgtcttgattctgtcttcctccttttcacgctgtctcaaaggagaaaagtaataaggagatcacgagggagattcaagctataatgagacaagttgcttccagcataacttgcttgccttgtctccatgaaacatgtaagagagagagacattaatcggcttggcggttggataaggtgtgtttgttgtgttgggagcatttactgataccgatgtggctgtaccgttcacctggatcaagagagtggttgaattacattctttgatactagtgtttgttaatcaaatcattatagtgttttctcagtagtataagttcagaaagtttctctggctttgcagattgacaaggtcgaacacactcatttcatacaagaacaataaaagggatgaagaatgactctgataccacacacaaacactcgctcgtctgattgtgaacaatttattcacttctcttatgttctgttcttacaaatgtaacagaccaaaaatctattttgaggtcttcttggtctgtacggtaaatgccagttatgatatttcatatttgagcaagtacatgaaaaaaagaagaaatgtataaagagaatgagatcatatctacaggggactgttttctgatcagataactgttgatagaattggagaagaagttttgtgatctcatttcctcatctcacacctcgatacacagcaccaggttgaagatcatccatgttttctatgttcctaaaaccatcaacttgcaggcttgaccatccctgtcgagccagaaactcgcggtagtcttcttcagtgtagaagattttctcttctgaatggactggtaattggttggattcatcataatggcaaaccctaatggccagtcctgcaagatgggttttgcatactgacaattcagtaaaaaacacacacacagttcaaaagatacgaatagtggcaaatttaatcttaccatcatccagacggagtagatagttccctaagggcatgtctcggtcaagacagcgaataatctgatcttcatcttctaaccaaaaagcccttcgagttcttaacccaaaagcagatctgattacctctttgattgcttctgcactaccatcaacaccgattcttcttgtatagtcaccaaatttcactgttatgaccctaccaccaaaaggctgaccatgactatcatcacctgcttgtataaacatgaaacaaatgaaaagctctactcagttataaagagaccgaacgaataaatcaagcagaggagcagaggctgtgaagcaacctcaaaatgagaaaacgtggattcttacacatattacaccatgcttggaacataaacatacagttcaaaaaacatatctttagccttatagaaaattaaactttgaggcttaagtttatataagctttttctgaggacttgccgtttccaggagtctctctccaattccaaggagtaactccatttgctgcaacagcatcaactgctgtagtgattgcaagaggatgaccatcatgatcaagacgcctttcaaggtttaaggctggcctgccattagctgaaacatagatatatatacacttttcaaacatacacacacacacacacatcctctagaaacaaaactaaaccatctaacacagaaactgcctgtgaattctacggcacagtcatgtttactatttgtttcagtcccaaatgttcacttcactaagcaagttcatacctctactattgctcactcagggagatgttttcgaccaacttaaaagacaacttcaagaggcagtagacaaacaaaagctcgtctctttgtatacatagcaagatactataataaacaaactaatagtgatagataagtaccttcaacggatccaaaagaaatgctcgtatcatcaaaacctacaatgaaagataaaattaccacttagccaaaagaaaattaaaggcacaaaatccacatacgcagattcatttaccaaaactatcatcttctttaaagataactgaaaaaccacaataagaaacctactctaaaatgtagtatcttctcagcctaagatacagataagaattttcccaaatagtagcaacaaaaaccataatcacagttacgttctctgaatccaaatcaagaaatctacaattgatgccaaagtttatacctttatcagtaaattgcataaaggaatcaactttggctgatgtaggtggtgtattagggctcttattatactgtggtggtgtcacttttttgctcctctctctaagaatatcttcaatctctttgtaatacgacatcttcgccgatccatttcctctatcatgatgcttagctttcttaaactctttcaacagattcctccatttatcagtacacatagtcggagatcgatcaaaccctttttctctcatcttagacgaaatctgttcccagagatgtttattagatttggatgtattgaataaaccatccatacctctacggaacatgattaagctacgagtttcgtcttgaacccatgtctccgctcgtttctttggtgctttaacttcgtgatcttctccactgctttctccgaggagaatctgttgttgtggctgagattggtggagatgatgattgtggtgattgtggtggtggtgagattgtagatctactgattcgttggtagtggtgagtacatcgatcatcatatcgcgtgtggtgctggtggtggaggaattgtgatgatcgtctttgtagaaatcagtaggacgagatttgtcggaaatgaacattgctgtgtttcccggacagaatggatacgatgttcctttgttcccaccaccgtcaacacaaaagccccctcagaacaaaatgaaaaaaaaggttttaactttaagttaggttttctctatcttagtctagagatttggttttggataaggataattacaaatttaaagttttggttatataaattggtttgaatgtttttgccatataaactttgtaatgtcaatctgttattgcaaatattagcatgtgatgtttgtatcttgatgcatcaaacttcatcaccttggcatctgatatataacttacatcttgtgtgcatccataagaccaaatgcatcaaagattcgaagggagaaaatgtcaaaaaagaaatgagacactcttctttggaacaaaacaataactaaaaccataaaccgaaattaagtttgtattaaacacaagaaagattgaaccgaaaaaccaaaccaatataaccgattttattacatacattcaaaactatgtcgtataatagtgttacggtcggcaattaaaatctggaattttaaaacattttgaagtgttgtcagcttgaaaattctgtaaaaattactaattcaagtgagggaggagtggacctggcaggccagaccgaacacacacacaaaaaaaaacaatattaaaataaaggggaataaaaaaacaattaaaattaaattaaaatagaattgagaaaaaaaagtttgatcagccatcggaggagaagagagaatgatagataactggatcacgagaagtcacaaatctcaaagaagaagaaagaaaaccaaaatcaagaacaataacaacaattcgcaatgatttgagccaaatctaaagggtacaaattcttaatttcaaagtcaatcaacaacatcgaaggaggtttttttttggaagaagaacttgaatgtgaatttttgtaagctttttttatttcattattcatcgttttttttttcctacttttgacctttgttttgtgcaatcggaggtgttgtaatgtgcgatttctcttgatttttgattttgtgattgcgtttgtttcagaatcagaatcgaaagtttcgatttttatggtttgtagtggtgatttttttctgtttctgagtttcgtgagtgaataaagaagaagaaaaaatggttttgttgtaataaatttggtaaattttgggatttatctccatttcaggttcttgatataactaactttgtgtgtgttttagtatcatatcttcaatatttcaggttcttaatctgtttttcttgtttttttgttctgttattcagatggagttgatgaaattgttcttctagatgtttgttttggggatatgaacaaagaagaatctgagtttaatacactatgtggaaacagattctgagtaagcttcctaagaagtcttcttctaagaaccattcttcttcatctagttccacttcaaaaagtagtgataatggcgccagtaaatcgggtaattctcaaacccagaacgctcctcctgtaaaaccttctgctgattcagggtttaaagaagggaatttgaaaggaaatggtaacggtttcactccatatgaagcattgccaggtttcaaagatgttcctaatgcagagaaacagaacttgtttgtgagaaaactcagcttgtgctgtgttgttttcgatttctcggatccaacgaagaacgttaaggaaaaggatattaagcggcagacattgcttgagcttgtggattatgtagcttctcctaatggaaagtttagtgaaactgtgattcaagaagtggttagaatggtttctgttaacatattcagaaccttgaatcctcaaccgcgcgagaataaagttattgatgcgttagacttggaggaagaagagccttctatggatcctacttggcctcacttgcagcttgtctatgaaattctcctgcggcttattgcttcaccagagacagacaccaagctggctaagaaatacattgaccaatcttttgtctcaaggttacttgatttatttgattcagaggatcctagagaaagagattgtcttaagaccgttctacatcgcatctacggtaaatttatggttcatcgtcctttcataaggaaatccattaataacattttctatcggtttgttttcgagactgagaaacacaatgggattgctgagtttctagagattttgggaagtatcatcaatggatttgctctgccgcttaaagacgagcataaagtgtttttggttagagctttggtacctcttcacaaaccgaaaagcttgcaaatgtatcatcagcaattgtcttattgtatcacacagtttgtggaaaaagattgcaaactcgctgatacggttataaggggactactcaagtcttggcctgtcacaaatagttccaaagaagtcatgtttctaaacgagctagaggaagtattagaagcaactcaaccacctgaattccaacggtgtatggtcccattgtttcgccaagttgctcggtgtttgaacagtctccattttcaggtaattgtattttcctttggtttgctaattctgtgaatcatgaatgatgggaacaattcttacaagattgaaatgcgtgatattttgattgaatccataagaacaaagctttgtgattatttcgaaagcttgaatctttgtataagcaagctcaagaaagaacaaaaaggttgagactttttttattttgttttgcaggttgcagaaagagctttgttcttatggaacaacgatcatatcgagaatctaataatgcagaaccggaaagttattcttccaatcatattccctgcattggagagaaacactcagaagcattggaaccaagctgttcatagcttgacgttgaatgtgcagaagatctttaatgacattgatgcagagttgtttaaggattgtcttgctaagtttagagaagatgaatcaaaagaagctgaaattggcgcaaaacgtgaggcaacgtggaaacggttggaagaaattggtaatcaaaagcaaaagagttcattgtaagatgttttagttgtagagacagaggttttgttctgtattttctcgttttttactacattggaaaattgggtttgtttttcttactctccagaaaaacttagtgagaaaaaagtttcagattcgttttctttgaagagattgcaaatattaaagatcgttgttttctaaagcttgctaatgggttccaaattatacagcagagtaagcaaggttttagttttagatatgagatatggaaataaggaacacctcttccataagaaagatagttttaaattgaagagtatgatcttgtttgttgaaggttcgctagattttgtaatggtttttgtttttgagaaactcattcttaccgattcaagtttttttttttaaagtgattttcctctaaagttgagaggctatagtttttggaagattttaaccattctcaatcatgatcactttggtatttgacagaacaaaaaacaaaacaaaaaactcagtaacaatctaaaacaattcatcatcttatttaatttcttttcttattgcaaaatccaaaaatattcaaaaccccacaacttatagtatagtccaaagtccaaacccaaaacttagagtttaagttgtttttcattctgtttttgtctatatgacaaatcttttgattcatattaatttatcaaataacaattaattcatcaaaagcaaatatgaaaatatatgaaaagaattttatttttattagcgttagaaaaaaaagtttaggccaacatgaaaaattaattgcgttagctacgagattacaactaacatcaccaacatagagttaagtgattattgcattgtcatcacacggtattccttgatagaatggttaacttgaggttaaaagaaactatctttgaggacaaagtaaaatgttaggaaattgcgtggaaatagaacttgcttttaaaatccaaaaactaattaaaactaccacaacttatagtataatcatagcttcaatttagtaaaagtgaaggttggagcttaaacttgaagttaattttgtttgtgtcggtacgtgttctatataaaccacccatatcttttcatttcctcatcgatttcatttgtgaaatcagaaacatggtgaaatcgaagggttgaaaagagttcgagagagacgcaaaactacttgtggctgcagccaaatacaagagagaaaatatttatctcattgcagaggaaatgaatatgactaggggtttgatcgtcaaatattatgtgccttggagcaagtatctccaagcatttgccctaaaaccgaacacctcacatttacaatcaatatgaaaatatatgacgaggattttttcatatacaaaaattatttcttagaatttaagttggaaaaaatctcttctcattctcttatagtcatcttattaattcttcacaaacaatatgaaaatatatgatgagattttttttatgagcgttagcaaaaaaaactttaggccaatatgaaaaattaattgcattagctacgagattacagctaacatcagtaacagagaagtttgatgtcttcaatttgagcctataatttttgctattttcaattatatttttctctggttttacttatgttttgcttactatttgtttatcttttaaatatataaaattattaataaaattaaataaaatcagtaaaaattggtacgtttattttatatacaatttaaggaaaatttaattattttgaataacaattaggttttattatgttatccatattaggaaaaggggatgagaaaggaatagtacatttaaccaattaacttttggcatacagtagattcatatttcatttcaattctaattgaaaacactgaacaattttggcgtaattttagatttcacaatttatggaaagatgtaagataacttccttcttattatcttgttagttttaaagcttgtcaataaggttttcgccatactgtctgattacacaacgattttcaactaattgttttgcaaacatttcagtggtttttgcaaacgaaaaaaactccaaatctttatcagcttattttacacaaatgaaactgaataacaacgatttcaacaacacacaagaaagcttaaaacatacaagaaatctctcatgattcccacttggttctcaacttatcaacatgcttaaactcaaatgtcaacactaaactcttatcctttctcctcaattcaaagctctccaccaacacataacatctataactcttccaattcgaaccgcctccattaaatctctcagatttcttaaccactgctctttgcggttcaatcttccacccgaatctctcctcttcccatttcatcctctccatgaccacagatctcaaacctatcctcttctctgcaaccgcaaaccaaaaaaccccattttcatccaccctttttgtatttttcccaatttcttgtccctcaagcttcacaacttctggttccacttcaacatcaactacaacctcgcggttttcgttgtaagcgttttcacaagagtaaacctcctcccatctttgtagaagaatcatgctgtaataagctgagctcttaagctgatcctttgcatttccttccttcacaaatatgaaagggacataccattttcctaccacaacgcttgtattaaaatcactaggaagctcagaacgaatctcagtgtaaataccttttgcatcatcttttagaccaaagtcctcagatgtcgagtactcagcgttccaatactttctcttaagaaactctggtggtttcccgttaggagcaacagaagtggcagtgtaatagcgagatgatgatcgtttttgatggatctggaattgctgatatatgtcattaggatctgcttcttgtggcttagcttcaggaacatagctgaaacaaaaacagcaggggactctgtcttcctctttcgcattagccgaagcttttctacaacacaacaaatccttgtaaatcacgtcacaaaacaaagaaagttgaaattttgcataattttaagtcataacataccctgagtgtttcccgcctcgtttaatgacatagtaacggtttgaagataagggttgatcaagaacaggaatgaaaacgacaggatctatataagtaatcgtctggttaagaaatatgcggctttcagatacaatcaggttcgcgttctgtgggaaaggtaagcctttgagtgtagcccggtagcaagatccgaagcaacaagttggccttgactcttcatcttgaattataagtacgccggagtttggactttccggcaactccgatctgtttctttggtattccgacaaacgcctcgtaacatacatttttggttataaccggcgaagatatttcagtggtttttgtgattcatatgagttctgattgggtctatatatatgtagactactaggataagacaatttgtaacccaaaaaaaaaaaagagacttttctaagatcttgacttggcttttacggaagtctttttgttatggcagtttctatgtacctcacattgttttgaaattctgtcactcaatttaagtggtccctagaattaaaaagcaagttatcagcaattgattccaagttattaagaagtaatacttacgttgacttgcctacgtcatcaggggtggctctataattttatgggcctttgttgtacagatcttaacaatgggcctctttagaaattctaaacgctatgttatgtacgtatagcctaaaaatcagaagcgttagttggtgctggactagggctttttcttctttgtttcattatcatctccaccttcaaacaaaaaaaatatgaatgcatttgggctcacatattaaatgtaaaatctcacctataaagcccagtctagatagttttcttacaccggcctcttttgctttagacgattcatgttaaacataaaatatgatcattaaagttaaaacaaaaaatgatcattgattaaaaaaaaaacacaagaaaaagtcaaaaactgatcatcaatctacggaaaccatttctgcaattttaacagttatttttctgcttaacaaaaaatttaagaccttgaaggtttaccatatttttgttatggtttatggtttttgttttttaaaaactcatttttacagattaaagattttttaaaagtggtttccctaaacaattgaaagttggataagatctcaatctcactttctcttcaacttagaaacatgtctaaactcgtatgtgaaaacttttaaattcgtatagaatcacaacacgttatcagcaattttcaaggaagattttgtttgttttttgtacaagttaaaattatatataaatggagggtttacaaaagttgttggaattatgattacaacatgtgctaatattgaaaatgataacctaggaaatagttaaaacatttaagaagatcgatcaactaaattgacatttacatgaaattaaatgtgaacttaaagtttagtattacatgaacttgcataaaaacttattcaccaaattgattattgaacaaaaagatggcacacaacgaaactgaaaacagaatgaaaatcaatcccacttgctctttagcttatcaacatgcctaaactcatatgtcaacaccaaactcccatccattctcgtcaattcaaagctctctatcaatacataacatcgataactcttccaatgcgatgaaccgccttcaaatctctctgatctcttaatgttagatctttcgcctgcttcgtttaaccatccaaacctttcctcttcccatttcatcctctctacgaccacagatccaagacctatcttcttgtcgtctttctcatcccttaagacactaaaccaaacaactccatcacctgaatcctctctcaaattagtttcttgtccctcaagcttcaccgattctgtttctacatcaacatcaactacaacctcaaaatgttcattgccaatgttttcgcagaagaaaacttcttcccatctttgttgaagtgtcacgctgtaaaacgtcgatttgttcatctgatcttttacatctccttccatcacaaatatgaaaggaacataccatttccctatctcaatactcttacctaaactagtaagttctgagtctaagcgaagctttgtgttaatcccttttgcatcatctcttagaccaaagtcgtgcgaagtcgagtagctgacccaccaatctttcctcttaaggtaatttggtggtacaccatcagaagcaacagaagtggcagagtaatagcgagatgatgatcggcgttgatggatctcgaattgttggtatatgtcataaggatctgcttcttgtggcttagcgtcaggaatatagctaaagcaaaagcagcttgaaaccctctcctcctctgttgcacttgcagatgctttgctatattcacaaattcacatacctagatagttagtaacaattcctaaatcctaaagaaaacagtgaaaattattgagatgacaagtaaataaattacccagtatgcttcccacgcctttgtaaaacatagtaaaggtttgaagacaatggctgatcaagaacaggaatgaacacaactggagtaagatgtgttgtctggtgttctcctcctccactagtatacgctgcattcagcttcacgttttgtggaaacggcaagcccttaagtctaccctcatagcaagaaccaaagcagcaagtggcctgtgattcttcgtcttgaatcaccattatgccggagtttggaccttccggtggaagcagtttcagctccgatggctttttctggtattccgataaacgccttgtaacatacatctttagtttggttcttgtggtggtgatacttggagaaggagctttggtttcatatttataggcttatatgattaagcaaattctttgaagaatagatttgactttttgatgatagtatctaatcacgttataggaaaatttcttggaaggttgtatcttcatcaagtgtctttatacaatagcataaaaatgcatagaagtctttgtcttttggtttgactttatgcctgaatctataatgcagagtatgtgacaatttattaacttcattaacaagttttttgaccggttttagtcgcattgagtagtcaacggtccaatacttactcttaagaaactatggttgtttcccattatgagcaaaggaggttgcaaagtatctacgaaaactgaagcaaaagaaacaggggactctgttttcctctttggctttagctaatgcttttctgccacgttattacaatttttaatatggctttatccacttttgaagtccaaagttcacctttaagaagaggttcacaaacattatcatatagatttattacataaactttacaaatatgtatgagagcttcaagttctataacactcgaacttgcattaaagctctcattaaaatgaacacaccataaattgcacacataacacacaaagaagctgaaataaactcaatcccacttgctcttcaacttatcaacatgtttaaactcatatgtcaataccaaactcccatcagttctcttcagttcaaaggtctctaccagtacatagcatctataactcttccaatgtggtccaccaccttcaaatttctcagttctcttaatgctagaccttagttcatctttctttgaccatccaaacctctcctcttcccatttcatcctctccaagaccacagacccaagaccaatcttctgagtccctgagacactaaaccacacaactccatctgagttcacaccttttgtctctcttgcaatcttgtctccttcaagctt

SEQ ID NO: 1119 - DNA, 102183 bp, Arabidopsis thaliana
gaattctcccaaagatgtgaaggaactaaaggtgcaaactcatatttcttcaggagttttttcttacagactacatcagcttcgccataatttttgactactgttactttgcaggaggagcttggaattgaatacgatgaagatgtcggtctaagtttccaggcatatgctgacctaattcaacatggtaaaaagaggcctcgaggacagtaattttcaggtaagttcttcgaatttgattcaaagttttctagaaacgtttcttgtataaacacacacatatgcaactgtacaacatcattgaaagcttatatccataaagaacacaataatcttacatctttgaccacaaaaagaacatagaaaagtacaaaactgagtgattacaccgtagatgcacctgaaaaacttataacatttgtacttagtatccacgaacctgtcttgtcctgactgaaactggacccttcaaacctgctttacgcataataggatcttcaattgaacgaaccatgtggtccacatgtcttgtatccgctctattcgaaccaaccatacgattttgctcatctttagacttactaatagtaatagtctcaacactaggttgggtttcttcttcactatcgtagataatagtatccttctccaatagcttcacagggtcttctctgaatgacatcactgggacatcaataatatcttctgaatctgacatcgaccttttagattctgacatcacatccccttccccttctgaagaatcatcattaccttcttgttcttgttctgactctttgttttcagaaccatgaaatgaattttccccaccaatgttacccggactgtcatgtccacgaggagaaaactgagaaagctccacagccgcttgtgcagcctctgctgcatgagctgctgactcaaacgctgcttgtgcagcatcagccacatctttgtacttcttctttcctctcttgaccgaatcagataaaccataaccttctcctctgccatctttacttgttagcttagtcttactaacatctgatgttccctgcatatttgttgttccctgcaaatgttacaaatttgattagaacatgattttttcaactttttgttatcttggtggttaattgcagatttctatacctcagtggacgtagaagcttggtctagtttcagaacaatgttattctctgcagcaatctccttcaaagccttcattctaacttctttcggtggaggtcttgtcgacaacttctgaattatctatagtaacaccaaaagaaacatggaactcagtaagtattttgttctatcaagagagatatataacataacgtattgaatatagtatttgttgaatcgagaacttgcttactttgggatcaaccccacaattactgcgcaactcaatagaccgagccgcgagatctttgccaaaacgcgaaatcaaaacattacgaatctcttgaagctcagggaattcaccgattctagaagctgcaaatagcaaacccgaaacagcttctagaagctcttcaggacaatctctgttgtgttcaaagaggtgaatacgatcgagacagagagtgaagtagccatggatgaagaagagaacgtcgagagtgttttggtctttgacgacttgatcgactctatggtaagcgtgctcatgttggccgagcttaagaagctcggtgacatcagagatggcttgagagagtctggcttgacgctggttcttgagaatagagagccttgtgagagctaaggtgataagagacttgaacttgttggtcttgaaactgcgaccaagcaaagcgtcaagcttcttccccatggccgagttgcagagaagagaggacaggtagagaataagagtttatgttgtcttcctttgaattggaagtgttataagagaggaaagaggagaagacgcgttacgacatacgaagacttcttagcaacgaagttttcagaagttagaaaaaacgaccttaaagaagaaaatgtggtacgaattacgaaataataagccaaataataataaaaacaaaatggaccgctatttaatattgcgccatcggattaattatttttagaccaaatttaaatccattgttgaaaaaaatgagtatcgtatctgattaatccaaaatgggtagcatatccgaatacgctatatccttaagaaacgttttgggcagtttcttcaaacatctagatcttattactctttcttattttgaattttctttatgtccacctaaagttattagaatatcttgtgaaaattatttgaagaaaagctacatgaaccagtctcaaaacatgaaactagtaacactttgattaaataaagagaaatagtcatcggtaccagtatccacatctgaaccggccataacttgtaccagtctagtcttaaaacatgaaaatgcatgtaagattcaggtttcccctataaattgcagtctttaaagtttgtaatttgtataatgtgaaccatggacccataattattgtctcatgacgaggaacgttcgttctgttctaatttctttaagttattagaaaacaacagaaaataaacgtgtaagagaatccctcaggtcccaatatttgttcgaactttccttacaaaactataaacggaacactcataacaaagtcgtgaaaaagacttgcgagaaatgtcattgttacggctcttactattgcaattaatttaagaatgacaggtttagatgaattattaaagcagccattagaaaacacaccatttcatctttattaggtgtgactacaatatcatgatcaaaagactactacaactcacctgcacgcaactttccacgtcaaaaacattagtaacaaaaatcttgttattatgttgaagagagactttttcttctgttaggtacgaaaaaaatggaaagaccttgtttatttaccaatgcaatcgtttctctagacataattctcccactcatcagaggtgaaccaaacagattataaatattttgtaatcacagatttgcaaaactaacttcaaatgctacctactctttcgtaattatacacaagtcctctcaaactctgatatacttgtatagttgcatgcacgtgataataatgtgaaaccgccaactaaacaatggccaagaacttagattatggaagactgaatcacatgaatctaggaacaacatcattaacaatttctttagaatcttaatcaaaaactaatcgtttaatattcaatgtacatgtatctagggtaacaacattatgagattcacttgcccgtgatgaatgggtgagctaatgcctgtgacactgtaattctcttctgaggatcaagtatgaaaattctgtctagaagatccctgaaatgaaccaacaacttgctatcttcatccttataacgttgtttaattactgaaccaaattcttttggctttatgtttaccatcattctctttgttgtctttctagtaacactatcctcctctgtagcatagaagcataagtccttatcaaagtgctgatcgataaatgctcccttgcgaagcatctttttagggaaggcacctttcagttccatatgcaggcgtaacatttcattgtttgtggagccagggaacataattttcccgctaaaaagctcatacagacagcaaccaactgaccatatatctaacggatggtcgtagggaagtccaagaactacaatgaaaaaagagagtacagctttagttataatagaacatacagccatgaaatatccaagtagatgattaagacaacagcaacagtggaacttacttatttctggagctctgtagaagcgactaacaagatatggtgtaacttcgtttgtaccagcaaacattgcactaccaaagtcacaaagctttaacgtgtttcttccctcattcacctggataatcaaggaacgaccagaagttaaaatttatgtgcatcaagcaggagaaaaacacagacaagtatagcttaccagcatgttgtcaggctttatatcgcagtgaagaaccccacagttcttgagatgtttaagggatatgaataactgcgttgcatacactctaacaccagatagttgaataccaatgttgcgaccatacttcttcacaatctcacggagattcagatgaagagactcaaacaccaagcaaaggtggttcctatacttaaaagttgaaagaaaacgaacgcagtggcgcttattctctgggtcagagccagctagcttcttcaatatctgaatctcagtctggccggccttatgcctacacaaaacgtgatatgatagtgagacattcacaactcttaggaagataaatcaaacatcacttgataagaattttgataaaatttgtccggtcctagagaagaccacttacattgtctcattgttccgaataatttttatagccacttcctcaggttcacctagttcagcttttgtgtcttttgcccgcaccacggtagagaagacaccttttccatgagtagccatgatttcatatctatcatcaagtagttcccctaattgataacctaaaattaagagaagatctttcattgttaagacttaagatgacaaatattagaaggccttttccagttgaatgataaaacacgagcaatgaaatgttcatggaattatacacaaataggtcttcaaagaatttgaacttaaataatacatagacaaaataaaaacacttactgtaataaccttctgcatcatcccaattatcgtcgagtccactccttacaataggaatgccattccctttccctcgcagatagccctaaaataaaataatttacgaaaaactccttagccaacagacaattattctccacaaacacatgtcagaatgaaaaggcaatgaaagaagtttcaggagtatgaaggcaacagttgactagtgtacagcaattgatgaactactaccaaagcaggatagaaatgtttctaggaaacgaaagaagagaaaaagctcactacaaaaatgtagtggacaaaaggaagtccatttcttgagtatcttgtcagatgatgtacggggaaaacaaagcagatgaaaccagagttagaaaactctataaagacaaggtcaataatttgagtaagagtacataccattttctgactatcagctggagactccccaaagatatcatcagtgaacatgtcatctgatattttatcctaaaaatatagcataatataagaccggggaaaataaaataaacaaaaagcattccccaacaaacaaatttcctttgcaaacgcacctttgggctgccttccccaagccctgtggaagctagtgtcctatctgagtctgaaattacaagctgtgcaggtgattccccaactgccgatgaaagcttggcgacttcaccatctacggcatcaatatccaacccagctttagcttgattaactgcagaagtaacaggccccagagtaccacttccaagaacatctgccacagtagaggactgcttgggaatgtttgctagctcaagatctggattcataaaatatttgtgtaagtaaatgtgggagggtgggccaagaagaatgacactttcagtgacacaattaataaaatctaatgactattctactaatcgaattacaacccacagatactaacttgaaaggctcaagttgctcataagtgatagtttcggtacacaatacaaaagatttgaacaaaatgactactcccatgtcgactaacagaaacccaatgtaaactaaatgtaacaagtacacacacaaagtagagaaagggcaactttgaacaacacccatatactaaatgagcaaatataaattcttcatgcatgcgctgttcagagcaatgatcattaagaaaactgataatccccttaccatgagaagaaaatccgttttgctgctccaactttttcttatatttctccattatggcttgcgttctcctcctgctttcctcgattaaatttagctcttcatcttcttgttcaacttcccaaacaacaacgtcacctttatcatcattatcaattctggtcctgtttcaaatataagacaatcaaacactattgtaaaaggtgttgcacatttataaccaacctaaacattcacaagacaaagttttttctgggtgaatatacctttcaacatttccccgagtttctttgacatcgccactgttaggatcatggccatttacagaagttgggcttcttaactctaagtcatcttccgcatcatgtcttgagtgtccagaatgtttatgcctcacttcaccatatccatcatcaagacttttatgcttctctctatcactctggaattctcgtcctttatccctatctttttcactccgtctctctctttcattctccctccccctctctctactactatacctggctttatctctactcctacctctgtcgttgtctctatcccgtaggtaatctttttccctgtctcccctgctatctctatcaacgcttcccctctcttttctcctttcacggtcaggctctatctcttttcttttctcacattctctttccctccgctgatttctcccctgcaatcaccgccacaacatattaaaagactggttacaagagaaatatatggcgtagaataaataagcatgagcatacatgacatttatatgaaagatagttataaacgcgtatccagctcttacaaatcaagggaaagccatcatctccattgaacgcctagtgcaactgcttttgcatttcttacaaatgcatgagacattcaggttatctaatcccacacacagaccaagaacgaacttcattataataagataaatggcacaaaaccacatattacgaaagaaaaatctagactttccctactttcaattaaaagccttttgattccaccatccgagaagaagataagctagcaaaccggaaacaataaaatgaagtaaaagggcgaatagaacagaccagattattctcccggaattgaccagattttatatccccaaactcgtcgacggactctaatttcttcttcaatgtctccccaatcccttcttttcctaatatctcaccttcttccatatcaagatcaccaccgttaacattctcatcatcgttatattgaacttcctcatcacgatgatgacggtggccatgcctgcgatggtgatgacgggacttgtgccgcttcggagatttaaagacctcgtcggacggcgaaaacgaccgtcggtgtttgcggtggtttgattctacatgcttgtcactcaccatcagatcgtcgaaattagggggaaatcgcaaaattagggttaggttcgattttgtcgcgcgctctctctcaatttgtgtatccgtgaaaaaagacttaccagatttaactgatttgtatggttacgcggtagccttaaccggatatataaatcaacgaatcccaggtttacttatatttccagttaatttgaccggttctcggatttaatgattttatttatacagattgaacagttaacttgaccaatcttttaatctggcataatcggttagacccaatccttaatttgtagttgttgttggttttgggccttttgggctatataacgtatgattcatgggccatcttattcacaccagtctgaaaatgaaatcagacttaccgttcgatatgtgaaactgaacgtataataaaaactgacaaagagagtttttcattctgaaatttcacattaacaaaagctatgaaaaaaagatctggaagaacaaacaaacgaattcgctaatactaatctagcaaattacccttacaaaatatttaacttttcctaaatcctaataattttagttaatagatattaaccatcgggttaaaaaaaaaagcgagggagagccaaacgctttaacaaaacgatatcgttttcatttcccacctaattaaaaaaaaagtttgttatttatttattccgccggtaacgactccgaccgccacgaaaacagatcgccggagtcaaaacaatcgtcggaaaattcaaacaacccctcaacagccacgtaatctccaccatctccgacgccggaaccaaaatctaaaccaccgtaattcgacacgtgatcttcaaatccccaaatctcgtcgattcctgacgaatcagaagacgctcgtaccaaatccgttaccgtctccgtcgttacctcctccttcgcgacgggaaccggagaaatcgatggaggtggtggtaaaccaagctcatcatcggaagcttcaagaagatatccgagatcaggctgagtttcgccggcggtagaggaaccttgcgccgtcgtggtggtgaccgttgataactcgtcttcgaaacttttcataaccgagtcgagatcttgactcactggttcaggatccgagtcatccaggacatcgaataaatcatctctcaacctcttcacctccggcgagtcaagaaccgcttcgtcgaatgactcgtctctgactcgctttttctcagccgagtcagtccgagttatatccaacaacttcttctccatagctttggcaattacgtttttctttgtgtgttcggtgaaacgtatttttttgaatcagtggcaaaatcgaaataagtgggggatagaggtgcagaatgggaagaagggaacacgagattatatagtaggggagagagatagagagagaaagaaggaacgcgtgagatgtgacggatactgaggcgcgtggtgagagcgaatcctttggaatcacggatcccttgccttttttattttctttttattttaaagctttttctgggttttttactatcatttttagaaaaaaaatattaattagttttgaaaacttccagatgtcgctttctagttttaaaagcattataaattgatttgaattcagatttgaagtccggtcacgttgcagtgcacatgcccagtcaattacgccttctcgatatttcatttcttattttaatatccttctctagatttttcttcaaacataattatctcttaacctttttttaagacttatagatttttctagaaaatatcgcatgtaataataaacactgaatattgattttttgtggcgacaaaatattgaagaatattttgttgtaattatttgtctgtataaaaatagatgctgaaacaaaaattatgtcaacaattttttttatatttttcttgtttgccatggaatttaaacgaaattaatgggaatgaatgttatattaacgaaattaatggaagaaatactgtaagcacgtaagaactgttttaatcaaattgaaattataaaattgttagtggttgtatatgtccagtggtcatagatagacttattactttgggtggtcctttagcttactactatattcaacttcatctaccattgtacaatttaaacgaacgaaaaaggaaagaatatatatgtataaatatacaataaactttttatctactgttttctttttttgatagaaaactttgctaactttttgtatattatattaaaaccattggtccatgacgagctatgtgaatgcattttttatatgaagatttcattccatatatatctatgctttttgatcatttacacgtaaacgtgaaagttttatggggcacaaatcaaattactttttcctatgttcatatttagatatgataggacgcagacaacatttccactacgagtttcctattgtctaataatatcattggtcgagtttgaagacaattcataataaataaacaacaagatgaaccacttcgaaaatagttagattttacttcatgatatgggaaacgctagaacaatttgcaaccgagttaaaacaaaccttaatgtaatgattttgctaatttttttattcttgtggtattactatagggaacctctattaaaaaagtaggttgatgttgagaattttgagtttggaataaggtgtggatttagacaaaaggtgattgttttaattggtggacaataggcatcttagtgttgccaatatacgtggtttaagcaaagttgtgattcttgggtaatacatttatgtatctgtgcatccattactttcttcttctttttcaaatcgaaccattactttttttttaaagaatatgattgtattatcaaagatgcacgtttctcctcttttttcggtatgacatttcgagcagtccatatcaaacatattggtacgattttttggtggtgagtgacctaaaatttatttgctagatataagcaaagaacatataacactatattgaatatccatcgcactaacgttttctcttttctttaagggagtagccaaattatttttacttagaaacttgtagaatgatcataggatccaaatgatcttatgactgacctaaatttgtgaggaaaataatcgtgtcaatcataaatgctaatacgttttgaatcattcaatatatcgtgtcaatttgacaacaacgattttacctctaaacattactttattgtagaatgattctacatgcatctgactgtttttctatgtatcatacacgcttttatttaagctgattcttttgcatttaacccttccttgtttcaaaggaaacgtacatattatgggttttacgaatacaaagatacaataatacatacattgctccagaaactgagtttaatttcgagaaataaaaaagttagatgacaacaaaagtaggtacagaagacaaaatgtacctcttcggatatttggatggttttggttattttattcagaatttatctatatatcaatttttttgtgtcgtccatctatatcgctaagtatgcgtatacgtaggcctacatgatgttggcctcatcgtgcgaatcatacacgtatcaagaaataaatatcagtaaaccctttgtcaaaaactaacaaaaaaaaactgaaggtccactacagatcaataaattgacacttaataaaactctacacgtatttatttacatactctatcaaacctagaaaacctctaaaatgtcaactaaaaaccatgagcgaaacaaataacctattcacaaacaattgatattggtagaccaccataaagagttctttatatttgttacaattgacaagtaatgctgatattcctgaatgctggtacatattaaaataaaaacactgttacattatgtataatcatagttaacttgaaatattatatgttatcagtttttttacattaatacaaatgtaatatttatatttaactttgtattaatacaattgtctttaaattcacttaaaataagtatatcgatttgggtataaaaaaagggctataaacagtataatgtttttaatcatcttatgaatgactactcttaattaaaattatgtgaagtacataattgcttagatagatttacaataaaagataaataactatactttatttttttggtcaacaattaaaattccctaatacagcatagatacgcagatgtcttcttgtatatattttagcaaaaaaaaaaagccttcttgtatagtgattttaaaacaaaagtaagatatattgtaaaaactaatcaaagtggaggtgaagcataattgtgttttgtgagtggtatatatgcgcatgttggatatgaatatcaagctggggacagtttcagtctatcgggtgtttttctaaataacaatatacccgagcatatatactaaggttttatatttatacgtttaaatcaaatgtagtggaataaataagtaatatatacatttacttgatttattttattgtatttttcattttgaggccaattcacaacgcatcacgtgagtacgaagcaatcaagtacagaacctcacaaagtaaattacgtggtcccccaccaacgttccatgttatctattctctaataatctttttaattgacattttataaagattatttcacaaaaatattataacctatcaatattttccggattgacattttcttacctgacatttatttatttaatatctgttgatgaagttataatcgatctgttcatattttaatggtgtcaattcagttggatttagttaggggtttgaatggttatatacaaatttgcatttagataacttagaaagtagtgaaataaaaagtggtagttgataaatttccatgtgcacaccaaatttttagtacggcatatggtagcatttaaaaaggtactatatatatgtaaattaattatcatctgagttttggctactctaaatgctaatgaatttagctgtgaattatagggggaaaatatagattcttatagtttctattttatgtaaacatattctaattggaaaaagtatatatggtacctttatttataataataatattaattaaaaggaaaattaacccatcaaaaagtattaaaatctcacataaaatgttttttttaaataactgtttgagctagacccaatttaaacttaacgaaatcctccatatagtccatcgagtaacttatctgaataaataaacaattccataaagataattcgtaaaataagttgtatttatttggtgaccacggaaagaagagttataatgtaaaaattagctttcctattctttttacattttttttattttttttttatttttcatgtggtccaaggaaagtaatttttaaaacgacaataattttatgatttggccttctattaaatttctggccattggttttaggttacatcagtatggatatggattatagtaatcaattcagcaaaataaaattttcattttctgtggtaatgggagatttggaaaaggagcgcaacacatgacacgattcaatatttaaaaccatataaatgacaggttttctatattaaacatttaatatatatatatacacttatatatccttttctttatatatatacgtataacatttatcgaagtaattttaaatatgaaattaataatcaattaaatatgacatatgaagctactagccgacgacaaaaaaaaaaaaaaaaaaaaaaagaaaaaaagaaaaaaactactagcctggactaaagttttgcagaatgccagaatcaattaactgacgtttagcaaaaaaataactcgtgaatccttaaagtcttcccaatatatttcacttgtttcactatgattgatgttttaaattaatgtgtgctgtatgcaaataaattttaattaagcatcatttaattatattgaaaattattactacagagggccaatgataatttagagttgtgaaaaatacttcgtaagaatatcgtatattgattcgaaaaaacttgaaaaatgatatcacttacacttacaatattattatgaatttgattggtaatataaatccataaagatatttagcaacaaagaataacaaaaaaaaaaaaaatgacgaaatacttataaaccaattagataaacaatatataattgcatctattaacaaaaattggcattataagtctgttgaattttgacaaagcaaaccctaaacctcataatgccaaacctaaaccctaaacctcatacatataggttaataaaaataaaatatagaaaaaggaatctacatttaaagaataaaaatactgtgtttaaattacaaaaataagaaatactttagaaatgatgtaattaaaatttgtcgagttcgtttagtttctctaaataattcttctaactatatctacatatacatttttgcagtcactttgttaaataaatcttcaaattaagacttatttacagtggctgccattgatatttaataattgtttttgataattaaaaagtaaaacttagaattaaatgtttgcatttaactaccttcccacaatctctccacattaactacacaattagttactaaaataaaacttccaaaatatttaatatcatttaaacactataaaattattattttttaaattcctttttcatgactataacaattcgattataagcacaaaccgtaaagatatttgataacagttaattactacaaagttacaaaatatttaaacaatgattcataaacatatcataaataagatcaacattaacaaaataaataggtttttttacgagacggattggcggaacgggtttggcaggacgttacttaataacaattgtaatttataaaataaaaatattttatagatatatacaatttgtaaacttttatatataataacttttttaaaaaaaaattattcccgcggattaaaatctagtagacatacattttcaccaaaaaaaaaaactatataggcatacaattttgcaaaagttgaaaaatagcgttgaagtgaaagtcttttcgcctaatggcagagtctaaaacatactatatatatgcaactttatattttagtggtttctgttcgataaaaataggatttcgtgttatgaaaagagaaggcactaaaagtaactcattctgtatacagttctttttagctttcaaatttcatcaacttcttttaatctacaccaggtatttgacatttccttttgagtatttgttttttcatatgattttttctttctttttttggtttattccttttcaaagatatggttttaaaaggttgagaatttgcttctcattctattcttctagtcctgttttctgatagaaatttccacctaaatattttgatgaccataaactaattcaggaaaaacacaaaacaaaatctcctagaaatccatatgcgatgggagaggattgcatcctaaaattagtcacaatatttttttccattaaaactaaattattattctagcttattgtaaactttctaaaatcagcatgttaaagtgtgtatagtttttaatagtactaaaaataaataatgcatgaatataaaaagaaatacattgtttattcttttcttttcgtgtcaacagccaatatatatatatatttgtggcgtatgtatatcgtcgacataaaaaagatgggaacaattaagctaaacgagggaccatgtgttgaagaaccatcgatgcaagggacgtatagttctgtaaatggcctaattgcaaacgatgttaaactatttaatattccataattcagatttcagattgttcaaaacataaaaaccgtaaaaaaaaaaaaactaaaaaaaaagctctgaatgatagatatttttttgagccctaatttatgccaatcgtgtcatcataaatcagaatcacaaaattttcttgagaacaataataatatatatattatgccatgttgaaaattgaattttctaatagagaatttagaaggatggttaaggtgcgcgtcgctttcatttagtgtcgtcttcggtcagcgccacgataattgtctatgagcaatcatcctctgcttctcgaccttactctattacaagttacatacaatgactcgaactttgattagtaacacattgatatcgtggaaaacaattaaattatgatttaagattagtgatctgcgaaaatccttggtattttttcgttgtttattctaacaaaagttttactaaattatgttacaaaaacgaatgacttttgatcgtgaaagttatttgtttttgtagaagcacatatattgttttcattcactatatattcacgtaaaagatataaaacaaaatataaaatgagttatgtaaattttatttacctggccgattttattttttcaacatccctttgatgttgatgttgcttcgtcttcatagtaatgtgtcagcattttttttttcttttttttcttatcatgatgatgatggcttttgttgattccggaaattactcaatcaaagttaatcgtaatagtttaaatcagtcatcttttttgttcaacgaaaatacctagaattgtctcgtttagttggaggcgccgcagaaattatataaaaaatgtcttagttttttatataaaaaaaaagtcgtgaaaaacactatcatttatcctttaacaaaataaataaataaattttgctatttgtcgtccgataatgttttagccactttaagcaatactatttaaaaccaaaatttgtatttcatttgaattttcattctggcgtgtagtaaaattccaagccgacagcgtaaggcagacgacgtgtacatagaacgtgccacgtgtatcacaccttacacagcaatctgaccgttaatttttcccgaccaatccacgtcatcgtcacaaccgccgttggatccacgtactataatggatatgattaattgtttagaggtctcacatataaatttaatactagctgaaacggtaaataataataaaaatagttgttggccatatgtccattacattttgtaacgtctgaccagaaatggaaatggttgtttttaaatttgaccagaaaattcaaactaattaatggaaagttatgtttttggtggattttagctgaccattaatgatagttttggtgtgtacttaagctacttgacaaatggaatatagtgccaaacaacaaaaatatttggcgaattaattagtgaacaaaaaaaaaaaaattaatttatgaaatatttgaaaatgctcaatatttctgatgtaactttataagtaagagtatttaaggttttgcttttatagtttatgataaattctcaaagtagtaatatttgtttacccatttatatttaatatttaaaaatgatgatatatttctgataagatacgtgaattaagattatataaatccttactttggatctagatatgtaataatatgtcaactcttaaatgttataacatttcaagttatttgattaatgaccatttttacctacgttatataaatcatatacatgatattatagtataatcgattatgttacgtacttacatatgactcgttaatagaaaagtgattgcgtgattaggctggacaattgtttaagataggaatttcaaatgataaatagtcctagattattcattatgttatgagaaaattcatacgatattgacttaaggctctattgatactttagctttcacggaaaaaaaagaagttgtatccaatttggaaaagtagagaacaatttacagagaaggtcccattggcccctttctttattcatcgaattttcaataatcatttttagtctattcttttaatttctaattttttgctaatatcttttatacagatgttgaatataaagaaattgccaagcaagcatatcttattaaaacgtaaatctaatgcttgagtgggtatatttttggatatagttcaaaagatataagaaatgtgatgacctaacacctaacccaacaaggccaacgctattttattttcgaattcacgacgttttggtaagtctattatattggcttaggttgctttcacaactaaacctgtcaacctattttaattctgtaatcagctttttaaaaaatttgattcggcaggtttaaccaaaacggcacgtaaatcgtcattaaaaagttgtgctggtaccgtaaatctttaatttttaagaacatcaaatataactaaaaatagggacacacaaaaaactctatttcagattaaagataacttagctttattttattttccttacaagaaatacaccttttttgaagaagataaaattcgattgaacaattttgtatggaaaatataaaagccacgtcaattgagcctttttttttccctgttacttgggtttttgtttgtcccatttgccttatgattcgtcgtttttattttctagcttctgattgtttaatagtgagtttgataaatcagttgtgaaaggaaaaaaaaactacaagccaaatccattcgcaaactgcaatgacgtaatagtgatagtcgtgcaaatcactaaattacaaatcctagtttttagtttcaatggcgaaagtttcaaatttgcaataaatttgttttcataggtcaagaaaaacgattatgaaagttaaatatttgctgatatttaataaataataataaataatttatacaaacggtttgatactataccgagattcaaaaaccacttgcgtgggcctaaatttaaaaagcctttttatgaagcccaatacgctttatgaagtcctttagactctcgtgtacgttacaggagctttattctcggaccaatcatcttgaacctgatgattggttaaatttaggttgacatttttgatttggttttgaagataaacaaaccgttttgttttggttttcagtaaatctctgttcggatatgggccaagtcaatgaaaatataggtctataaaatttgtgttttattgggcttgtatatgctaccatcattacatgaagtggtactatattaggcctgattattttacgacttaattaacggtgccgttagggtttgattttccttggcaattgagaaacaaattcaaaaacagtgatttatcacaccatcaattcgatctagaaaaccagagtaataaaggtttaatatcataagcaattcatctctcaaagagaatgtgacataatgtatttttgttaaaaagcgacaaagcaaaaacaatcgaaaaccctaatagaaaaaaaaaaatactagttcatatgaatggattaaattctaatttctaagcacgctctgcacgaatccttcttgccaattgaacatctttaggcataatggtaaccctctttgcatgaatggcacagagatttgtgtcttcaaacaaaccaaccaaatatgcctccgcagcttcttgaagagctaacactgcatggctttggaatctcagatccgtctacattgcaaatttccaccaattatttatcaatctttttcatcaagttaggtataactaatcagtatctagggtttcgatgattgaaagacaaaatctttttaccttgaaatcttgagcgatttcacgaacaagacgttggaatggaagtttacggttcaacaactctgtgctcttttggtatttacgaatctcactgattcatcaaacaatagtcatcagaaattgaagacgatgagaagattgtgattcgaaaagaagaaaacgtgaaagttaccgaagagcgacggttccaggacggaaacggtgaggtttcttgactcctccggtagtcggtgcagatttccttgccgccttggtagcgagctgcttcgtcggagcttttcctccgtgtgattttctcgcggattgcttcgtacgagccatggcttcttcaagaatctgagagcttagaaactatgaaaagattgaatcagagagaaaaatcgccaaagcttttaatgttgtgttttgatgtagagaaaagtaaaaaagattagtgaattttatagtgacgaggtgtgagaattaggtcggttaattttggggagaggagttgatagacgtgcgattaaaggcatgttcgacggtccatatttgattttgattaagattatgcatatgtggcgatctgcgctttcgattcttattggtccattttcttgttgagtttgttgaatcttcttcttctttggtttaagtaacgtttttgttgcagaaaaaaagaagtaatgttcttaaaatgagtaggctttatatttgagtctacgggaggatctataatccagtttaaataggcccagaagcccattataggatgaacattttgcattgttcacataccttttaaaatatgtagttaaataacaatgattatgacaaatctagtcaatacaaacatccattacttatgaccgaaagttgcctattgaattgagagcaaatagcgaaaattttcataaataagtaagagatatataagcaaaagatataagagtaaccaagtgttgtaacaatgcaacaatctctttcctttcttacatctacaatgcaaatgactaaccatttcctctttttgacatttatgcataacccgccataccaatattggaactagagcggttggctttgtgagcaggcggcgaagagacggacttggtaaaatacatgtagtagtagacattaagaaccatagtagcaactataaagactgcacctgcaatgaaaattcctttacgcaatgatgcacacgaaaaggtttgcgaacttaagtactttgtgtggtatgcgttcttggtcgctcctgctattacacaagcttctgctaccagaaatgtcatcctgaaattgtcaaatttgaatatcaaaatattggttgagaaatcaaactactaatccattgatatgttcaaagcttcaaaaacagaaatcaatctaaagctctttcaatatatatcactctcaagatgaagctaaacttgaagatatatacattgctttagagatgtttaagataaagggactcaccacgaagagatgaaatagataatagaccaagcacggtcacttccaggggctaagggtcttccaaaacacatgcatttggtaacactcataagcaatgattcactagagaggaggaaaaggaaagctccaactccataaccagtggctacatcagagtcataaacgcagaacgttgtgtttgttattgggtcttgaatagatttcccctgccacaaaaacagagaaataatgaccttaaagaagtgtcacaacagattataactcaatgtctcaatctataactaagctaagtcacttaaatgtttctctagtcttcagctacaaaaacatgaacatagctctgaaaaatttgttctttagtttcaagatttcccccaatttactgactcttgaagaatcttgaattcaaattagaggcaccaaataacatgttcgctgaaaattgcaagtaattacgaaacaaatccagaaatagaaagattcaacagaatcatactattgactattataacctaagaattcgaactagagttcattaaagaacaaaaaccctaaatgagaaaaaaaaagtgggacagagagagaagagtgaatttacgatgctgcggcggcgctcggcggcgatggagaagccgaaggctactaaactaagagcgacgacgaggatgaaaaccagagtggaggccttcccttctcccattatctccggcgaaagagaaatagagagtttttgcagagacgacagaagtgaggagtgagagagctggaaaacgagttaaagtgaaaaaacacacacgagcagtgagtgtcgttaaaataaagaacacgctagacatagcgcgtgcttgtcacgttagaataatgatttgaagaaaagattcacgcggagtgtgaggcgcgtggggaaagctttttgaattttgtgtttcctttttcgaaaaagttaataaagggtaagagtgtaaaggccattttataaagatatgggcttgatgggctaaagagcccaaatatatccctttttaagttaaggccgcctaataggtttgacttttacgagagtcaatttaagagggattttaagaataatcaaattgtttcttattgcaaaaattgtgattgatactttgatacaatcttagcgtagtacaatcttttgtcttacttcaggtgaaagttacatgtcatgttaattttgatttgagatttatctctttgtttgttgtcgtcactaatttagataaattgatacttgaaattcagcaaattaattttaaattaaaaaagcttgcgagatttccggccacaaagtttgacgaatcttttggtttgattgacacattaaaagcgaaacaaaataaatttatttatatttatataatttacaagctgtaagcaaaaggaatcgaaattaaatagatcaggagacaaagaaataatgagttgtcctcatgtcacttggctggtccgtaccctaaccacatccatgtatgtacattttcttataacgcttagtttattggtttatgtacatttgtttagtttcttttgatataatcgtaatatatttgaagcaagttatatgaccaaacgagacatagttttttatttataatgacgacaatctacttttccaccggggacggttgtttgccatgtcttatgttgttctgttctttccatatcgagtaaatattattttgaaaaacataccttaggataaaaactttagtgtggtcatgaactttatttgtgatcagctttttaacccccgtaatgtttgctaatttgtattcagttaaattgtccacaattattaatgcaaatctttaaactcttgaacaattatggttactttgtctacatattatattccattaagaaaactatagacacattaatcaagtataaaatattgttgatacttgtattttgttaaattatctgaaatattttggtatattacaaatacaaatcatcttttgaataaaatatgatctttaaaatttagtcgaatcatttacttatcatatgtattttttttattttagacgaacgaatttcgtaactaaataacttttccttttatgatattagttctttaagtttacgtaacatcataaatggtaaaaaatagtaaaaccacggtatcaggttttttttttttgacatcaaggatatatttcattaagttgcaagtaagagactctactactctacgagaagctatataaactattgaacttatatgtgagtaaaaagatacatgaatcaaaattttggtttaattactgtcttatgattccttgtgtttattctttttgccttgtaaccatatgtataggttttcagtattttgattgcaacttaaactgttttcatatatatgcaatagtaacaatttagcaaaaggaaatgaatcgatatatttcttgcgaaccacaacatctggtcaaagagacggaagcgaaaatagtataactagagatggttgtttcactccagaaataagtcactcgaactgtagaaaagctaaccgatgatcaatcgccatctaccttgagaaacattgccactaaaaaacaacaagatttcgagccacctatcttgagaaacatggccacacaagaataacaagatttcacggtatcacgtatactgaaacatatgaacttgaaatatgaaagtatacacaaatcatcacacaaaaagtgacagtaaaattcatcactaatgttagccacgatataagaactaataagactccaaaactgatcaactcctttgaaatttacatctgttcaaaaagaggcaatgatatatacaaaaataaaggcagagaaatgatatctttacatttcaaaactctttcgagcctttccttttgttacaataaggaagattacactacgctcttatttcccactaaagataccaaattaaccactctctctcccccctttttaattacaaaattttagaaaatggacacccaaaaccaaaaccctaaatttataacaatcccatttataaatccccccactttttttcaacatatttacacattttcaccaacaaaaccctcccacataatcaatacctaaacctttcttagttgttcttttaatactctctctgttatatatatatgcatattggactactcttatgcaagagtcgaaatgctcctgttgctgctgcgtctgtcacaatcaaaccccacaacacgaaccacaggattgttcccgaaactcgtcgccgccataacacaactaccgttccttggagaagacggtggctgcggtttggttgctcgtggagtcgatggactcggagaagccaccatgagaagctcttctcgaaaaagcgaatcttttgttaatgggttagaaactctacttggaggtgaccctgtaaagaacagaggtggcgtcatcaccgtcctcgtctgatcttgctcaccaccaccaccaccaccctgtaaaaatcatcacataacaaataaaaatctaaactttagatatcaattcaatcaaacaatcatcaacaagcaaaagggttgttattgaatcatatatatacctttgtgaggatgaaatccaaaatctcacttcctgaattcgattcacataattccatctgatgactacaaaatcaaaaaccaataaatctgattgcttcaagtgatttgcctcaaaaaagttttgaactttattacaaaaagtatcttacttgagttgccaacggagagatcgagaagagtggtgattaagagcaccaacacgacgaggtttaggacaaatcacggcgtctctccgatcagaaacggcggcgtttctcctcatctcttcaaaagcgttttgttggattccacagctgttcatcatctttggttgctgcttcaaagaatcaatcaaaccacaaagaaaaagtgaattacgagattgaagaagaagatggcaaaaaatgatatataaatatataaaaaaaaagataagagaagagagaagaggtggtcaaatggtaacgtgtttcttatggagatctggtcataagagaatattatattattttaaggttgattatttattaattaagacagaaaaataacaatggtaaggaattagcccacttgacaaaaattacttttaaatatttttttaatacgtaatgtttcccattatagtgaatgatgtcaagatcatagtggagacagatttttttcttctttttcaagaataagtaaactctaaccaaaaaaagattatgagaaaaagtcttaattaaaacagtgacaagatgattaagaataacacaaaaggatcaagaattcgtagaaaaattgtttcagatcaaaatactaataaaaatcaaaaacacaaaccaagaaggatcttgagagattgttgagatctagatccgagattcaaaagaattgagagagatacctgaaggtgaaagaaagagcagagatggttcttggcttgtttgtgctctacgtgagcagaagaaacagaagaagaagagagatctgaaagagagaagaagagtctaaatggcttttgaggttaagggaaagagagaacctgcagacaacaaatgctatggaatcagtatttatttatttgtttttcttaatatctctaacaaggtataattgtttgtgtttagagcaaaacgcttattttagctaaaaatatttaattctctgcttatgaaatttaattttaacaaatgttttataaattgtattttgattttatggtgttggatacagctttaagtttcaatgtttagatatttgccttttttggtacaaaggaaggcggtgcctaaccagactctgtcctcgtaaatatctatcaatggttattaatgtcaccgacgatatatatcaatattttaattttacattgagatctctttttacttttaatacactaatcactaatcaccatttggagaaatgaaaatgtagattttagattttataatatttgctaatagaattgatatttgtatgtacattactaattagagagatggattcttcttttcagtttactgcatgttgacatttgtctattgaaaatttatggcatatctatgaatagattgaaaaaaagttaaaaagctttataaactgttattttattgcgtcataattataaagattttaagaaaacaatatcttgctttcaaatacataaacagtagttctatgcttataaataaaatcagaactaattaaatgttagatgttacatttacagaaatattacattttgagggaaatattgattgtaatttctttctaactatacaaatttcttctttatttttaataaattttaataaatattatgaaaattacttagttgcaaataaaaaaataagaaaatataatgaccaaatttgttaggaatataggaattaaggtgatgcgtaataaaaagattagagaaataacaatcacaatagttattaagtttaaaaaaacagcggtaagtgacaattattttttaagtttataaatgatggtgatcggtagtaatttaatcatggaaagtaacaatggtaagattcaacgatgcgtaataagaaaatttgaaaaataaaaaagataatctctattagattttataaaatgacggcggtgtaaaatgataaaattacaaaaatatcaattacaatattttgaaatgtatagaaataacggcggtaggtataaaaagaatatggaaataatattgacaatatttattatttataagatgatggtgttgtgtaatataaaatttatggaaataacaataacaatatttgttaaaaaattaaaaaatataacggtattcattagggttataaaaatgacggaggtacgttgtatatataaaagaaaaaaaatgacggtgatgcaaactgacaaaattacggaaattaaaattacaagatttttaggttttttaaaaaatggaggtgtgtagcgacataattagaaaaataacaatgacaattggtttataaaaatgacgggatactaaagaaaaaataacaatgagatattttgggtctatgtatattatggcggtgtgaatgattatattaagaaaataagaatgacgagacattttaggtttctaaaatttacgaagttgcaagatgacctagatttttttaggtttatgtgagtcgtcctctctcacgctactatgtaaagcgtagctcgtttgaactagttgatgaaagtctttgcctttcaagccttgtatcatgccctgtttcagctcgcattttgattttttcttcgatttagtatgtaacattttgtttagttttgataagtgttattgatggttccaattccctcggtgtgcttttgttttgttgatccttctgctgcagcattgtggtgctattaagtacttcaagtcgaattttaggagaaaaagatgtttggacttcgtttgtttgaccaatctgatgtttggtcttggttcaactcctcatggtcaagttgagtcaaattctggttcaatcgtggttctacacttctactagatattagctattggactagttagccattgggcctatgggctctgcaaaacatatttatcaaaaaagaatggaaagaaaaatctacttagattgacattttcccgtactacttgagctgtgtgtatccaaagctgaggttctagcagtttcgttgttcttttggcaaggcaatcaagttttgatctcaaaaatagtatccgcccttaaatatatatcttgtaaataaatagaaggtctacaagagtaatcaaataaccagaatttcacggtgtattagaagcgataattacggattgggtttgcattttgcaaagcttctacagtgcatgttccacgacaaaatgcagtattaattttggtgattgttattttttgggtattgtatattagtgaagtatatttctgaggggaccaatgtaacaactatctttagcatcagagatcataatgagtaatgagtaatgactactgcctagctcatctctacatattagggcttctcttacatttctttgtaacttctatttggctttgaaggagtgagtattaatttataggcaaatttctttctttggtatgaatgtgagtttaaatgttacttctttctttccaagaaaattaggtggtctcttatagaaaatacattttataagttcgcataacctcaagtactcatgtttaataacttcatttaaagagatcatttagtctatatttcaaaatttcaaattacttgaatataataactagtttcctttatttgattgagtagtagcacgatactgtgtatgtatataaaagaaagacaaaacaacaaatttaatctgaaagattcgacgaaaattaaaaggacttaaaattgaaaatatttatttttggaactgtgagattttgattgaaactcgtactgactatacagttattatatgtgaattcgacagtgacttgagaaaagataggttttggaatttgatctttagcctaatatcaatttcattacatattttagtgttactcatttgtatatcctatgtttagtctttatttattttattttagttttgttgacagcgattcgttatgttattatattagtgagaacctgtaacaaactaaacttttggtccaagtacttaccgtctgatcgttcaaagaaaaaaaaaacagaaatgttaattaaaaagtagagattaaaagaaaattaataatagagtaaaaatgaaaaatcaattggatataacatcacacaaaattattaacaatacattttcatatatcggacttgttatatacttatatgtatatgtgaatatgaccattatatacacaaagggataccttgacacataaagtcccctcaacctatagtcctcttgcataaaagtcacaaagccctccactttgagttccatgctcaatgttctcatttctaaagagataaaaaagagagagataaactgattaaaagaaatttcacaaagctctctttaatttatccctccatcttcactctctcaactctttatccttagtttcgtctctcctgtcttcttggtaaccatgtatgttctctctctctctctctcctgtcctctcttcatgtctctctcattatttctctaactaaatctgattctaaaattttaaactgtaattttttttgcaggagagctgatgaaaataacactttagatcttaataacttacctgatgatccttctagagacattttcccattctttgaagaaggcttctcttcatcttcttcttctggtacacactactctcccttttcttttaattatttgaataaagttttgtaaatgattaaattaatctccccaccttctgctttgggtgattgtttgtaataaatatgatactagagtcaacatcataatagtaaattaaggtttggaaaccaaaaaagttttgatctaatcattagacgtacatttttgtattaatttagataaatctaattaagctattaatctttattattgagtaggagggtttagagagaagcaaacaaaagatgggaaagagtatgaatgtagattttgttcactaaagttcttcaaatctcaagctctcggtggccacatgaaccgccaccgtcaaggcaagatcccattattctctatattatgtatatacactaatacacatatcttattttttttggggttggtgaaatagaaagagagacggagtcactaaacaaagctcgtgaacttgttcttcgcaacgatagctttcctcctcatcaaggacctccatcgtttaggtacttttagtttctattttctttaacaatgttttactcattttacatttgatatcttactataaatattgatgtaaatatatagttatcatcaaggagatgtgcatataggagacctaacacaatttaaaccaatgatgtacccaccgagacatttctcactccccggctcttcctccatcctccagctgcaaccaccatatctttatcctccgctgtcttcaccgtttcctcaacataacaccaacataggcaacaacggtacgcgtcaccaaaccctaaccaatagcgtttgcggtggtcgtgcactacctgactcaagttacaccttcatcggtgcaccagtggctaatggttctagagttgctccacatctacctccacatcatgggctataatgataataaaaaattgaaacaaatgtatttctcttttttggatttttcttttcaaatttggttgtttattaaatgttagactttaatttatccatcaagtgtttaaaatttatctatagttcaatcaaatagaaagccccgagggcgccatattctaggagcccaaactatgtgattgaataaatcctcctctatctgttgcgggtcgaggactccttctccttccccttttggcgatattgaaagagacatgacaaagtaattgaaaacgacaaaaaagtgaaatgcaaattggagagggagtgtttggggttatgtaagaagattgtattttgtatgaatcaaggagcagcttttatctatttttattttgtttttttcttattatataccttttgtcttggagctgttttgtgagaccacatagtgtttataatcgttcaatatatgttttttgattattttttcctgcggtgaaaaaaaagatagaactggagtgactagagagaggagagatcaagttagacctggacgttcagaagttgagttctaactaactcgtccactttttgctgtggggattaatctttttttttcttttgaaacaatttttttctatcgcattatatttgaatttaattagttttgttagccaattcattgttagattatacgtaatggtcttgtggaaagaaattgaatttatttttatttggttactctagggactatatatagttcgtgtgaacaagaaagaaaaaacattcaaattacattgcaaacctaacaaaatccaaaacccaaactaaaaaatcactttgtatcatgtaaaccagtcaaaagtagtgatcaataagagatagagagagaagagatatgtatgatatcaagctcaagcatgtttgtgtgataaaaggagaaaaaaagagtcaaacatgaaaagaagaaacatatcatggttttgtgaaagaaggctaaaccctagagtgtatttacagtcttcccaagaggcatatatatgtatatataaaaataaataaataatcagaaagcgaagggagagagattgagtggatcaatatagatatgtgtatgagagaataagttacgattattaaaaagttaaattggtctgagtcatagacacaactgtggaaggactcattgatgcagttaagtttcttttgtttcagtctgtcgattacaaaccctattcccttaaatcagcttttaccatttcatagctttactcctcaatttcaactctaccctactcctatatatgtatataataatatgagtgtattcacacatgtacccattccttttacttgtgaatatagtgtgaacaaactatagaggtaaaataagtaataactctctttgttccttctgagaaaaattaacatgcatgtaaatgtaacaatgtgacaagatgaatctaataaacatatgtagtgatcatcaatcattcacatcaaccttgatatatatatacatcagtgtgttgcatataaacaacaaaaaaacaaaaataaatgcatactagctccctatgtaagcacatacataaaaattaaaatcatttaagcagtgacataacatcacatgatataggtgtgcatctatctatattctagagcataccaattcaagtaaatatccctgaatctcatgaaaatagcaaaaatggaaaacatgatacttgtttaaataagagggaaacgggtaagtactaagtaggggctaagaaaattagatgtgtttcaaaaggaaagcaaaacttttactatttatgccaataaaaagaaagttagggttcaattaccgattgctatattattagaataggctgcatctgctgttcctaaacaatgacaccgcccatctctattacacacctctataagcatacatttacttaactttttatagatatgtatagggctgtttattttaggtatgttttaagtaatgcaatttcagagttccctaggctggatagtttgggtttagtataagatacgcgtagtttcggtatacaaaagtattggctaatctctgaaaaaaacacaaaactaaaaattggatatgatttggacagatttaaaattttatggaaaattgagtaaacacacatatcaatcatcaatccattgaaatcaacaagtgataataaaaaaattaactctcttttttctcgttagttagaatcgaatggtaaaaaaatactactacacaatttctaattttcctacagaaggagcaaataattacctaaccttctaagtaattgagaaggtattgactttgtcttcaaagcctccactttgggaatctgattgtgaactaaaggcgccaaatcgaaacagtttcattgggagctttcatcaaattctctggggaaagactcaatctttttgtattttctcgtgacaaatctgttacgtttgttcctgaatatcgaaaattgcgagagtttctctagtttcagcttctaagtcaccaaagaggctattggaagaaaagttcatctctttcttggaatcatgtaaaacccagaaacagcttcttcaaattcaatctcaaaccgtatgtcacgagttactacagaatgattacgtcgctccgagactcgtcgctgcttgttgccgaatcacgagaattgattacgcacgccaagtgttcgacagaatctctcaaccaaatgtttctgtttggaatgctatgtttaatgggtatgcacaaaaagatttgtcttttgaagttttgttgttgttcaagagaatgagaagctttgatgtgatgcccaattgttttactcttcccgtagttttaaaagcttgcgtgatggttaaggatcttagacagggagaggagttacagtgtttttcaataaaaacagggtttaggtcaaatgcttatttaggaactaagttgattgagatttactcatgtgcaggagtgatagcatcggcgaataaggtgttttgtgagatggttgagaaaaatgtagttctttggacttcgatgatcaatgggtatcttttgaataaggacttagtctctgctcgacgctattttgatttgtcgcctgagagagatattgtgttgtggaacactatgatatctggttatattgaaatggggaatatgttagaggctaggagtctttttgatcaaatgccttgtagggatgtcatgtcgtggaatacggttttagagggttatgcaaatattggagatatggaagcatgtgaaagggtttttgatgatatgccagagagaaatgtgttctcttggaatggtttgatcaagggatatgctcaaaatgggcgggtttctgaagtgttgggttcttttaagagaatggtagatgaagggagtgttgttcctaacgatgcaacaatgactttagttttatccgcttgtgcaaagttaggagcttttgatttcgggaaatgggtacataagtatggagaaactcttggttacaataaggtagatgttaatgttaagaatgctttgattgatatgtatggaaaatgcggagctatagagatagctatggaagtcttcaaaggcataaagagaagagatttgataagttggaataccatgatcaacggtttagctgcacatggacatggaactgaggccttaaatttattccatgagatgaaaaattccggaattagtccggacaaggtaacattcgtcggtgttttatgtgcctgtaaacacatgggtttggttgaagatggcttggcttatttcaattccatgtttactgatttctcaataatgcctgagattgagcattgcggttgtgtagtggatttactatcacgggctggatttttaacacaagctgttgagtttataaacaaaatgccggtaaaagcggatgctgttatatgggctactcttcttggagcttcaaaggtttataagaaggtggacattggcgaagttgcgcttgaagagttgatcaagcttgaaccaagaaacccggctaatttcgttatgctctcaaacatatatggagatgcaggaagatttgatgatgctgcaaggctaaaagttgctatgagagacacagggtttaagaaagaagcaggtgttagctggattgagaccgatgatggtttagtgaagttttattcttcgggagagaagcatcctcgaacagaggaattacagaggatcttgagagaactgaagagcttcaacatccttcgtgacgaagaacattttatgtaatcttgtagagcttttgtcaagcttaaactttttccattaccggaatttgttgtgaagaacattctgcaatgtggaagcggaaccctcacactgttgacgtataggaatttgaatttcttaaagcagtttacaaagagccttgtgctcagctgaataagcttgctgagttcttgagttgtccatttaccgcaaaagaagaagaggttttatacttttgtaatctgagcttttaagaggtcaacaagatcatgaatggaatgggtcacaagaagtatatgactactgaaatggacaacaatatcggcgagttaacaaaagatcccatatagcacactagttaaattttcttgattgccaatgttttggattcgttattcgacaagggaaaactttttttttttttttttcaaacaatccatttcaatattgtatatattagtaaatttcttattgcgtaacaaaattccgcagtatcacaaaaaagctatactcatcataattgctgaatttatcgggtttaaatttcaaaatccggcagtagaaaaccactttttagtttcaaactttttaattatatgtctttcgatattgtatagattaataaatattcatgattttacaaaaaacatgttgtagcacaaaggctaaattcatcttcattgttgaacttattaggttcaaaggcagtgtaaaagtttttttatttaattttaaattttctaattatctgtctctagttattgtatatattagtaaatatgtatgatttaaccaaatatccgctgtagcacaaagggtaaatacatctttgttgatgacctttccgggtttaaagcccggcagcagaaaatcttttagttttaatttttaactgtttagttatctgtaaagctaatttcatcttcattgatggggtaattagtaaatatgtactgtattagtaaataagtttacactagtttaatttgtcgtgattgccgaacttgcaagttaataatccccacacttttgctctttgtgttttgtctattgctagctgaagcgcttcaaaatacttcttgttgaagaagaagaatttcaagaacattttatgtaatcttatagagaagttttttttgtcaagattagacttttccatcaccgaaattagctgtaaacaactttctgcgatgtagaaccggaaacttcaggtcaatgaatttgtattaaaagaaaaaaaaggaaagaatttgtagtagttaacattttcttacaacaatttacaaatcacgttgccagtttcgaattgctagaaatcgtttcatgccaccaacttcgatcactcaagatttcaagatcactttattggtatacaaaacaaaatgtcttatcaacttgatattatgcctcttatgccaccaaatacaagttttgtttttgaggctaaaatccaaatataagttagttggacttttgtatgtttgtaatttaacaatcttatattacgggttgaaaaaaataaatcaaccaccacgttatttcatgaacgttataaaggatctctcaagatatgaaagatcacatgttttgtacacatcagctttcaacgtgtgtaacgtgagtgtttgatcaactactacgttaacatccaacactataaatagtaattttgcgattgcaataagtcacaacactcgacacaaaagcaaaaacaaaaatgggtgagaaagatattccaaggaacttgaaggaagaagaagaagaagaagaagaaaaccaaagtgaagaaaccaaaagtttgatctcttcacttccttcagacatagattgctcagggaccaagttgtacaagtaccaaggatgttggtacgacaaagatattctccaagcaatcctcaatttcaacaaaaactttcagccacaagaaacggatataattgttgcttctttccccaaatcgggtacgacttggctcaaggcactcacattcgcactcgcgcaaagatcaaaacacacttcagacaatcatcctctgctaactcataatcctcatgagctagtgccgtacctcgagctcgatctttatctcaaaagctcgaaaccggatttgaccaagttgccatcatcatctccgagattgttctcaacccacatgtcctttgatgcgcttaaagtaccgttgaaagagtctccttgcaagatcgtgtacgtgtgcaggaacgtgaaagacgtattggtatcactttggtgtttcgaaaactccatgagtggagaaaacaatttaagtctcgaggctttgttcgagtctttatgtagcggagttaacttatgcggtcccttatgggaaaatgtgttaggctattggagaggaagcttggaagatcctaagcatgtgcttttcttgaggtacgaggagttgaagacggagcctcgtgtgcaaatcaagagacttgcagagttcttagattgtccattcacaaaggaagaagaagatagtggaggtgtagacaagatcttggaactttgttctctaagaaaccttagcggtttggagatcaacaaaacaggaagcttgtcggaaggagtaagtttcaagagttttttccgtaaaggggaagttggtgattggaagagttatatgactcctgaaatggaaaacaaaatcgacatgattgttgaggagaaacttcaaggctctggtttgaaattgtagagttcatatctctatgtatatgtgtgggaacaggtttaatctcaaacctaataatgctggtttgttcttttcttgtatgcaatgtaataaaagttactttgatgtaaggttaagagtttaagattcttagtgatgtgttgttgtttttgtttcgtttgataatgaataaagctagcggcttttcttcttcgccaaggcatacaacaatcatttttctttttttttaataattgaaaagttggagtccaattgaccttaatttcataaaacatgccatgtgcgccggtttaatagcagttgacataatgagacttttagttgaacggaaaagccacaaaactaactcaattatcataaaaaccaaaacaatggtttcggtataaagaaccttataaaaagaccccatgcatgttcgttggtgaagtgtccatgtttacgatatatacaatggactagattcctatatactagtattttttaatttcttagtgacatgattggttaatatttgttagaaaaaagtcgaagattataacattattttgttctatgtatataaggtcaataatggagcgtaattttatattagtaaaatgctgcatttaagtttagcactttaaaatcaactaaaatgttcacttaacaaaacaagaaccaaaaaaaatggatgagaaagatattctaaggaacttgagggaagaagaagaagaagaagaagaaaatcaaagcgaagaaaccaaaattttgatctcttcacttccttgggagatagattaccttgggaacaagcttttcaagtaccaaggatattggtactacgaagacgttctccaatcaatccccaatatacactcgagttttcagccacaagaaaccgatatagttgttgcttctttctacaaatcgggcacgacttggctcaaagcactcacatttgcactcgttcaacgatcaaaacactcgttagaagatcatcatcatcctctgctatctcataaccctcatgagatagtaccgtacctcgagctagatctgtatctcaacagctcaaaaccggacttgaccaagttcttatcatcatcatcatcatcatcatctccgagattgttctcaactcatatgtccttggacgcgcttaaactacccttgaagaagtctccttgcaaggtagtgtacgtgtgcaggaacgtgaaagacgtgttggtgtcactttggtgtttcctcaatgccaacaagggagtagaatggggagattttagccaaaatgaaaagatcattcgagcggagaattattctttcaaggctatatttgagtcattctgcaacggagttaccctacacggtcccttttgggaccatgcacagagctattggcgaggcagcttggaagatcctaagcattttcttttcatgaggtacgaggagttgaaagcggagcctcgtactcaggtcaagagacttgcagagttcttggattgtccattcactaaggaagaggaagatagcggaactgtagacaagatcttggaactttgctctctaagtaatttaagcagtttggagatcaacaaaactggatccttgggtggagtagattacaagacttatttccgtaaaggacaagttggtgactggaagagttatatgacctctgaaatggtaaataaaatcgatatgatcgtcgaggagaaactcaaaggttccggtttgaaattctagaattatgcgtgtgctttgtgaagaactgcagaaaaagtgttcttgaatgcgttatttaataataaaagttacattgtcatatatataactttgatgtatcattacaactgatgtgtggtttttgttctctttgatgttgcaataaaaaccttctttacttctatgttcctttaataactagcgtgtgatctcatgagtaccatttcaatagtggcatgttactcttcatttacgactaataaagtaataaaataatcgtattatcacatgcaataacatgtcactattgaaaatacgagtttcctattaactttaaaagttagcatgcaaataaaattataatatcaatcattttacaatgatgtcaaccaaaaaattggatcttcgcaattgcaaggaaatactaaattccaatttttgatcctccgtttcaacaaacttggctgattcgttaaaaaacaatgtggcgatgcttatcaaccaataaatccgtctcagtaacttttgctttcaatcgaagatgattgacctaatgtgagctatatgactaggaagaaccattttggtggagaagctcaagtacaaatagactattaaaaatacgagaagaggacgttcaatgttccagttgccagttgggtttgagttagcacgagaaagtaatgaactaaaaacttaattaacataaaaaaccaaaccaatggtttcagtaaataaagcagggaaacattaagagaaagcaaaaagacaaaagctacaaactctcatgactgcgcatggaatcagtgaaaaaacataacaactcgagttttcttttctccttttttttattcagaacagtacgaactcaaccacacacaaactctcgccggtgtaagcttaggcctttgacatgtgaacgataaggtcaacgacacgagaactgtaaccccattcgttgtcgtaccatgacaccaacttcacaaacttgtcgctcaatgcaatcccagccttggcatcgaaaatgcttgacctataaacacaaacccaatatttcaattatttgctctcgccatttataagatcagaaaactgtatatcactctacagacaatattttttatacctgttgtcaccaacaaagtcggtagacacaacatcatcctcagtgtatcccaaaattcccttcattttgccttcagattcctccctgaaaagttttaaccaaaatcttttgtaagtacccaataaattctaatatgatatggttaggactgagggtccttgatggttctcacttgatggccttcttgatttcgtcgtatgttgcagctttctcaagtctaacggtgagatcaacaactgagacatcaacggttggaacacggaaagacattccggtcaattttccattgagggatggcaacactttcccaacagcctatcaacaaccatgatacaaaaatcagattcaacataatttctcaatcaaaatcaattaaaacaaataagaggctgaaatgataccttggcggcaccagtgctgctaggaataatgttgaaggaagcagctcttccacctctccagtccttcattgatggaccatcaactgtcttctgagtagctgatcaccaaaacaacagttactattgagtcaaatatacatattttcaagaatcaacccaatgaaaccaaatataaatacgtaccagtgatagagtggacagtggtcatgagtccctcaacaatgccaaacctgtcattaataacctgcacaaatagattgcaactgtaagagaaatgattcaacttaaaattcagaattcagaacaatttacacaagtttatgggttgaaacagaaaaagataccttggcaagaggagcaaggcagttagtggtgcaactagcgttggaaacaatgtcaaggtcagacttgtactcgtgctcgttgacaccaacaacgaacatgggcgcatctttgcttggggcagagatgacaacctttttagcaccaccctgaataacaatgaaacaatatgatgatgatatagatcttaaataaacaagttctcgactattatataaaagatccaagttcaaaccttcaagtgagcagcagccttgtctttgtcagtgaagacaccagtagactcaacaacaaagtcagctccagcctcaccccatgggatgtcctcagggttccttcaaaaataaaacaccacaaatcagaatttcacaactctcaataacataacagagaaccactataataaaatcatccatgattatgtacctgatgccgaaaacagtgactggcttctcaccgaagagaagagttttgtcatccttcaccttaagctcatggtgcttccactgaccgtgaacactgtcatacttaaacatgtatgtctgcaacaaatcgataccatatacacaatcagtcaaaacgaatttacagagaatcaacatagaagaagaatacaacaaagcaagttctcagatctatatgataaacagcacacaccatcatgtatattaacaaaaattcagataaaactattaactcaaatccagatacgaactagtatcgaagagaagaagaaacgaaccatgtactcggtggtgatgaaaggatcgttaacagcgacgagctcaacatcatccctctgaagaacaactctagcaaccaaacgaccgattcttccgaaaccttcacgaagattcaaaactcagcttctacagatccaaatcacttaaacctaaccaaaaaacttatggaattcgataagaaaaacactcaccgttgattccgattctgatcttcttgtcagctacacaaaccaaaattacgatcagattcaaaaagtatcaacgaaagaacaataaatcgaagaatcgcagatcaacaagagcgagaagcttacccattttgcgaaattgagatcgagagagatttagatgatatcgagagagaagagaatgtgaaaatagtgagtgagggtttgggtttggtgaggatttagggttatttaaaagagaagaagaacgtgatgatgaaaattgaaaatatgatcgagtggctgagattttttcttgggaaaaaggctaatagattagattcactaattaatattactatattgtactttactttctttcttatttaccatttttacccatcgtttatgggtaggattaagaactgatttggggaaactaatggcgcttggattcacgcgcaggctgatggaatattcgaggtttaatactctaatcctatgggctgggccggtgcacgcaagactgcaacgtagcagattttgtatatattccttttgacagccaatgagctttgccaatagccaaatttgtttttctttttatttaattttcataagattttgtattattgttgttgtcaaaccataattttccttaataaatccaaagtaactgcaatagtatgctcattttttaattttgcgtaacaagtaacaccactgtcttctatacatgtatcttgtgataccattcatggtaaattcaattattatcggatcaactttatcatccagttcattatagtgaaagttactctcaaatgtcaattctcactcaacattcagcaacattactccaaccattgttttagaataatcaaggtgaagatttgacttcataaacactatatttaaaggtgttttgttttaatcaatttagatgtgtagatgcttgtagacgtctttatcgaattactggttgcttactgtttcaaatatttataatttgacacaagtacatatggtgttgtatatttatctaatcgtgactctataccaagacacaatagatgctccactttgagagctttggtaggtcagatggaatgtgacagcaaaaaaaaacatcacaccttatgtaatagactaataggtatgactcttggcttttgccaaaagtcttcttcttctcctcctcttatttgctctcttttctttttccatttcatttttgttaggtgaatggttataaaactccttcttttggtattcatatggatctttatacatccaataaatagctaaaatattatctgaggtcaacaatatatcataaattgaagtttgtgatctttctataactcatgatcatttccaagagtccacttataagttataactgacccgtcaagtgtcagccattctcttcgactgaataagttctatgatttaaaaacgattttctaattcgtttttctttgtaaaatcaatttactttggtttgtactttgtagtaaaaaaccaaatttatttttgctgaaaaccatatttgagaattttataacataacgtacatgtatttttttcattatctgaattatttgtagtgattttgtggaattttcatatgttatttctgatcttatcccttttattttgaagtgtcattattcacaatgttctaaagtaatcgtgaagtgaaaagaaccacaatatatcattatcaaagtatatgttaaaattcgattctaagagaaagaaaaaaaaagatagaaagaaagatgcaataattgatgcaaaccttctcgacaaaaacaattattgacgcaaaactttaactattggaatcttatcctgatgatctgcttataaccaatgttattccacttacgtgatatttaagatctagaagttggtttatttatgcataaacatttcaattaactcagtttcatttgtatgtttgtgatgtttatgctgtcttgattctgtcttcctccttttcacgctgtctcaaaggagaaaagtaataaggagatcacgagggagattcaagctataatgagacaagttgcttccagcataacttgcttgccttgtctccatgaaacatgtaagagagagagacattaatcggcttggcggttggataaggtgtgtttgttgtgttgggagcatttactgataccgatgtggctgtaccgttcacctggatcaagagagtggttgaattacattctttgatactagtgtttgttaatcaaatcattatagtgttttctcagtagtataagttcagaaagtttctctggctttgcagattgacaaggtcgaacacactcatttcatacaagaacaataaaagggatgaagaatgactctgataccacacacaaacactcgctcgtctgattgtgaacaatttattcacttctcttatgttctgttcttacaaatgtaacagaccaaaaatctattttgaggtcttcttggtctgtacggtaaatgccagttatgatatttcatatttgagcaagtacatgaaaaaaagaagaaatgtataaagagaatgagatcatatctacaggggactgttttctgatcagataactgttgatagaattggagaagaagttttgtgatctcatttcctcatctcacacctcgatacacagcaccaggttgaagatcatccatgttttctatgttcctaaaaccatcaacttgcaggcttgaccatccctgtcgagccagaaactcgcggtagtcttcttcagtgtagaagattttctcttctgaatggactggtaattggttggattcatcataatggcaaaccctaatggccagtcctgcaagatgggttttgcatactgacaattcagtaaaaaacacacacacagttcaaaagatacgaatagtggcaaatttaatcttaccatcatccagacggagtagatagttccctaagggcatgtctcggtcaagacagcgaataatctgatcttcatcttctaaccaaaaagcccttcgagttcttaacccaaaagcagatctgattacctctttgattgcttctgcactaccatcaacaccgattcttcttgtatagtcaccaaatttcactgttatgaccctaccaccaaaaggctgaccatgactatcatcacctgcttgtataaacatgaaacaaatgaaaagctctactcagttataaagagaccgaacgaataaatcaagcagaggagcagaggctgtgaagcaacctcaaaatgagaaaacgtggattcttacacatattacaccatgcttggaacataaacatacagttcaaaaaacatatctttagccttatagaaaattaaactttgaggcttaagtttatataagctttttctgaggacttgccgtttccaggagtctctctccaattccaaggagtaactccatttgctgcaacagcatcaactgctgtagtgattgcaagaggatgaccatcatgatcaagacgcctttcaaggtttaaggctggcctgccattagctgaaacatagatatatatacacttttcaaacatacacacacacacacacatcctctagaaacaaaactaaaccatctaacacagaaactgcctgtgaattctacggcacagtcatgtttactatttgtttcagtcccaaatgttcacttcactaagcaagttcatacctctactattgctcactcagggagatgttttcgaccaacttaaaagacaacttcaagaggcagtagacaaacaaaagctcgtctctttgtatacatagcaagatactataataaacaaactaatagtgatagataagtaccttcaacggatccaaaagaaatgctcgtatcatcaaaacctacaatgaaagataaaattaccacttagccaaaagaaaattaaaggcacaaaatccacatacgcagattcatttaccaaaactatcatcttctttaaagataactgaaaaaccacaataagaaacctactctaaaatgtagtatcttctcagcctaagatacagataagaattttcccaaatagtagcaacaaaaaccataatcacagttacgttctctgaatccaaatcaagaaatctacaattgatgccaaagtttatacctttatcagtaaattgcataaaggaatcaactttggctgatgtaggtggtgtattagggctcttattatactgtggtggtgtcacttttttgctcctctctctaagaatatcttcaatctctttgtaatacgacatcttcgccgatccatttcctctatcatgatgcttagctttcttaaactctttcaacagattcctccatttatcagtacacatagtcggagatcgatcaaaccctttttctctcatcttagacgaaatctgttcccagagatgtttattagatttggatgtattgaataaaccatccatacctctacggaacatgattaagctacgagtttcgtcttgaacccatgtctccgctcgtttctttggtgctttaacttcgtgatcttctccactgctttctccgaggagaatctgttgttgtggctgagattggtggagatgatgattgtggtgattgtggtggtggtgagattgtagatctactgattcgttggtagtggtgagtacatcgatcatcatatcgcgtgtggtgctggtggtggaggaattgtgatgatcgtctttgtagaaatcagtaggacgagatttgtcggaaatgaacattgctgtgtttcccggacagaatggatacgatgttcctttgttcccaccaccgtcaacacaaaagccccctcagaacaaaatgaaaaaaaaggttttaactttaagttaggttttctctatcttagtctagagatttggttttggataaggataattacaaatttaaagttttggttatataaattggtttgaatgtttttgccatataaactttgtaatgtcaatctgttattgcaaatattagcatgtgatgtttgtatcttgatgcatcaaacttcatcaccttggcatctgatatataacttacatcttgtgtgcatccataagaccaaatgcatcaaagattcgaagggagaaaatgtcaaaaaagaaatgagacactcttctttggaacaaaacaataactaaaaccataaaccgaaattaagtttgtattaaacacaagaaagattgaaccgaaaaaccaaaccaatataaccgattttattacatacattcaaaactatgtcgtataatagtgttacggtcggcaattaaaatctggaattttaaaacattttgaagtgttgtcagcttgaaaattctgtaaaaattactaattcaagtgagggaggagtggacctggcaggccagaccgaacacacacacaaaaaaaaacaatattaaaataaaggggaataaaaaaacaattaaaattaaattaaaatagaattgagaaaaaaaagtttgatcagccatcggaggagaagagagaatgatagataactggatcacgagaagtcacaaatctcaaagaagaagaaagaaaaccaaaatcaagaacaataacaacaattcgcaatgatttgagccaaatctaaagggtacaaattcttaatttcaaagtcaatcaacaacatcgaaggaggtttttttttggaagaagaacttgaatgtgaatttttgtaagctttttttatttcattattcatcgttttttttttcctacttttgacctttgttttgtgcaatcggaggtgttgtaatgtgcgatttctcttgatttttgattttgtgattgcgtttgtttcagaatcagaatcgaaagtttcgatttttatggtttgtagtggtgatttttttctgtttctgagtttcgtgagtgaataaagaagaagaaaaaatggttttgttgtaataaatttggtaaattttgggatttatctccatttcaggttcttgatataactaactttgtgtgtgttttagtatcatatcttcaatatttcaggttcttaatctgtttttcttgtttttttgttctgttattcagatggagttgatgaaattgttcttctagatgtttgttttggggatatgaacaaagaagaatctgagtttaatacactatgtggaaacagattctgagtaagcttcctaagaagtcttcttctaagaaccattcttcttcatctagttccacttcaaaaagtagtgataatggcgccagtaaatcgggtaattctcaaacccagaacgctcctcctgtaaaaccttctgctgattcagggtttaaagaagggaatttgaaaggaaatggtaacggtttcactccatatgaagcattgccaggtttcaaagatgttcctaatgcagagaaacagaacttgtttgtgagaaaactcagcttgtgctgtgttgttttcgatttctcggatccaacgaagaacgttaaggaaaaggatattaagcggcagacattgcttgagcttgtggattatgtagcttctcctaatggaaagtttagtgaaactgtgattcaagaagtggttagaatggtttctgttaacatattcagaaccttgaatcctcaaccgcgcgagaataaagttattgatgcgttagacttggaggaagaagagccttctatggatcctacttggcctcacttgcagcttgtctatgaaattctcctgcggcttattgcttcaccagagacagacaccaagctggctaagaaatacattgaccaatcttttgtctcaaggttacttgatttatttgattcagaggatcctagagaaagagattgtcttaagaccgttctacatcgcatctacggtaaatttatggttcatcgtcctttcataaggaaatccattaataacattttctatcggtttgttttcgagactgagaaacacaatgggattgctgagtttctagagattttgggaagtatcatcaatggatttgctctgccgcttaaagacgagcataaagtgtttttggttagagctttggtacctcttcacaaaccgaaaagcttgcaaatgtatcatcagcaattgtcttattgtatcacacagtttgtggaaaaagattgcaaactcgctgatacggttataaggggactactcaagtcttggcctgtcacaaatagttccaaagaagtcatgtttctaaacgagctagaggaagtattagaagcaactcaaccacctgaattccaacggtgtatggtcccattgtttcgccaagttgctcggtgtttgaacagtctccattttcaggtaattgtattttcctttggtttgctaattctgtgaatcatgaatgatgggaacaattcttacaagattgaaatgcgtgatattttgattgaatccataagaacaaagctttgtgattatttcgaaagcttgaatctttgtataagcaagctcaagaaagaacaaaaaggttgagactttttttattttgttttgcaggttgcagaaagagctttgttcttatggaacaacgatcatatcgagaatctaataatgcagaaccggaaagttattcttccaatcatattccctgcattggagagaaacactcagaagcattggaaccaagctgttcatagcttgacgttgaatgtgcagaagatctttaatgacattgatgcagagttgtttaaggattgtcttgctaagtttagagaagatgaatcaaaagaagctgaaattggcgcaaaacgtgaggcaacgtggaaacggttggaagaaattggtaatcaaaagcaaaagagttcattgtaagatgttttagttgtagagacagaggttttgttctgtattttctcgttttttactacattggaaaattgggtttgtttttcttactctccagaaaaacttagtgagaaaaaagtttcagattcgttttctttgaagagattgcaaatattaaagatcgttgttttctaaagcttgctaatgggttccaaattatacagcagagtaagcaaggttttagttttagatatgagatatggaaataaggaacacctcttccataagaaagatagttttaaattgaagagtatgatcttgtttgttgaaggttcgctagattttgtaatggtttttgtttttgagaaactcattcttaccgattcaagtttttttttttaaagtgattttcctctaaagttgagaggctatagtttttggaagattttaaccattctcaatcatgatcactttggtatttgacagaacaaaaaacaaaacaaaaaactcagtaacaatctaaaacaattcatcatcttatttaatttcttttcttattgcaaaatccaaaaatattcaaaaccccacaacttatagtatagtccaaagtccaaacccaaaacttagagtttaagttgtttttcattctgtttttgtctatatgacaaatcttttgattcatattaatttatcaaataacaattaattcatcaaaagcaaatatgaaaatatatgaaaagaattttatttttattagcgttagaaaaaaaagtttaggccaacatgaaaaattaattgcgttagctacgagattacaactaacatcaccaacatagagttaagtgattattgcattgtcatcacacggtattccttgatagaatggttaacttgaggttaaaagaaactatctttgaggacaaagtaaaatgttaggaaattgcgtggaaatagaacttgcttttaaaatccaaaaactaattaaaactaccacaacttatagtataatcatagcttcaatttagtaaaagtgaaggttggagcttaaacttgaagttaattttgtttgtgtcggtacgtgttctatataaaccacccatatcttttcatttcctcatcgatttcatttgtgaaatcagaaacatggtgaaatcgaagggttgaaaagagttcgagagagacgcaaaactacttgtggctgcagccaaatacaagagagaaaatatttatctcattgcagaggaaatgaatatgactaggggtttgatcgtcaaatattatgtgccttggagcaagtatctccaagcatttgccctaaaaccgaacacctcacatttacaatcaatatgaaaatatatgacgaggattttttcatatacaaaaattatttcttagaatttaagttggaaaaaatctcttctcattctcttatagtcatcttattaattcttcacaaacaatatgaaaatatatgatgagattttttttatgagcgttagcaaaaaaaactttaggccaatatgaaaaattaattgcattagctacgagattacagctaacatcagtaacagagaagtttgatgtcttcaatttgagcctataatttttgctattttcaattatatttttctctggttttacttatgttttgcttactatttgtttatcttttaaatatataaaattattaataaaattaaataaaatcagtaaaaattggtacgtttattttatatacaatttaaggaaaatttaattattttgaataacaattaggttttattatgttatccatattaggaaaaggggatgagaaaggaatagtacatttaaccaattaacttttggcatacagtagattcatatttcatttcaattctaattgaaaacactgaacaattttggcgtaattttagatttcacaatttatggaaagatgtaagataacttccttcttattatcttgttagttttaaagcttgtcaataaggttttcgccatactgtctgattacacaacgattttcaactaattgttttgcaaacatttcagtggtttttgcaaacgaaaaaaactccaaatctttatcagcttattttacacaaatgaaactgaataacaacgatttcaacaacacacaagaaagcttaaaacatacaagaaatctctcatgattcccacttggttctcaacttatcaacatgcttaaactcaaatgtcaacactaaactcttatcctttctcctcaattcaaagctctccaccaacacataacatctataactcttccaattcgaaccgcctccattaaatctctcagatttcttaaccactgctctttgcggttcaatcttccacccgaatctctcctcttcccatttcatcctctccatgaccacagatctcaaacctatcctcttctctgcaaccgcaaaccaaaaaaccccattttcatccaccctttttgtatttttcccaatttcttgtccctcaagcttcacaacttctggttccacttcaacatcaactacaacctcgcggttttcgttgtaagcgttttcacaagagtaaacctcctcccatctttgtagaagaatcatgctgtaataagctgagctcttaagctgatcctttgcatttccttccttcacaaatatgaaagggacataccattttcctaccacaacgcttgtattaaaatcactaggaagctcagaacgaatctcagtgtaaataccttttgcatcatcttttagaccaaagtcctcagatgtcgagtactcagcgttccaatactttctcttaagaaactctggtggtttcccgttaggagcaacagaagtggcagtgtaatagcgagatgatgatcgtttttgatggatctggaattgctgatatatgtcattaggatctgcttcttgtggcttagcttcaggaacatagctgaaacaaaaacagcaggggactctgtcttcctctttcgcattagccgaagcttttctacaacacaacaaatccttgtaaatcacgtcacaaaacaaagaaagttgaaattttgcataattttaagtcataacataccctgagtgtttcccgcctcgtttaatgacatagtaacggtttgaagataagggttgatcaagaacaggaatgaaaacgacaggatctatataagtaatcgtctggttaagaaatatgcggctttcagatacaatcaggttcgcgttctgtgggaaaggtaagcctttgagtgtagcccggtagcaagatccgaagcaacaagttggccttgactcttcatcttgaattataagtacgccggagtttggactttccggcaactccgatctgtttctttggtattccgacaaacgcctcgtaacatacatttttggttataaccggcgaagatatttcagtggtttttgtgattcatatgagttctgattgggtctatatatatgtagactactaggataagacaatttgtaacccaaaaaaaaaaaagagacttttctaagatcttgacttggcttttacggaagtctttttgttatggcagtttctatgtacctcacattgttttgaaattctgtcactcaatttaagtggtccctagaattaaaaagcaagttatcagcaattgattccaagttattaagaagtaatacttacgttgacttgcctacgtcatcaggggtggctctataattttatgggcctttgttgtacagatcttaacaatgggcctctttagaaattctaaacgctatgttatgtacgtatagcctaaaaatcagaagcgttagttggtgctggactagggctttttcttctttgtttcattatcatctccaccttcaaacaaaaaaaatatgaatgcatttgggctcacatattaaatgtaaaatctcacctataaagcccagtctagatagttttcttacaccggcctcttttgctttagacgattcatgttaaacataaaatatgatcattaaagttaaaacaaaaaatgatcattgattaaaaaaaaaacacaagaaaaagtcaaaaactgatcatcaatctacggaaaccatttctgcaattttaacagttatttttctgcttaacaaaaaatttaagaccttgaaggtttaccatatttttgttatggtttatggtttttgttttttaaaaactcatttttacagattaaagattttttaaaagtggtttccctaaacaattgaaagttggataagatctcaatctcactttctcttcaacttagaaacatgtctaaactcgtatgtgaaaacttttaaattcgtatagaatcacaacacgttatcagcaattttcaaggaagattttgtttgttttttgtacaagttaaaattatatataaatggagggtttacaaaagttgttggaattatgattacaacatgtgctaatattgaaaatgataacctaggaaatagttaaaacatttaagaagatcgatcaactaaattgacatttacatgaaattaaatgtgaacttaaagtttagtattacatgaacttgcataaaaacttattcaccaaattgattattgaacaaaaagatggcacacaacgaaactgaaaacagaatgaaaatcaatcccacttgctctttagcttatcaacatgcctaaactcatatgtcaacaccaaactcccatccattctcgtcaattcaaagctctctatcaatacataacatcgataactcttccaatgcgatgaaccgccttcaaatctctctgatctcttaatgttagatctttcgcctgcttcgtttaaccatccaaacctttcctcttcccatttcatcctctctacgaccacagatccaagacctatcttcttgtcgtctttctcatcccttaagacactaaaccaaacaactccatcacctgaatcctctctcaaattagtttcttgtccctcaagcttcaccgattctgtttctacatcaacatcaactacaacctcaaaatgttcattgccaatgttttcgcagaagaaaacttcttcccatctttgttgaagtgtcacgctgtaaaacgtcgatttgttcatctgatcttttacatctccttccatcacaaatatgaaaggaacataccatttccctatctcaatactcttacctaaactagtaagttctgagtctaagcgaagctttgtgttaatcccttttgcatcatctcttagaccaaagtcgtgcgaagtcgagtagctgacccaccaatctttcctcttaaggtaatttggtggtacaccatcagaagcaacagaagtggcagagtaatagcgagatgatgatcggcgttgatggatctcgaattgttggtatatgtcataaggatctgcttcttgtggcttagcgtcaggaatatagctaaagcaaaagcagcttgaaaccctctcctcctctgttgcacttgcagatgctttgctatattcacaaattcacatacctagatagttagtaacaattcctaaatcctaaagaaaacagtgaaaattattgagatgacaagtaaataaattacccagtatgcttcccacgcctttgtaaaacatagtaaaggtttgaagacaatggctgatcaagaacaggaatgaacacaactggagtaagatgtgttgtctggtgttctcctcctccactagtatacgctgcattcagcttcacgttttgtggaaacggcaagcccttaagtctaccctcatagcaagaaccaaagcagcaagtggcctgtgattcttcgtcttgaatcaccattatgccggagtttggaccttccggtggaagcagtttcagctccgatggctttttctggtattccgataaacgccttgtaacatacatctttagtttggttcttgtggtggtgatacttggagaaggagctttggtttcatatttataggcttatatgattaagcaaattctttgaagaatagatttgactttttgatgatagtatctaatcacgttataggaaaatttcttggaaggttgtatcttcatcaagtgtctttatacaatagcataaaaatgcatagaagtctttgtcttttggtttgactttatgcctgaatctataatgcagagtatgtgacaatttattaacttcattaacaagttttttgaccggttttagtcgcattgagtagtcaacggtccaatacttactcttaagaaactatggttgtttcccattatgagcaaaggaggttgcaaagtatctacgaaaactgaagcaaaagaaacaggggactctgttttcctctttggctttagctaatgcttttctgccacgttattacaatttttaatatggctttatccacttttgaagtccaaagttcacctttaagaagaggttcacaaacattatcatatagatttattacataaactttacaaatatgtatgagagcttcaagttctataacactcgaacttgcattaaagctctcattaaaatgaacacaccataaattgcacacataacacacaaagaagctgaaataaactcaatcccacttgctcttcaacttatcaacatgtttaaactcatatgtcaataccaaactcccatcagttctcttcagttcaaaggtctctaccagtacatagcatctataactcttccaatgtggtccaccaccttcaaatttctcagttctcttaatgctagaccttagttcatctttctttgaccatccaaacctctcctcttcccatttcatcctctccaagaccacagacccaagaccaatcttctgagtccctgagacactaaaccacacaactccatctgagttcacaccttttgtctctcttgcaatcttgtctccttcaagcttaaccacttctgtttctacctccacatcaactacaacctcaaaatgtttattgttgccaatgttttcacagaagaaaacctcttcaaatctttgctgaagcgtcatactataatacattgatttattcatctgatcgtttgcatcaccaccttccttaacaaacaagaacggaacataccatttcccaactacaacgctcttatctaaatcaggaagctcatagcgaagctttgcatcaactacaccctttgcatcatcaatcaaaccatattcttcgaaaggcaaggaagcagccacccaaccttttctcgtcaggaactgaggtggtatcccttctgaagcaacagatgtagcaaaaaacttctggtttgatgatcctctttgatggatctcaaattgttggtatatgtcaaaaggatccagaggccttggatcagcatcagggataaaactaaagcaaatgcaacaagaagttttgtccccttctgttgcactaacacatgcttcactggaaatttaaaaggagtaaacattgagagttctagtaaatcctgtatacaacataaacaaaacacacaagagatttaagattctgaacatcaagatagaaaatcacccagtttgtttcccgctttgtcttataacgtagtaaagattggaggaaagtggctgatgaagaacggggatgaaagcgaccgggtcaagatagacaacctctatattgaaaacaaagctcagataagaaacagaaacagagtaaaggaacaagtttgaaagagctctaaggagttaacagaagagtaactaacttcccacttggaatctgacggtgacttttgtgttctgaggaaacggcaaaccatggagtttccaatcaaagcattttccaaagcagcatggagtccgtgattcttcgtcttgaatcaccaatactccggagtttggaccttctgtcggaagcgatgttagctccgatgggtttttctgatattcagacaaacgctttgttacatacatatttcctttgttttctctgttgctcaaactgtcatcgtttatatagaacaaaggatcataattaagaacgtgcaaggaagttaacttcttgtcattttttacatatgtctgagaggaaatggcaagactgctacgtcttcctcctccttcgtcatgattggagtgttgaatcatctcatcttcagccttactattggactagtaatcttttcatactttctaatgtaatgtttaaaaaacaatattttctctatctgttaagtgtatttgtataatgtgaagattcgaggttgaatgaaaccagggaataatatcaagcaatgaattatcaggtacatatttgagtaaagcttaaccatagttgtgggagtatgtatgttacagccattgtacaaaaaacctaaaccaagaaataatttgaccatttcaaaagagtatattatacaaagcttttgactgttgatgatttcaaatgccaattaaaaaaaaaactaaaaatctttatattatttgtattggccaaccttaatatcataaatttgtagttgaggcaataaataaatatgaaattaaatccaattgcttaaatataaacttttaaaaaattatgattggtctgaaaatggacaaaattacgagttgtttattgtcacgttggtgagaaagactatttcgctttatagcattttctgttctccattaaccaaattcttttttttgtttcttcttcgtcctcttggtttcattaaaaccccttaaaaagctttggacagctattgtttataaattaactttgactgaaaaattagtcagaatctcttttggacgagttcctagaagacagagaaaactcaatacatttaattgaaaagctttagataataaccaaatactacaattgtagattaatcacactgagtcactgaccaatggaagttcacgtcattaagataaagaaagcttttgcggattcgttgcgtgaataatagtatcaagattcaagaagtcaacaaatccatcatgaagaatatcaagcaaccaaacttagatttcattactgtattaaaacatgaatttaattaaatgcgactttatgtctattattattacatgaacttgcataaaacttataattcaccaaatttattgaaccaaaagatgacacacaaacaaagatgaataaaactcaatcccacttgctctttagcttatcaacatgcctaaactcatatgtgaacaccaaactcccatccattctcgtcaattcaaagctctctatcaatacataacatcgataactcttccaatgcgatgaaccaccttcaaatctctctgatctcttaatgttagatctttctcctgctttgttcaaccacccaaacctttcctcttcccatttcgtcctctcacgactatagacccaagacctatgatcttgtcttctctctcatccccgacaacactaaaccaaacaaatccacccccacttgtctctctaaaaatggtttcttgtccctcaagcttcaccacttctgcttctacgtcaacatcaagtacaacctctcctccattttcgttgttacaaaacattatcatatagatttattatataaactttacaaatatgtatgagagctttataacacatgaatttgcataaagctctcattaaaacgaacacaccatatattgtacacataacacacaaagaagctgaaataaactcaatcccacttgctcttcaacttatcaacatgtttaaactcatatgtcaataccaaactcccatcagttctcttcaattcaaaggtctctaccaatacatagcatctataactcttccaatatggtccaccgccttcaaatctttcagttctcttaatgctagacctttgttcatagcctttgtttaaccacccaaacctctcctcttcccatttcatcctctctaagacaacagacccaagacctatcttctcattccctgaggcattaaaccacacaactccatctgagttcacaccttgtgtctctcttgcaatcctctctccttcaagcttgaccacttctgtttctacctccacatcaactacaacctcaaaacgtttattgttgccaacgttttcacagaagaaaacctcttcaaatctttgctgaagcgtcatactataatacattgacttatacatctgatcttttgcatcaccttccttaacaaacaagaacggaacataccatttcccaactacaacgctgttatctaaatcaggaagctcatagcgcagctttgcgtcaactatgccttttgcatcatcaatcaaaccatagtcttcgacttcgggggccgagaaaataaccgaccaaccttttctcgtcaggaactgaggtggtatcccatctgaagcaacagatgtagcaaagaacttcttggttgatgatcttccttgatggatctcaaattgttggtttatgtcaaaaggatccagaggccttggaacagcctcagggatataagtaaagcaaaagcaacaagaagctctgtccccttcttttgcactaacacatgcttcactgcaaatttaaaaggagtaaactttaagagttcttgtaaattctatataaaagagtagacgttttgaatgaaaatatatgctataatcatttaagattctaaagacacgtcaaggtagaaaatcaccctgtgtgtttcccgcttccccttataacatagtaaagattggaggaaggtggctgatgaagaacggggatgaacgcgaccgggtcaagatagagagcagctatattgaaaacaaagatcagagaagaaacagaaacagagtaaaagaacaagtttgaaagagatttaaggagttaacagaaaagtaactaacttccgatttggcgtttgacgatgactcttgtgttctgaggaaacggcaaaccattgagttcccaatcaaaggaattgacaaagcagcatttcaatgtaggccgtgattcttcgtcttgaatgaccaatactccggagttcggaccttctgtcggaagcaatgttagctccgatgggtttctcttgtattcagacaaacgctttgtcacatacatctctccttgattctttgttgctcaacatgtcatcgtttatataagagaaaagatcataagaacgtgcaagctattgtttataagtataattgtttctttgaaccaatctgaagtttgacagaatcttctgtggatgagttcttagaagacatagaaaactcaatattttatagaaaagcttaagataataaccaaatactacaattgtacgtagattaatcacactgaccaatggaagttcacgtcattatcattaagaaagcatttgcagattcgttgcgtgataagcttaatcccatttggttttgagcttatcgacgtgtgtaaactcatatgttaagaccaaactctcatccattctcttcaagacaaagcactctaccagaacataacaatgacgattcttcaacaagctaccatctgttgatttctccaatctcttagctaccattgatcgctcattgtcgcctttgccagtccacccgaatctctcttcttcccatttcatcctctcaacaacaactgatcctaaaccaatctttttgtctccaaccgcaaaccagacaaacccatttgcttccacacctcttgaaatctcttgtccatcaaccttaacaacttcagtatctaactctacatcaactaaaacatcatagtttcggcttttatccttctcataagagaaaacttcttcccatctttgttcaagagtcatgctgtagtacatcgatctcttgatctgatcctctacgtctctttccttcacaaatataaaagggacgtaccacttcccaaccacaacactcataccaagaccgggaagctcggtacgaagctctgtgtttagtccttttgcatcatctttcagttcaaagtcttggaaccttgagtattcgactgtccacttatttttcttaaggaaccatggtgagactccgtcaggcgcaacagatgtcgcgtagtagtagcgcgaggatggtttcttttggtggatcatgaattgttgatacatgtcataaggatctagctgttttggtttggcttcaggaacataactagagcaaaagcagcacgggactctgtcttcctctttcccactagcaggcgcttctctgcaaccaaaacaaatttagaaactttttaggttatataagatgaaagatgcaagatttcagatcttcaagattcaaagtcataccctgaatgcttccccactcgtttgatagcgtagtaacagtttgaagatagaggcttattgagaacaggaatgaagacaactgggtcacaagtagcgtcatcttctccagcattgaatctggctgctagcttaagattttgcggcaagggcaaaccacttagatacgagtccacaaccaaacacaagccgaagcaacatggacgtgtctgtgagtgttggtcttgtattaccaaaattccagagtttggaccctcaggaggaggctgtcttagctctgctggatttctctggtactctgacaaacacctcgtaacatacatttccactgatttttgtaagagtaaaccaaatcgagtgatcgtttatatctagactaggagaaaaacttggatcatattttatagactcaacaagttttcagaacacaaggtgacttgacttttttggatggctcgttgtaagaaacttgactggatctccataaagatcttggcctaccctattgtcacctctcatcaagtatctataaaatagtttaaacaaagtctttgcctctctgtatcatgacactactctgcatgcatcatgaagattctgtccacaccttttgcatcagtcaagtattcaacgctccaaccattctaacgcaatcaatttctaaggcaccctcaaaccaaaaaattcacaagtcaagtaactctaccatctcaaacctttaagaaattgagataagagagagcaaaagttacaaaatatagttgtggtagagaagcaacaagaatcctacaagacaagactcaaatcactagaaaaaataatctcactagcggctcaatcaacattgttttttaagacttttccgagatctttgacttagcttttatggaagtcctttttggcagtttttaaattcacatcacattgtttttaaattctatcacgtaacttaagtttttatctactttgagttccaaattatgaccattaacttcataattgttcatttgagcaatctgcagaacagaggttttgtattgaaacagagcccccaaaaaacagaacttgaagcagaatttaagagacatcataaaattaaataaattatggagatatgagaatcaaattggaaaagctctcaatctcactttctcttcaacttataaacatgtctaaactcgtatgtgaagacttttaaattggtagtagaatcaaaacacgttatcagcaactttcaaagaacttgatttatattaaaaaaatggagggccatagttgttggaatgagggttacaagtttacaatattaaaaaaaaaacatttaagaagaatgatcaaataaatgattcataattgaaatttacgtgaatttaaatgcgaacttttttttttttttaattactacatgaaattgcataaaacttattcattaaattaattattgaaccaaaagatgacacacaaagaaactgaacaaagatgaataaaaaactcaatcccacttgctctttaacttatcaacatgcgtaaactcatatgtcaacaccaaactcccatccattctcttcaattcgaagctctctatcaataccaaacatcgataactcttccaatgcgatgacccgccttcaaatctctctgatctcttaatgttagatctttcaccgttgtttaaccatccgaacctttcctcttcccatttcatcctctccacgacaacagacccaagacctatcttcttgtcttgtctctcatcccctaaaacactaaaccaaacaaatccaccaccacttgtctctctagaaatagtttcttgtccctcaagctttaccacttgtgtttctacgtcaacatcaactacaacctctcctcctttttggttgtagttaacgtttacgcatgagtaaacctcttcccatctttgtttaagcgtcatgctgtaataaggtgagctcttaatctgatcttttgcatctctttctttcacaaatatgaaaggaacataccatttccctaccacaacacttgtattcatatcgttgggaagcttggaacgaagcgtagtgttgatcccttttgcatcatctgtcaaaccaaagtcttgggaattcgaatactcaacggtccagtactttctcttaaggaactctggtggtatcccattaggagcaactgaagtggcagtgtaatagcctgatgatggtttacgttgatggacctcgaactgttgatatatatcataaggatctgcttcttgtggcttaacttcaggaacatagctgaagcaaaagcagcaggggactctgtcttcttcctttgcactcgccgaagctcctctgcaatccaaaattagtttttttttaatgaataccatttgtgcaagtcaggtcaaaaggggtggccaatccggtcaaaccgaaaccatcccaagaaaaccaaacccaaaagcaagtatctcgaaccatgcatgacataaattgattaaaacctcaaaaaaacaaaacaaagtcaagaaagtaattaagatttttggccataccctgattgcttcccacgtcgtttaatgacataataacggttcgaataataaggctgatcaagaaccggaatgaacagaacctggtcatggtaactgcgcctgtcattaccagttccggttctgtaagtcacagtcagctttgcgttctgtgggaacggtaagcctttgagttcaccatcgtagcaatttccaaagcaacaagtcggttttgactcttcgtcttgaatcacaagtacgccggagtttggaccttccggcaacgatcgtgtcaagtccgacgagtttctctggtattcggagagatgccttgtaacatacatcttgaattcagaatcttgatcaggttattgattagaagagatatgatatgtttatatattgcaccatgtattgaggataacgcggtaagcaaattttacaagttatcgtttgaagacttttcaaatttttttactttatggttcaattcaaactttagaattccaaagttatgaccttgacctggtttcacaaacctatcatggagaatcaatcaaacaaattctatattttctttatattatgattgacctaactataaggatctgcttcttgtgacttagcttcaggaagaaactgaagcaaaagaaacaggggactctgtcttactctttggcactagctaatgcttttctacaaaataattacaaaacttttgaggtttttttccttttagagtatacaccctttttgtgcaagttagcttcaccacataacacatgaacttgcattaacctttcaataaaatgaacacaccataaattgaacacataacacacaaagaagctgaaataaagtcaatcccacttactcttcaacttatcaacatgtctaaactcatacgtcaataccaaactcccatcagttttcttcagttcaaaggtctctaccagtacatagcatctataactcttccattgtggtccaccgccttcaaatttctcagttctcttaatgctagactttagttcattgcctttcttcgaccacccaaacctctcttcttcccatttcatcctctccaagaccacagacccaatacctatcttctgagtctctgagacaccaaaccagacaactccatctgaattcacaccttttgtctctcttccaatattttctccttcaagcttaaccacttctgtttctacctccacatcaactataacctcgcaatttttattgtcaacgttttcgcagaagaaaacctcttcaaatctttggtgaagtgtcatactataatacatcgatttcttcatctgatctttagcatctccttcctttacaaacaaaaacggaacataccattttccaactactacactcttaccgaaatcgggaagctcatagcgcagctttgcatcaactacaccctttgcatcatcaatcaaaccatagtcttgggaagcagagaaaggaacggtccagccttttctcctcaggaaccgaggtggtattccatctgaagcaacagatgtagcgaaaaacttgcgagttgatgagcctctttgatgtatctcaaattgttggtatatgtcaaaaggatcaagaagccttggcgtagcattagagacataagtaaaacaaaggcaacaagaaactttgtcctcttcttttgcactaacacatgcttctctgcaataccaatcaaagttttaaaagatgtgaatttaggccgctaaactattaatcttggcttaattaaaactaaaacgataaactttgatatctacataacatgagaaagattcaatagaatcataccctgcatgtttccctcttcgccttataacgtagtaaagattggaagaaggaggctggtgaagaacggggatgaacgcgaccgagtcaagcaagacaattctgtcatctccatctatggtgaaatcaaagcttagataataaacagagaagaaacagaaacagagtaaagtaaaatgattgacagaaagttaggagtgaaatgactagtaactaacgtccgatttggtatttaacggtgactcttgtgttctgaggaaacggcaaaccattgagatcacaaccaaagcatttgccaaaacagcatgtaggctgtgattcttcgtcttgaatcaccaatacgccggagtttggaccttccgttggaaggaaagtaagctccgatgggtttctctggtactcggacaaacgctttgttacatacatctctccttgattctttgttactcaagatctaacctgtcatcgtttatataaaacaaaggatcataagaacgtgcaaggaagtttactaagctattgtttataaatataatctgaggtttgacttaaacatttgtcagaatctcctgtggatgagtactaacaagtaagaagacaaacaaactctatattttattctttcttcacccaaaaagattgaagataatatcaaaacacaatacacggaaaaaaccgaattgaaaatggctatagataaatcacactgaccaatggattcatgtcattgagattgagaaagtttttgcagatttggttgcgtgataagcttaatcccatttggttttgagcttatctacatgtgtaaactcatatgttaagaccaaactctcatccattctcttcaagacaaagctctctatcagaacataacaatgataatgcttccaaaggctaccatctgttgatttctccaatctcttaactgtcattgatcgctcattgtcgcctttgcctgtccacccgaatctctcttcttcccatttcatcctctcaacaacaactgatcctaaaccgatctttttgtctccaaccccaaaccagacaaacccatttgcttccagacctctttcaatcatttgtccctcaagcttaacaacttctgtttctacttctacatcaacgacaacatcacggttctcgcttttgtcgttctcatcagaaaaaagctctttccatctttgttcaagagtcatgctgtaatacatcgaattcttgatctgatcctttacctctctttctttcacgaatatgaaagggacataccacttcccaaccacagtgctcataccaagaagaggaagctcagtacgaagctctgtgatgagtccttttgcatcatctctcagttcaaagtcttggaacctcgagtattcaaccgtccactcttttttcctcagaaaccatggtgggaccccgtcaggagcgacagatgttgcgtagtaacaacgcgaggaaggctccttttgatggatcttgaattgttggtacatgtcaaaaggatctaactgttttggtttggcttcaggaacaaaactagagcaaaagcagcaggagactatatcgtcctcttttgcacttccagacgcttccctgcaatgcaaccaaaattttataaactttttcaggttatataagaagaaagattcaagaatttcagatttgcggattaaacttcataccctgaatgcttcccatgccgtttaatagcgtaataacagtttgaagatagaggcttatcaagaacaggaatgaacacaactgggtcacgagtgctgtcatcacctccaatattgaatgtgactgctagcttaagattttggggcaatggcaaaccacttagagaagagtccacaaccaaccacgagccgaagcaagatgtagcccgtgtccgtgagtgttggtcttggattaccaaaattccagaatttggaccctcaggaggaggctgtgttagctctgctggattcctccggtactctgagaaactccttgtgatgtacattgtttcactaaatcgagttttggacttggagaaaaacttgatcctatattatagagtaaacaactctgtagaacagcaactgacaaggtgacttgacttttctggatggctcgttgtaggaaacttcaaagaaacttacttgatctccttaaagatcctagcctaccctaatttcacctctcatcaagtgtctctaaaataagataaacaaagtcttcgcctctctgtatcatgacaccactctgcatcatgaagtattcaacgctccaacaactctgaaagatgacatttttattttcattttaaacagagtttacatcaatgtaaaagcagaagactaaataaaagagagaagctcacaagtcaatattggatagtcctcaacttatcagcatgtctaaactcatatgtcaacaccaaactctcatccattcttttcaattcaaatctctctaccaatacataacatttataactcttccaatgcgatgaaccgccttcgaaccgatccaatctcttaaccgtcactcggtttccgtctaccttcttccacccgaaactctcctcttcactttccatcctctccacaaccactgaccttaaacctatcttcttgtctttaacttggaaccaaacaatccctttagcatccacattcgttgtctctatactaaccttctgtccttcaatgttaatcacttggagttcaagatcaacatcaacaacgacctcaacacaatcttcattgtgaacattctcatagaagaaaacttcttcccatctttgatgaagcgtcatgttgtaatacattgatattttcacttgatctattatgtctccttccttcacaaatatgaaaggaacataccatttccctacaacaacgcttatatcaagaccgggaagcttagaacgaagctctaagttaagaccttttgcgtcatctatgagaccaaagtcttgtagtgtagaagtcgagttttctattgtccagccttgtctcataagaaatgcaggtagtagagcattaggagcaacaggcttcgcaaagtagtaacaacgggaaggcgaagaggttgttgtgatcactacttgttggtgaatgtcataaggatctggttgtggcttcttatacatatgaacatggttaaatctaatgcagaagcagcatgtaactctctccacctctttttcagtactagtagatgattctctgcaaaccaaaatgaatttttttataaattaagactttcaaaacatatttggcatttgaattgttagtcatactaccttgaataatacccgcatcgttcatatgtgtaataacggttagaagatagaggttgaccaagaacaggtatgaacacaaccggatcacgatgaacagtattgttctgtccaccgtcgtcgcgtctaactgtcaacgctgcgttctgtggaaacggtaatcctcttaggaaaatctcgttgcacaaaccaaagcaacaagtggtcaacgattcttcgtcttgaatcacaagtacgccggagtttggaccttccggtggaggcttcttaagttccgacgggtttttccgatactctgataaacgccttgttacatacatgatagtttgttctatgaattgtgtgaacattgttattgcccattttgtaggttccaaaaatatgttgacttttggttggtcaaaactatgcgttgatttttttatttaagtcttcttaactaatgttttaatatgatgttaggaagtaggaactcaatatgtaatttctttagggtttaaaatgcgagacactgatatacagaactctttggtatagtcgtattacaaaaagtcaaaagtcaaccaattcctgaaatgcttgcaaaccaaatccagccagccaattttcgaggtacaagataaggttaaaaaaatgctccttctaaaatcattttcgtagcatttcaagaatagttttcgtatttgcccaatgcataaatccaaaaacaagaacattatacaaagttctacataacttcacctatcctgatcaaacagacaacaatgaataagaagaagaaatacatcaccgatccaactggtccatatcgaccattcgcagtgtcaaaggtttcttttcaagcttctttacgcgtgatcctgtggattagaaaccagagatatgtacattaattcattatgctttcaaaacaagaatttcgatcttctttatctaaattttcacctaaagcagtagattccaagggcctcagtgatctcatggatgactgatgttgcaaagtgcaagtataatgacactgttttgcatcaatacaacattggtttagagcgggcaaaataactgaatagtgaaaaagaaaaatcaacagctaactaaggctttttttctctttaggagcaaacctgtgaatatgcagtagccaagaagaacccataattcgtcgactagaggaaccctgaaatatgaagtttctcagggtgttaaagaaaaaaaagaaccgatgaagtttgtgcggaaaatttaaagaaagaaaacatacccagcattcaatcttgcggttagcgcatttgcaagtgcaaagggaagatagagtagtgactgcattttgagtaaaaagatttcacaaggttacattttcaaaaccagtatccagtaagacggagaaattggcaagaaaaaattatcggatttaccatgcacatgtttgtttttagtcctttaggctcatcacacaagtgagcaagaatcattcttccctgaaaaaggaaaaacatagtaacttttgttctatcacaactttttcgcaataattgtactattgatctaacttaagatttcgaatcaagacataccactaaaaatccaaatgcaagtccagttccgagtacaactaagtgaggatatgttgctatgagattgattggagacaagtaatccctgtaaaaaataggatccaaataaacttcaacaatgaaggagagaataagatcacgtggtcttttcaaaagagaagaaaacaagactttaccatatcaaaactcctccaagtaagacaacgaagggatacagctgaaaacacgatttgaacaaaacattaattttgcagcataattaactatttctgaatcaataactagttaggagattaccatagctaacgctaacaccatgctcccgtttcttgatcgaacgactttgtagacatttgttacactgcaaaatacaaccgtgtgcaaaccagcttagacatacgaacttcacaacttgaaaagactcttagttgatcactcaaaaataacataagattgttcaagtttgatagactcacttgaatgcaacggttggtataacagcaaaagcgatcatcatgtatagcactgctctagaagtttgaatctctaaaacagagaacaatgaatagctcaaaaaacaaactttaaaatgaaatcaagaaagtaacgctgcaagaaaaattggaggaaaagcatgtcggagatctttttaccattcacaaatggcacccaactaaacaatggtattgactgccctaactgctgagcccaccattcagcacctttagacagaaaaaaaaaaagaagaaagatagagttgaagtaaagaccaaacccaagtatagaaagattgtccaagcactttaaatagggtgaagttttcatggattgcagacaagagagaagcataccgacgatggctgtgaagaagtggctgacaaatataagtgcaagcccctctgtaggcccattgataaccggaagaataagtgtgttggtgaaatagctagagaaaggtaaagaaaagtataagaaaatcgctaaaacatttatggatgttttaggtaataaaagcagtacttactgttcccatgtagctccataaaatggaatagctgaaataacccagaaccagaaagtatctcttccacacattgcagtgcttccaaatgccatggcttcaaactgtttttagggtaaaaccttcataatcgactccaagacgagtactgaattaaaaaagaaagattaaaggattgataatagcataccgcacaagcaagcgcgtcacaacctgcaatattggaacacatgtcagaaaaatctagaaacaaactgaaaacagataatcaaaggaggaacatgggaaaaataaatcaccatgatcgaagagctctcctagggggctagaggaatttgtccttcttgcttgcttcccatcaaccgcatcaaatgtctaataaaagctcaaaaggtgtaagataaaaaagacttcaaaacaccttcaccagcacatataacagaaagttaaacttttgaagaaaaagagagacgcaaacctgatacaagaagagaagtaaaccatgtgcgaagtgaacccatcgtggaggaggagaatccaactgaggtgaatatatctgagacagataaagaaaattgtcttcaaaatcaaatccatatgcagaaagcaggcatatttaccaacaagaaagtaaccaaatacttcaagaaactatagaacaagaaatcaaagaatcgaaactcacatagcctagcagggaggaagtgactagaaacataaaccccataagcgttatctgcgaaacaaaaacacaaagccaaaagttactaactcaaacttaaagaagagaccacacatagcacaatagcaaataggaattacttataccatgtttggtctggaatggtccaaagagaaacatgaaaagacaaacagagttaaaaaaacatcagtctgattagcctcagcaagtaaaagttattatacatgcaacgaaacagtatgaaagagataccacacttacggcatccatagagggaagactttgacaaatcgagtccaaaaaggttggaggacgtatttggcaagataagagtgatccactccactgtatttgtacctatgaagagctgctacaccatgagctcctatgtaacccattattgtctatcacactgattcaaacaaaacaacaaaaacaagatatcctcaattctaatcccacaatgacattaaagcatggatcttgagagcacttttcatattccctaatgctaaatcaataaaatgagcataacccgtcaacaaaaaaaaaaaactttgctcgaactgagacagtgactttcgagatttgggtagattctgaaatttagatcttttgctacaaattggatcaagagacgagtacttacgatggtccggtggcggtaaaatcagatacgagcctttctcgtctcgagtgtctgaaagaagaaagagacagtaacctctcacttgcccctatagagagcggcgaaacgggacgagaggaccagaagcaaaaggagagggctttgcgtttcttccgcgttccccacacgtgtgtgttaacgatttttccttttctttgtttttttgattatttcaatttttacaaaccaaccaaatatctttctttctacagccgacaacataataaaattatagttttgagtctaaattgataggacatgtaaataacctactaatttgttagcatcactttccgaatttagaccccataatgcatattacaatttgaattttagttagaatgataatactaacacaccaattcaagtacaagtagtaactcttttttactatctttggtcaactaagttcactcctgcagattcaacagttttgttatctttccacaattatatatttcctccaacagattcaacaccaaaacatgtttagacatgataacagaaagagagagagggagagagatggagaaggggaatcagatttcagtcttgaaggaagaggagctgagctcgaggagagacacgtggatacctgagcaattcgataaccatatccattttcgcatctttatctgataaacttgatgatacagtgactgtctccaaaactggtgaagttcccagcaagaatctgataaattccaattcatatctgatgccagaggcgtctgttatcttcacgctttcaaggcttgggagtttgtagtcgaagtaatctctttcgaaaaggtcaaaaccttcttcttcaagaggaaatggttggactggtgaagcctagaaacagaattacagaagataatgaattggaagaataccgatttatggtcaccttacaaaagagacgagttaacgtaccgaaactttgagctctttaaggttgggagagtgagtgaccaaacgaagaagaactagcacctcatcggcatcttcaaagcatacttggtaaagttctatagttttaagatgtatgtaagtaagtggaagccttcccgggtcatctcctatactcaagtactgagatcaaagaaaagagtttttttcattaacggcaattgctcaaaatatttaggatgaagcaaaattacctttgtgaagtagatataaccgacgagcttctcaagaaggggcacaccaccaaggaacttaacgagattataatccgaactctgctcaaaatcagtaacatcctcatgcatgtacattgaaaccgatattgcaactagcttgggcgtattctcgaggaaaatgtctttgaattcgccgtctagatacaagtacatgagattcggagctgatatactcaaaaccaaactgtcaaagtaagacaaagacaggaactcgagaagcggacatcctgagatcagactttcaataacctcaggagcaacaaggatctggtgaaggtttaaactcttcagatacgaaaaccctttgaaatactgaggcggatcaaactcacaatgacataactccaaacaggtcaatttcaaacagttaaagagacatgcaggaaccctgaattctccttcacctaacttaagaacaagctccttaatcccgttcctcgaaagaaaaagcaaccactgatcaatatctggacgacattgtttgaaagaagtagagagctgaaacttgtggataggtccttggtgaaggagaagcactccagtaatgaatctcacaagattagtctcaacaacacaacggtcattagaaggagaaacacatttctcatcaaagacaagatcagtgagtgtagaccatttatatctccatttgctagataatacacttgttcttattgcatctctaatcgaaagccgagtaaggatattctcaataatgctttgaggtagatcgcttatgaaatctggagattcacccatctaaaaacattttcaacacatgcaaaatcacatcaatgctcattaacatgcaaacagaagataaagttgttgcatttgacttcaaacctagaaaaattgatgaatttcaattcaattcccagaaacccattcaaaaccttagaaccctaatcaccactctaaaaaattacttgaattaaaccacaataagatagacaaaagtttcacctttttatctacgaaagaaagagacagagattgcgatttgcaatgcaacaaaacaaaaactcgaaatttgaattacccagaaagatttgagaaaaagactcaacctttttgtctccttgttccgccggtccgttggagcagtgaccggcttgaacggtggagtttcaaatggggaaatagcagaagatcgcagattttgctctcagcatctgttttactagattttcttacttttgcgattaaagttagcgttttggccaaaagtcaatttcataatctctcgctcacgtgacggttacattatattatattatatagtatttcataacttttctaacaataaaaaattcaacttttttctagcacatacttactttaagatagaagacaatggcaatgtattaggcgtatgagaacatgaatcaacattgatatatatcatgaatggtgagtgatccaaaacaagaaatgaatacaaaatttgttcagactacaattcaatacaactacagtttcatgtctcctgaatcagttatgttccatgagttggtccaatgttagagattgatgagttatatcaacattgatatatatcatgaatggtgagtgatccaaaacaagaaatgaatacaatacaagaagatctggaatttgttcagactacaattcaatacaactacagtttcatgtctcctgaatcagttatgttccatgagttggtccaatgttagagattgatgactcagtctcctccactcttaaacacccattagcgatcagaatcacagagacagagaacaaaagaatctgcgaatatgtaaagagagaacaacgtgcttttacatttctatctacctttgtgatcaaatcagtcttcgtgctcatcttcgccttcagaatctgcgagaaagacacaaacttgaagatctcttctttgatttggatggtgcgaaaaccgatttttattacagtaaaccaaacttacctgatctgacatcttcactaagcttgcctctatcttgtatttgtttcacaagcatccgatacatcaaaacccaccaataaatgtgaagaacaagcaagcaatataggagagtgttaaacatgtagtagtaaattggtccttcgattggatgcttgtctttatcaagctccaaaactacttcatagctgcaacaagcaatgtaatatatgtaaggcgacaaatatttcgagaaaaactatagaaaggatcttaatatattatacaaaccttgtactccataggatccaaaagggatagtaaatgaggcggagaatgatccaagacaaaacgaaaagaatgaacgaaaagcttgcgattctttcagctccactatatttagacattttcccaacctcaagaaacacatcactagcatcgtgaagtgccagaacaacagaaccaacacgggagaagctacagcgataaagagaaaaagaaacaagaagatcaaaacaatgtggacaaaaggaatcagttctgtttttcagtatagaataggatgtgacgatggaagcatacctacatacgtatgagagaacaataagaataagagtggcaatatgatgacccattgaaactccaaaatcagaacgcctcgtttcccagaaaaccagagcaaagatggagtatgtatagaaaccagccacaaacatatacaaaagcttcaactttaacctgcatgagagtagatatatatcatgtagagcaagcacaaaatcgagaattctttatatacaaagtaaggccttgagcaacactcttactttgtttgttgatcaggccaagtctgatctccaggccctacccaaaagtatttagtgttcataaaccaaggctcattgtaagtcacagataaagcaagaatctcagctgatagatagtaaacacacttccaggccgattctttgaatttcctgatcttcttctttctctcggttgtgtcatctcccatatcctgtctatgttttccatagatcaaatattttgccaatttctacaaaaaaaacaatcatcaagtcaaagttagaaagttagtaacttgaccccaaaaaaagaagctttctacaaacccaacttgaaagtaaccaaaggcacacataaatgatgaggaacaaaagagagaactagagctaaacaaatgtcaagtactcactacattgaaaagaatgcaacacaatcaagtgtcaaacaacatcacaagacctacattcattcacacaaactttaacatttgttataaagtataagaaaaggtataaatcattcttcacatttatcaaaaatagatactttcagctacaatcattctccttagtgaaccttttctatacttttagctgaagcaaacaattaaactaaggcattgatgaaacaaaacaatcattttaagtaacttaagcaacacacaagatactatataaatctaacaactttaggagacacactatcacaaaacttcatattacctcgaagacgaatctatcgaggagaaatcgaatcgaagggaagaacacagcgaagagaggaagaactcgaaaatcctgataaaccggagatgattcatgttcccagttgattgatttcaccgattccaacaaacccatctccgtaaaatcctctctttaaaccaaaattctcagagacttttacataaagagatctcctttttctgcaaatcagatgattcaatgtgagggttcaatgcaaattgaagtacttgtactatactccacctcccaaattgattgattcttaccaacccatgaaatctaagattgaatcaaatttgcttcaagtaaagaaaaattgatgttttagttgttttttcttttctttttcaaagatgaataaatcgtaaccttctgaatcatttagagtcttctcttcttcttcgcatcaattttgtcaacgcgttagtaaaagaaaattaatttgttgccttggtttagctggccaataatgtgatttgattcgttctttgacattaattgaaattagaattgcataagaatcaccgtatgaaaaataatgattcgtttactttatgttaattgcaaatataattggataaaaactatatggaagaaaaaaaaacttcgaatatttaaatctcaattaatattagctcattattgtgtttcacactagttaaagcttttgtccacacatgctccatataggagtcggtgattatacaactaaaaccttttcttttcttttcttttttgtttttcctttggctcaacacaacttaacattattaagttactccattaaccaacggcgattgtacttacttgaaccttctctaatactattgtccatgcaggctcgagtcattatgacattaacaatatcaaatacaaataataatagcctatatgtgtcatatagtattttgaaataccgttatatgtaagtaagcttaagtaagttataacttgcaattaaaatatactacaaaatatatcgatgatgtttcgagaaattgaaagtcaccttgaaagaagaagaggtgacgtttccaaggagaaatgaaagcgttgacaccaaagatgccaaagtttgacttcccttcctctctctctttgtgcatcatcgatctttccttgttctctgcatgaaacgcccatttctctatactggcatttatgaatctatccagccgcatctttattagtattataacaaagtcaaaatatctctgaatactttaattatcagtattggctttatatataaaacaacactttatttattcaacgtctcgatcatatcttagagaggagaagaagaagaagaagaaaaataaaagaaatgatgaagacgaaaagtgaagtgttgatctttttcttcactctagtattgcttttaagcatggcttcaagtgttattttaagagaagatggttttgctcctcctaaaccatctcccaccacacatgtaagttcgtcaatatatgtgcatcacatatagcggaattatttttcgataacatgaatacttgttgattactgtgcatcataatagaagttatgcgataacgttttgaaagagtgaaaacatgaataagtggtatgcgatccatcaccattatagctatgtatgtttgataacgatatttggataagaatggttataagttgtaatattggtttcaacatatggtggattggtgattataaaaaaattgaatacagaaattttattgaaagatataaatgaataattttttaacaaaaaaatatatatataaatgaataaattatagtgattcatcatctcactactttttttttcttggtggatctaggagaaagcaagtactaaaggtgacagagatggagtagagtgcaagaattcagacagtgaagaagaatgtcttgtgaagaaaacagtagctgctcacaccgattacatctatacacaagatttaaacctatctccttgaaacaagaactattactctttgtcttttatttagcaaactatatgcataagcctttgaaaggagcttctcgccctcaaactcagctcttcatgttctttgttctttttttcataagcttcgtttaatgtatctcctaagggtgtgacgtaggcagcatggttttagctgggctatagacgaccaagaaactaacccttcgaacaaaaaaacttaattgggcttttgactttggtttaggcccaaatcgaagcttatggtcatcctgtaacgaagtaaacatgcagaaggttaaaacttaaaaggataaagaagaagtaaatattttgctaccaatcgttttctttttcagtttttgctctacatttggttgttactaagccttatttaattttatttttatattaaagtactatatatcaatggttaattttatgatattttaactactctagaggttactaactagtagtaactactaagccttatttaatttttagacatatctatatatatgttatattatatttttctaaattagtctccatttttatatatctgttattaaattttttaactctttttgcagaggcactatcaccaggagcctccacctccctttgtctaatttcatttcaactaccaataccattaccatccaccatttttaaatagtcttatatccaaccattggcaaaaagaattatctaatattgatgattcaacaactaatattgaactattttgatatatttactcggcttgatgcgtaataattttttgcagtttgtttcatggtattgtcactattatcaaacccttttacaacaacaaaaagaaaagtattgtcactattatcagataataaatgaaaccacaacctataagtgtttcaacaacaggcatgcatattgatttgattatacccccaaaaaaatgtacatttaaaattttctattcttgggccagtatcggtccaaatgtacgaacttccacagttagaatattaattatctttatcagtaaaagataacaatacaataatctatctccaacatatgaaagcaaaacaacgtataaaactatgctgaggatactatttggtgaagatagttaattatatttttttcactagtgtgtagtgttttatgatgtacatggatctcttccttctgattttgatgtgtttggattcagaagaatactaattcgtcaggtgaaaaatttgaagaaacgatttctaggtggctttgtcaaactcgaattattagtgatgcattaatggctaaaataaataggtacaaaataaaaagaaggggctaatgattatatggttgattaaaactaaaaagaagaattggtccaccagtgtttagcaatcaatttcatcttaaatctttgtttgccatgaatgttttttttttattttttatgatgcaagtctatttatgcggcgaactgaaattttgggagtaagatttggtattatatcgtcataagaaccgatacatttaatatttttgataatcgaaatttatcattcatttgaattttatgattaaaaactcgacgcctggaaattcagcaacatatactttttttttgataaaaactttcagcaacatattggtacaaacaaatttattggtaactaaggcagactttcttgcaatcttataaaaacacataaagagaagtacggacataaaataaaacaacgaaaacattactttagtattctcttgaaagttacatgtaactgatctaaaatttcatgtcgaccagacttgattaatactaaaaatgatgtcacctggaacacctgttctgccagtgcgaattaattcacatcgatcgtgaaactaatttttttttatctttttggaactgactcaatgttattttgagttttgtaggtttttgattcatacatatttttaggacacttatcgcttgaaaaaggctttaaattgagaacaatatactatttatcgtacgtccatgatcatcactaatattcttaactaactcaagttggctaaaagaaaaaaagatatagaagaacaatattttttctcgatagagaataacattattaatgatattatatcatataatatagtatgatccttaggaaatctacagtcttgacataagcagaacaatgatcaagatcattaacacaactcaaaatctctgccgctttggttcgaatccgatctagagtttgatatcgaatcttcgagctctcttaaaaaactgttgtcgtcttcgttgtgtgactttatctcagagatcagctgtctgagatcagaagtttcctctttaagcttagcgttctcctttaaagcaagctcatggctttcagatacgcggttcagcttatccataagacagtggttatcagtgcgaagtcttatcacttgagaccaaagctcatcgagatgtctctgctttctcattcttgacctacgagcagattccctgttagagatcattctcctttgtttcctctcatcgatgaccatactttgttggtgatcttcgtctgaagttgagttgttgctcgtcattagatcctgaccattggatgatgaagagtagttgttgttgttgatcagaccattgaggtggtagaaggaggaacaagaagtaggagaagagggcatgttgaagtactcagactccatgattggtgtttggttattatatttatctggtggtagatagtggaagtatccagtgagttcggctggaatcgtgttcatgatctttgctttgatttgtttcgtgatatgtcttgtgttgttgaaagatagtttgtgggatgtttttagagctagagagggagggttctgtgtgttgtgtgaagtggttttgaagtaagaggaagagagggctaagggttttatagaggagggaggcaaagttatgtagaaaatggtgttgaatataattcattattttagtaaaaatattagatacataaagattagttcattcagaaagttctaatacgatgatttgtaatactcgatttcgtataaataaatataattaattaatgatggtataaaaaaataatctacttgattatatatacgacaaatatattgtttctaagattattttattttttcttttgtttttttttgtagaaccacaaagttaatattgtttaggtggactaactttatttgggtggattggtggattgatggttttatgagatgtctccaaaattcagccaacttatactttatttgttgcatatgagttgaaaaagttcgctcacgtttcaataactttctagcattttttgtggctgccttctttttgtcacttgagatgaataatcaaattacaaaaacttctttaccagatggaatagtattaaatttatatatatatatatatatatatatatctctaccaattgcatgacatatataaatttaaatggctaaataaaataaaaataaaacgctatttatttatatagaaaacttcgtataacacattttaaatccaatttttaactagaaatagctattgcctccacaattaacagtactattgaaatatataatgctaatatgcataatagctatgattgtcttatgtcatatcaccaaccataaatatttttcgcgtattagataaattactgtataaaccactgtagtaatcatatctctctcttttttctttcttttgtgtttgtgagtaaccgttaattaatcatagccaataaatatatgcatcatacaagacaaatattgccgtaattccttacgtacttaattcacttcaccaagaacaaacactttttctggaaaaaaaattattgggcatggaaaattatattgtttgtgaaaatttcaaggaacgaaaacaaggtggggtttccacttgctgctctaattcaagaagtcttaatttttatgattggcgactaagttgaaatatagattaatttcaagcattgcatctaccatgtgatatctccagtagtaaaaaaaaacataaaatcgaaaaaaaaaatatgactgagaaatgtcaataattacatttttttcattcataattaagtatgatctgtgtagacttgaccgatgagtgttaattgagtgatatggctctaatccacaagactataactactccataccttttcaatgcctatttgtttcctaaatgaactagtaatcattaatcaagtccatttaaaaactaattaattaggtgttttcccactattgatcttaattaataaatcaaacgacatgagataagttttaattgtagataacaagagacgcctaaatccatgtctctctcgctctataattgtatagataaagtggtttttaataattaacatacaacaagtttaaataaaatcatcgtccatgccttcctatactacattgttttcaaatgcagatcgaaaaacgaactagaaaagtttttggtgtggagtcatcgagttagtccggtcagatcatgggctgttacacaattcaagacactaatcatacaataataatatataaagtaatcataagatattttaaatcataattaattaacactaatatagtaatatatactgtaactaaatcttgaatattataaaatcctaactggagaaaaacgtaaatgataaataaatctctaatatttgaagaaaaaaattctaccaaaaggactcgaaaaaagaacaatatatatttcaattaatggaaggaaaccataattaataataataataataataattaaaaaatcagaaataaccatgaatcaacagtctccaaacgctaattatgtattttatccagcttccactccaacagtccaagccttttactatatttgaatgttgaccgctgaaatccttattctattaaaattactaagccattcagcatttagcaatatgattcgtccatcaacataactccaatcacatctacattattcctatcttaaagaaaattttaacaaaatttggtaatcctttccatactattcgcgttctctgtgttagagtgttagtagttattgccagagagaggtctcgattcccaaacatgtttaatctattatgttagttcattgtctaaaataaatttaccaaaaaagagacaaatgggaacacagataagacgtgatttgataaatcagacaagaaaatgtaatgagtgggtccaaacattttgtagtgacgcctcatggccggcgcaccaattcaccgagacacaacttaaacatttacttaacatgctaacttgctttcatagtctatctcacaattgagtttagtttgagttcactgaaaagaacaaaagagtaaacaaagtggtgcaatactttccattgactaattgactttaaaagccctcagcaaactttattttgaccttatctgacgatttagtattcgtttccttaccggtgaatttagtggtaaattgctggtgaatggtaacatgtcgtttacagtttcattctgcacttttacatcagaaactttatttggtcattgatcgattttatctgttgtttgtttttgaatttttaatattgtagtttattctaaaaaaatattttcatatatcgttcacttatttcgatatgttatccataatattcttagcttattaatgtagactatccactttttctttagttatgttcatttgatttggtaatactaactaaaatatatatctctttttggggtcaaaaactatatatcttttccacaaaataattgttcttaaaataagtaatgatttttagaagactatttgactcattttccacaaatggcctacttaatacgaactttaaatttgaaagatgcacatgagaatctgttaatcaaatctgtatagtttataactatctatagaaacacgaaactttgtttaagaaagggtaataaaacttccacaaagttttcatgcattatagaaaagaagtctcatttcgttttgaccaaaaattcctctataaatttgttcgtaacataatcaagaaagtaaaattcggtcgacactgcaagagaaaagttgttttatgtgataggacagcacgataagggactgtgttgagcacgcgtcagcggaaaatttcatgtcttcttttgtagttttctagtttcaaatataaccatataagagcctatgacccctatggtacaatttgattattgaagtgtaccattttgcaaataacatcatgacgactgtctccactttcccccatttcacttcaaagcagctccatatttatatagtttccctataaatatttgattggactaaagaggataagcttgtctcttttttttttccttcattctaaaaccttgtgttgtgtgttgatctagacccatcttcgttgtatgcctcaagtatccctctagaagatgtcactaacccttaaaaaaaaagtaatcgctaaaggtcactatgtttttctctgtttggaaaaagatttgatatcattttcaacagtttcgacccggtcacatctaatcactcatagctatttttttcttcttggtcttcatcgtcatagtttatcaataatcaaatttttagacccaatctcatattgatattgtataatttatataactgtttcagtgttaccatgatatttattacgtaggactacagaaaaaatcgatttttgtcgtcaccagtaacaacacattcatttgtcaacgagttttgatcaccagcctaacatgatcatctaatgattttacccacaaaaatcataataaaactattctttcagtgattaattctgctatagtcctatgctatgcgatgtttctgtaagacacactttcaaaaggacgtaaatatttaacattaaaaagtaaattacatcgtcactattttttctcttataatacaaaactttaactaaaatgtgaaagttaaagcacgggcatacggcacctcatctagttgatgattaatttgtgatcgtaattaattttcttggcttaagcaatcaaaattaaggtagtgatccactcacacttccgccactaattaatttaaccaattaatgaattcatttaatttattgggggctaaacctatcttattaattacgtaaaccattttgccagttctttgctgtctgactgtcgacacgtgtcgttcccagctaatttagttacatttctgaattctgtgagtgacaaatagtcgatccatcaaacacatattttaacattttgtattaattaattaacgatgataacatgtcacagtcaagtcaggtgtgtgttacctaaacctagtattaagatgcctctgtctcatattgttagcaaagacgtgcagtaataccgtaatgtgtctctatccgtccgtatttatataatggaggacttatgaaggcttttacccttttcagatatacattaaaaattctaattgccttttctttaatcatatctccataagatatatataatgtataaaaaacatctccataggttttagtttttttttgttaaaataaaaatactaccaattgataacaaagtttactacaaacactgaattcttactattgaataaataaataaatacagaagtcgacaaaaaaaaaagaataaataaataaatataaatacatctctcatattcaaataaaatatttaggaacaactatagtttttttatacatcttttgtttagccaaatatttagtttagtgattcgtattagtatggctatcttgtcataagctcgacctttttttgttgtcaacatcataacctcgatccatacttagaagttagaaatatgcatgtgtattagaagactattaatgcactaatagttcagtgatttgtatagaatggctaccttgtcataacctcaatttcacacacacacaaataaaacgataaaattagccacaaatttcttcagcttttaaaaatacaactgcagtctaacgatttctgtttttgcataaacgaatagtgtctaactacttacttagttttaaattcaactcgatatgatatctaaaagagagtttgtaaaaaattattgtcggaacacatcttcagctacttactagatttttctttttgtaatttaataagatattatcactttgttttgtaagatttaatcgctaattggagtcggtgtttggcgagaagaggcagtacatagagtgatggaaattgacttgaagaggcagattatccaaaccataacatttcaaaccacaaatttaatatagtaaattaaaacagcaatgaaaaagggtgaacacagaatttaatactacaaaatttcaacgaaggagagccacatattctctgatgagccccttcgcacgaagtagccaactagtaagcgacaaaaaaaaaataaaaatacatttaaaaataagtgatcttggagaaaaacaaatcaagacaaggatttgtgtttatttaaataagataaataaatcattggcacctttgaacctaactgctgcgaactggcgtcagcaaatgtccacatcaaaacgttggaaactccatattgaattggaagatttaattatcatttatattataaggtaaggctatatggttaaaagataaaaagtataaatgataacaatttgggagaaatggattagatccaaaatgctttaatcatcccactatttctagggtttaatccttactgtctctttgtagggtttaatgcatggacttatgcccagacatgttaaaagaaaatacttaaacctctacagggctagctactagataattctattaatattatagatgaaattagtagattacataaccaagctggattggtatataaattgtggtccatgttaacaccttgaattttcgaacccacctcctttcgaaataagagttttagtgggcagtggcatccaaagaatgatctaacaattaaaaatactttaaaaatatatatgctccattatattattccctttgcgaggcaaaccaacttcaccacggtaagagcccgaatcaattctagataatattatgcttaggtcaaatcatgcttctctatttctagatcaagacatacatatccattcatattctatgtttacacatatgtacgaacatatcttgatttattatatattttggatttcgtaaataaataagtaaacaaactttatataatgttctttttccgccaggaaatgaactttttgtgggtttaaaaaaatacttttttggttgttctttacacattcgatatatctaattttagatgtctctctttatttaatccatgagatattgagatatgtggctgatccttttatgttgttttaaattcccttaggctggtaagaattcatagaagccgcatttatatgaagaggggctagtctagaagacggatcaaaaaccaacaagatatcttaacatactgtttgaaaaattaaatggtaggttactcctactttgactcccttacatactaacaagtaagtcaacattcaatttcaaaatcacactgtattaccataatgacggtccaagatagcttttaaacttatgaaacttatgaatgcaattaactaaataaagggtttgattggtaacaaaaagctgtataagttttttagttgtaaagctgttagaatgagctgtacaataaagctgtacaaaaaaattaagagtaaaactttctataatgcttttgatagagtttttgtgattggtaactgtcaaacctgtaaaaagctgtactgctatgataattattgtcattcaaacccaattacttgattcttttgttcttaccaaaattaattttattttttttttaatttttactacaaatagtcaaagtttttgcaataagctttcctctctatatagaggagataatttattcacatcgaaattttattcccattgcaaagacttaattaaaatctatggcgagacttatctttcattttgtatttgctcttatccttgcagcttgtaagaatacgttacacataccatagctttgaatgtgaaatatccattttacccgtctggcaacatttactaaattttttaatcttttggatgcagatttattgtcggtaactgatgcgatacctagaggatggcaagaaccgtgcttttgtccttccaaaaatccttactgcgactgtggcgatgatcttcaagttcctactacttcagtgattagtcctaaacctataattgagcagtgtgcgcgttgcgaaagaaactctcaatgcaacaaagtttgtccggcaacgtgcaaatacaaagtctgtatatttaatcgaacatgtgagttcagtacatgtcattgctatagatgttgattgatgcaacttcggtgaaagtaataaaagaagaaatgtcgagcttacatgcatggcttttacaaatatatggaaatgaatatttctcattatattaaatttgcaacgtatgtgtcacgtattcgatggggtggtgtatgttttaaattctcattaatatgataagccaaaaaagacctttgattgatatagctaggtaagaaatgtggaagactttaaaacaaaaagttggaattaataagataactcttgtccagatcaggtagttgagaacaacagaagctaattagcacaaatgggtgctctgatctctgatgaatcgtaaaatagaggtatgcgtgtgtttagtaatagctgtacgtctgaaactcaaatcagaagtagaggtggtgactaacaaaacaaaaacgtgtacgcccatttttgatattacgtgtatatattacaaaaagagaagccgaaacatatttgactagaagatataccatataacaagatcaacgaagttctaaataagagagaaagagataaatcaagaatttttttttctgttaaagaagagaaatcaagacttaaaagaaaggaagaaaggaagaaaggaaacaaaaatgagcaatgttgcctctgttgccatcatatctttaacttgaattttcgtttttatcaatttaacgtacgtgtaggatttgtgaactaatataatttattgtttgactaatagaatggactgggatatgtgttgaagcatgaaaatgacaactaattaaataagtttgactacatagaggagtttgaaatatatccaaaagattgttttacaatgccaaaactatatattagtacctctgttttagtattaatttcatttaaaacatactttttttttttaaacatacttacctctgttctaaaatgtatttctatgaatcgttttaattataattaatttagagagtttaattattttagtgttgcgtataaagtttgacactttcactgaattaatttcaatttttatatagtatacataaaattttctcactatttttatctctatacatttattagttttcatctttgctcgttttacatattctgatttttaatactaattagttaaaatcatatatttacgataaatgcatattgattttattaatatcaaatgaagtataatagattaaaatatatttattgttagtaatagtaatattcatatacttttgatgcaaatctaaaactttattgtaaacataattttaaatgcttcttttctttgattacttttctaatgttattataatttaaacatcaatgtatgctcattaattaaacctttaatattttaagataaaagttttcgttgatataattattatcttactgttaccaattaaatctatcatattcttgtatttactattttgaaaattattcaatccagttaacttttaaaatttaaaattacatttcttatttatctttactcaaattaattaatttcgaatttaggataaatttaattgtcaatattaagtatactaaaaacacacacaaagtttttagtagttatttttgaaaactttaaatctaatcaaattaactttttccaaatgatatttaataaaaaaatattaaactaattaagaacaatgaatactttagcgtgtataaataccaaaagcccatcatcacaaaccaataaatcatttacatccgctagtttaaattcattagacagagtcattttcaaacttggagacaaatatgaacaattttcgaataaccattgttgcgttcttagccgttcttgtcttcaccacaactggtatttagtttcattatacatcagtgttacgcttagattgttgcccgctttgacaaaaacaacgttttgattaattaactatttttttaatttgtttcgcagttacgaattctttggatgaacctaatatggacactatatccaaatccagagaatacaaatgtaaaattgacctggattgttcaaaccacattgcatgtaggcattgttcttatcgcaattgcaaatgcgatcatggaacctgtaaatgcatgccatgactcttaacccacaaggccacaagccattgatccaactgcatcttcaactcgtcttaatctctcctatatatgtactcttttgtttgtaatgcaaaagaaaataaaacataatattttcagttgataaactactaatgaaatattatacgtcaacgaaatttagtatataaactacaaaacggcaaaaatagctttctcgaaaccaacaaagttaattggacaaacgacaaaaaaactcacaaaagccatagatagatttttcattaaccacgtaaccgacactttcttcttttgggataaatctatttttttttaaaagccatagattcttaggacaccttattttaatgaattatctaaatttaatcggacattacaaacgtaacatatacttacatatgcgttatttaatgaaaacattgacaaaagtaaatcattttaggcaacgaaactttctggaccccagaatgctctatatatatacctattattgtagtcttccaatattattacatcgcaaactaagctatagttattcagacctcaaattctacaaacgaaatcggttaagagctaggagaaaatgagcaatcttcgcctaaccattgcagtgtttttggccgctcttgtcttcactgcgacttagcttgtacttagttttttcttttaatctcaaattgaatttctttattgtttcttatacaagaactgtgttttgaataaacttttttattggcagtttcaaactctgtggtggaagccaaggggaaagaggccacaatcaaattttcatgcaaaaagaattcggactgttttacaaacattgcttgttatgctttgtactgattaccgatgtgataaaggattatgtaaatgccatggttttggtggagaaaaggaaaatcccacagctgcgccattaactgcttaatttctccatttcttttttaaatttatcttttgttttcttgtaatgcaaatggataattaaaaagatttcagatcaaattatatcctattaattattttaaatcattatattttatctcatctctgcttgatccttttacataaaaatataataatcacatcatccatattttttttctgcatttgtacgtgttaaaaactgccactagtgattaaatccggaagttaatttcaggcaaagttaatttagttttttccaccaattttttaattattaaattgtgtttggttatatgaataatactaggaaaaagtatgagatatttttgcccttaataagtgtcttttttaaaaaaacagcttattaattaatgacatttaatgtaaatcttaacacgtccataactatttacttaaaaatgttcctcaataagtagtattagatattagcagtcaacttttcacaaaaaaaaaaaaaaaaaaagatattattagtcaacaaaataaaagatttgtttagtcaaaaacaaaactccatattattagtcaacaaaaattatgatattttcatttatgtttactattaatgtatacagatttatagttccaaacattaaaaaacagataaaaaccactctctacttaaccatcatgcccctatatatatatgttttgttctgtcttttgtgtatactatacactaatttcattacaaaccaaactaaaataatatacatcgttcatttcatattcaacagaaggaatcggttttaaaactcaaagagaaaaatgaacaaccttcgcgtaattatgtcagtgttattggccgttcttgtcttcacagcgactggtaattagtttctttacctttaacgcaatgatcggccgctctaaacaattaacagtgttttaattgaattgttctctttcttcttctcgcagtttcagagtctgcagaggaaatggggaagggtgaggtcacaatctcacttagatgcaaaacgaaaacagaatgcttaaagaacattgcctgtgaagcttgtgtcgattgtcgatgcgataaaggaatttgtaaatgccatggtttcacagcagaaaccaacaatccaaccgtttaactcatatttctcctaaatgttttctttcttttttaatataaaatgtaaaagaaaataaatcgcaaagttcaattaatacaccaatgaaaactatttatcattatcaatcatttgttatatgattatatatggaatgacgacgtgtgttaagattgagatctcaaattccacccacaaaaactatggaaacagaaaaaaattaaaagcacacgaaccaatgtgagatttacgtcatcttttcgtctttgcataataatgtgaaggagagaaagagaattgcaatggccattagcttgtaaactggatgagaagaagccattttgtttctttgttttgatttagtgtgcatttagtaaggttatagggtttctttatatagaaggagtagattgcaacaaaagcatcctcagtgagtggcgtagacttggaatttccaaacttgtgtctggcttgtgttgtttacgccgtacacacacttctttaacattagctcactcaaaaccactttgtgatgtgtgtaaatgtggtgctgatgtggcggcgctgactgtaaaataccaaatatacttttttgtcatgcacaacaggtttttgttttttccctcatattttctcaattaacaatttttaaaaaatctagaaattcacactagttaaattaaatatcgtcgatgagaattaatcagtcaacaaaaaactaatcattttatttggataactaaatcgtatcaaatgggaacatatgtttacaaccttttagaaagaaaaatgaagatatgttgatacaaaagatgtttctcttttccaaataatctaacaaacgaatcagaagaaaaaaaaacaatattgtgacaacaatcatcaaacctctgcaactgcattcttcacacaatcaacattacacaaccgaactgatctcaccatttcacccaacctagaaccaaagatttagatagtaagatcccatgtacaacatatgtgatacatatcaacttcaaataacgaaacaaaaattctataattgaattatttgatcataaactgttaagtactaacctgtcgaagctattcctagcccgatcagagctacccacgctgtttctcggcttcccaaaccgatgatcgatacttatctttcttgatttgtctctaggaggaacacattctatgctatgtctagatccaatccagctactcttcgttgatttgtcgttcttgtggtcattagccaatgattggcgtcgaaattttggaactggaagcttctcaatggctgaaatgaactttcttaagtgaggtaagtactcaggagacatctcaatatcagaatggcctcttcctttaagccataagggttcgtatttttctttgcatagtccccataaatgttttccatgtgaaatattcaccacatcgtcatctgttccctgcaatgcacgcaaagagaattataccaagttgttactataatatcgtataaatataataagaatgagtatatctatattgcaatgaaatatacttacatgaattacaagaacaggacactccacgagatgaattttgtcaatattctgcaataagaaaactctgattagttttgcctaaacaatgtgattatgcttagtttggggtatttagtaaaatcaaggaagatatataagaacaaccgaaccttgtaaatgtcgaacgggaaggagtgcttgacagggtacataacacgtagaccagacaagaaaggactatggagaacaagtgctcggagacgtggaagacgagaagcaagctcaagcgacggtccacttccaacggattgtccatacaaaatgatacgttcatcttttgtaccgtaggtctgtcttagccaattgtaagctgcttctatgtctgcgtacgtatcttgctcgcttggctttcaaaattacgatccaaatcacacacaaatcatacactcaacaatgaatgtgatcttcttaattacaatatggagctgatagtatttttctttttgcattttgtggtttatatatgatacacgaatgtatataaaatggacgtgctaattagtcccaaaagaaaagaataaaaaagaagaagaaaacaagcgtgatttgaaataatcgacttaccttaccagaagattgcccatatcctgaataatcgtatctgcaattatcatcacacaaaaccatatattatttatctaaaaagaaaataatatttaaatgaaattctgtgtcttgcatttaaaaaaaaaaagagaaacagcgagctaagaaatttgaagaaatgatctgacttttgggattgaaaatgaatttggaatcctatgctaaaccgtaacctaatcttgtctcattctcaaaagaagactctagaaacaaaaactatcccttaagaaggtcacaataaaacttaagacaattaatatgtatgaactaccgttagtatccaaaaaaaaaaaaaaagacaagtgatcaatttaatacagttcatgcgtacgtatatacaaactaaccccatgagattgacattgagttgaattagttccgctaagatgtagaaaatctgagcaagatcggaagcgttgccatgagaaaacaaaacagtgagtttagcggttggattcttcacatacatggccacaatctcattccctctttttgtccttatcttcaccacttcgatgttctcatctcttaggtaatgcggcaggttcgtagaaatcatcatcttccccgtagattcttcagtcaccaccgtgtacgacggcggatttggtgggaagaatgctaacttcgccgccatagtcgacgtcgcaattcccatttcactcaagaaacttttcttttcttttatttttttgttgagaagacaagaatgacttatgcaatactgatggatgctataagctgttgatattgtttattatttcttcataatatggttagaaatggatgctaagatttcccttttaaatgctctttctttctttatatatatagtatccatctaaatatatatgtatggctaagattaaggcttaacataatatattaatttccttaactgtggaaattgtttctccttcattccttaacatcaatgtctcaaatttttattattaatttgaagcgatataacaatatgtatataacctacataatcacgtttcaaagtcgaataacccaaacattgtgtcaagaatcgtaaaaaatatcaaataagtgtgttacttatattagtataaaagacatagatgattgaggatacacacgcccacatactgatcatggttctagtcttccagatgctacttgcattatagaaataaacaaatgattaattaatgaaagaatatttaattgaatctaataaaggaaaaaatgttgtgtagtggataattaatagctgtaaattaatctgtaatctattcgtttggagggacagaaagtttactctcatcattacttaagaaaaatttcacatcaatttttgaaaaagtttatttttcttttggaattacacgagcaatacccttttggggttaaccacatataaattcaaattttgctttgcaacgacctcataagtccctataattgggcctctatgcattcgtaaagcccattataagccatataaatttaagcgaattcatgaaaattcatcaggtttaaaattcataagatttacatgatatatagttcatgcaaataagaaaatatttatgaaattcatcaggtttaatgaaaatcacttgcacgactaatttgttaatacgcagataaatgtcttacataaaatggttgatgatttcagacttcaaatttgttgtagtataaaagaaaaatatatgttaggtaatgtaaatgtgcaaggattgtcagtcttttttagcagtttcacaaataataatttcatcgtataactccagatgatacagtaatggtactaatacaatattttattattttatgttatgaagtatgaactctgatcgggtaaagcaattaggtacttaaaatttggtgcaatgtgggagaaatagcatacacaattttgatactaacaaagatacacaaattccaattatggaagctgttagctatatagagttatagaccatagagtggctgaggtagaagattcaagggggtccattgacccttgcaaaaatcagaaaaagaataaaaaaaatatgcttattgacatcttagttattagagaaaaattgacccatggaaaagtaatatctacctccgccacgtccataggttatattccacacccactgactcatcatccattaactaactaatacataactcatatttgaccgacttccttcgtctgccattttttttgttcgttatagattcgagtaaaatttgttgatttcttttgtcaactaaaatttgtgaatcttatacggtttaaaagatctaagagggcaacttgaaagtcataaataaatattgtttaaatctactcatgttttcacttgacttataaagaaatttttaatgatggaactagttttacttttattgttctcgagtatgagaaaagtggtaatagagtaagagacaaacacaaaacacgcacatctgtaaattgcattgtacgttatgtttcttctccttattcgatgtttaatttctaggctattccaaacgttcttgcttttttcagtatcctactttgtgtagttatgagaataatagtttgaaatcactacattcgcctttttcttaattactttccactttccgagaatttaaaagaaaaaaaaggatgttcttgaatgttacatcgtactattgacttagcaagcaccttattatttattctatttggtcaacaagttgtttttctttaaaaatgttatgaaaggtgccttataagttgatgttctaagttcgaccaaattttttttaataagatagtattataagcttattgcgaaacatcaaatataattacatttcaagactatgaaatatttcatttacttaattcagttatttttagtaactagttggattggctcagtttctttatgggtgtgaacttggatctcatgttgtaattcacagtttcttacattgttcggggattttaacgcatgtcccaatgtctatgcatgacaggttcccaataaagacacatggcttatggtaagataaaaatagattagatttgaaattctcttgggggtttttctttcttagatctcctatataaacactagttaaccttcttctaatcttcatcattcttgcgtaatttgatctcacaactcattttgagaacatttttcgtagctaagagaagaaaataagacatgaccaatatcacttcaagctttctgtgtttgttgatccttcttttgttttgcctctcttttggatattctcttcatggtttatctctttcctttatttcccttttccctattattaaatcataaaactttcaaatgtcatcaacattcgtaataattgactcacagtttataaatatacgttaaaaactttcatgggaatcaatcttattaaaagctatttcttcttctttttcgatttgcatgaaatatataaagttgcatgcatggtttataataaaatgcagttaataaatttttgtcctattttttcatcaggtgataaggatgaagtgctaagtgttgacgtcggttcaaatgcaaaggtagtgaataaatactcttattttttcttgagtagtgattacttatgtaatcaatttccacatcattcacaactgcgaatttcacatagcggttgcattcagtttgaaatttcgacatgcatgtatataatctaaagaggttgatgataaccatgtaaagcaggttatgaagcatcttgatggtgatgatgcaatgaagaaggcgcaagtacgaggaagaagtggacaagagtttagcaaggaaacgacaaagatgatgatgaagaagacaacaaagaaagagacaaatgttgaggaagaggatgatctcgttgcctacactgctgattactggaaaccaaggcaccatcctcccaaaaacaactgatcacatctatcatatttatatagagactcaacaaaatgctcctcattattatcatatcaatataagatatatatcaaaatacatatagtatatggagtattgtgagctttgtgtttgtaaaatcgatcgttcaaattatatatatgaaaaagtggtatgtataaccaaattgtgttgtctcagttataaaaagtggtatgtataattaccaagctgtgttgtctcaatgttatccttctcttaagttaattatgtgctgatcttacattagtgttgggaataggtacaaaagaatgtttcagacagacaagatatgctctggaatgagtaagaacaacaaactatcaagaagttacagtaaaaaatctggcgatatctggtcgaaaaatggaaaagctttttggttacaaaaatggattatgtatttcacccgtcttggtttgtagttgaatgagcccagaatcctaggatccctcacgcaaagctgaacttaccattttgtccacttccgtcaaatactcttatttacgaccaagcaggttataactggagttgttgtcactggccggacccttttgattcccccgtccgtttttgaccaagctgtgacttcatcttcagaagaacctgaagaaagtaaattcagtcttagactcaagcagcaaaacgacctagacacttgagagggtttgggttgaggaaactaaaaacttgacagaagtaaaagtcccttgttccatatttccaatctaaccaaaaggcctcatacgttcacattatcgagttcaaaggttagtatgaaaatggtaaagaaacatcacttaccgcaattcgtcaaagtcgtcaatgtgatacaactgttgcccgatgataccatccagtagctaagattaatctgttaactgaatcactgagaaagacaataaagcatcagataaatccattacgtaacttatttagtttctttatgcagtaaaagtatactaataacagttacctcatgagacagtttctctactgaaagtgtgtgccttctgcagttagcagataagatgggacaatagacaaaacttctctcattactaatcaggcaacaaaccccatttgattgtccaggaaagcaattcatctgacttgatcatcacttcacaaatgtctaagtcaggcgaaataccctgggataacattagacagaagaagaatttgctctcgtttaccaaatgtctcctacacaaacggttgatcaccgcgctatagtccctaatggaaacattgaatcctctgtgcagcagttgatgaaatagcttcactgccatttcagggtcaccctttacacaatgtgccttgatcagtgtggtataagcaaatttggacaaactaacattctgctcctggagcgaatagataaaactgtcagctttccttatgtaaccgtagacacaaaggctgtcgattagaatattataagtagcagatgaagcatcaagatttcgagatttcattatttcgagaaacacaaatgctccagataaatgtttaactctgcatagatactgaataattgtattatatgtgatctgatctggaggtataccttcagattccatgtccctgagtccctgcttgcatttttcgaatatcctttccctgagtacatggttgcaattttcatgtttccagcctctgcaaagtcctttaaaaatcactgagtacgtgacattggttggtgggattccttctgctttcatttccctgcgcaattcatctatgcttttggtatttccacaatttgcatatgcatccatcagagttgtataactcacaacacttggagccaatccatataacttgatgacatctaagatttttctagcctcagctatattctgggttttgcaatacccgtatatcaaagaattaaaagttgcaacgctaggagttatcccagtctcaatgactactttgaataactctaacgcctcctcaatgcaaccagactttgcatacccgtcaattacgatattgtacagaacaatatccagtgtctctccacttgaaatcagagaatccaaaagcgatcttgcctcaagtaacatccctttctgacataaaccgagcaaaagagcaccatgagtcctcgaattcggaagaattc

SEQ ID NO: 1120 - DNA, 79054 bp, Arabidopsis thaliana
gaattctttatatacaaagtaaggccttgagcaacactcttactttgtttgttgatcaggccaagtctgatctccaggccctacccaaaagtatttagtgttcataaaccaaggctcattgtaagtcacagataaagcaagaatctcagctgatagatagtaaacacacttccaggccgattctttgaatttcctgatcttcttctttctctcggttgtgtcatctcccatatcctgtctatgttttccatagatcaaatattttgccaatttctacaaaaaaaacaatcatcaagtcaaagttagaaagttagtaacttgaccccaaaaaaagaagctttctacaaacccaacttgaaagtaaccaaaggcacacataaatgatgaggaacaaaagagagaactagagctaaacaaatgtcaagtactcactacattgaaaagaatgcaacacaatcaagtgtcaaacaacatcacaagacctacattcattcacacaaactttaacatttgttataaagtataagaaaaggtataaatcattcttcacatttatcaaaaatagatactttcagctacaatcattctccttagtgaaccttttctatacttttagctgaagcaaacaattaaactaaggcattgatgaaacaaaacaatcattttaagtaacttaagcaacacacaagatactatataaatctaacaactttaggagacacactatcacaaaacttcatattacctcgaagacgaatctatcgaggagaaatcgaatcgaagggaagaacacagcgaagagaggaagaactcgaaaatcctgataaaccggagatgattcatgttcccagttgattgatttcaccgattccaacaaacccatctccgtaaaatcctctctttaaaccaaaattctcagagacttttacataaagagatctcctttttctgcaaatcagatgattcaatgtgagggttcaatgcaaattgaagtacttgtactatactccacctcccaaattgattgattcttaccaacccatgaaatctaagattgaatcaaatttgcttcaagtaaagaaaaattgatgttttagttgttttttcttttctttttcaaagatgaataaatcgtaaccttctgaatcatttagagtcttctcttcttcttcgcatcaattttgtcaacgcgttagtaaaagaaaattaatttgttgccttggtttagctggccaataatgtgatttgattcgttctttgacattaattgaaattagaattgcataagaatcaccgtatgaaaaataatgattcgtttactttatgttaattgcaaatataattggataaaaactatatggaagaaaaaaaaacttcgaatatttaaatctcaattaatattagctcattattgtgtttcacactagttaaagcttttgtccacacatgctccatataggagtcggtgattatacaactaaaaccttttcttttcttttcttttttgtttttcctttggctcaacacaacttaacattattaagttactccattaaccaacggcgattgtacttacttgaaccttctctaatactattgtccatgcaggctcgagtcattatgacattaacaatatcaaatacaaataataatagcctatatgtgtcatatagtattttgaaataccgttatatgtaagtaagcttaagtaagttataacttgcaattaaaatatactacaaaatatatcgatgatgtttcgagaaattgaaagtcaccttgaaagaagaagaggtgacgtttccaaggagaaatgaaagcgttgacaccaaagatgccaaagtttgacttcccttcctctctctctttgtgcatcatcgatctttccttgttctctgcatgaaacgcccatttctctatactggcatttatgaatctatccagccgcatctttattagtattataacaaagtcaaaatatctctgaatactttaattatcagtattggctttatatataaaacaacactttatttattcaacgtctcgatcatatcttagagaggagaagaagaagaagaagaaaaataaaagaaatgatgaagacgaaaagtgaagtgttgatctttttcttcactctagtattgcttttaagcatggcttcaagtgttattttaagagaagatggttttgctcctcctaaaccatctcccaccacacatgtaagttcgtcaatatatgtgcatcacatatagcggaattatttttcgataacatgaatacttgttgattactgtgcatcataatagaagttatgcgataacgttttgaaagagtgaaaacatgaataagtggtatgcgatccatcaccattatagctatgtatgtttgataacgatatttggataagaatggttataagttgtaatattggtttcaacatatggtggattggtgattataaaaaaattgaatacagaaattttattgaaagatataaatgaataattttttaacaaaaaaatatatatataaatgaataaattatagtgattcatcatctcactactttttttttcttggtggatctaggagaaagcaagtactaaaggtgacagagatggagtagagtgcaagaattcagacagtgaagaagaatgtcttgtgaagaaaacagtagctgctcacaccgattacatctatacacaagatttaaacctatctccttgaaacaagaactattactctttgtcttttatttagcaaactatatgcataagcctttgaaaggagcttctcgccctcaaactcagctcttcatgttctttgttctttttttcataagcttcgtttaatgtatctcctaagggtgtgacgtaggcagcatggttttagctgggctatagacgaccaagaaactaacccttcgaacaaaaaaacttaattgggcttttgactttggtttaggcccaaatcgaagcttatggtcatcctgtaacgaagtaaacatgcagaaggttaaaacttaaaaggataaagaagaagtaaatattttgctaccaatcgttttctttttcagtttttgctctacatttggttgttactaagccttatttaattttatttttatattaaagtactatatatcaatggttaattttatgatattttaactactctagaggttactaactagtagtaactactaagccttatttaatttttagacatatctatatatatgttatattatatttttctaaattagtctccatttttatatatctgttattaaattttttaactctttttgcagaggcactatcaccaggagcctccacctccctttgtctaatttcatttcaactaccaataccattaccatccaccatttttaaatagtcttatatccaaccattggcaaaaagaattatctaatattgatgattcaacaactaatattgaactattttgatatatttactcggcttgatgcgtaataattttttgcagtttgtttcatggtattgtcactattatcaaacccttttacaacaacaaaaagaaaagtattgtcactattatcagataataaatgaaaccacaacctataagtgtttcaacaacaggcatgcatattgatttgattatacccccaaaaaaatgtacatttaaaattttctattcttgggccagtatcggtccaaatgtacgaacttccacagttagaatattaattatctttatcagtaaaagataacaatacaataatctatctccaacatatgaaagcaaaacaacgtataaaactatgctgaggatactatttggtgaagatagttaattatatttttttcactagtgtgtagtgttttatgatgtacatggatctcttccttctgattttgatgtgtttggattcagaagaatactaattcgtcaggtgaaaaatttgaagaaacgatttctaggtggctttgtcaaactcgaattattagtgatgcattaatggctaaaataaataggtacaaaataaaaagaaggggctaatgattatatggttgattaaaactaaaaagaagaattggtccaccagtgtttagcaatcaatttcatcttaaatctttgtttgccatgaatgttttttttttattttttatgatgcaagtctatttatgcggcgaactgaaattttgggagtaagatttggtattatatcgtcataagaaccgatacatttaatatttttgataatcgaaatttatcattcatttgaattttatgattaaaaactcgacgcctggaaattcagcaacatatactttttttttgataaaaactttcagcaacatattggtacaaacaaatttattggtaactaaggcagactttcttgcaatcttataaaaacacataaagagaagtacggacataaaataaaacaacgaaaacattactttagtattctcttgaaagttacatgtaactgatctaaaatttcatgtcgaccagacttgattaatactaaaaatgatgtcacctggaacacctgttctgccagtgcgaattaattcacatcgatcgtgaaactaatttttttttatctttttggaactgactcaatgttattttgagttttgtaggtttttgattcatacatatttttaggacacttatcgcttgaaaaaggctttaaattgagaacaatatactatttatcgtacgtccatgatcatcactaatattcttaactaactcaagttggctaaaagaaaaaaagatatagaagaacaatattttttctcgatagagaataacattattaatgatattatatcatataatatagtatgatccttaggaaatctacagtcttgacataagcagaacaatgatcaagatcattaacacaactcaaaatctctgccgctttggttcgaatccgatctagagtttgatatcgaatcttcgagctctcttaaaaaactgttgtcgtcttcgttgtgtgactttatctcagagatcagctgtctgagatcagaagtttcctctttaagcttagcgttctcctttaaagcaagctcatggctttcagatacgcggttcagcttatccataagacagtggttatcagtgcgaagtcttatcacttgagaccaaagctcatcgagatgtctctgctttctcattcttgacctacgagcagattccctgttagagatcattctcctttgtttcctctcatcgatgaccatactttgttggtgatcttcgtctgaagttgagttgttgctcgtcattagatcctgaccattggatgatgaagagtagttgttgttgttgatcagaccattgaggtggtagaaggaggaacaagaagtaggagaagagggcatgttgaagtactcagactccatgattggtgtttggttattatatttatctggtggtagatagtggaagtatccagtgagttcggctggaatcgtgttcatgatctttgctttgatttgtttcgtgatatgtcttgtgttgttgaaagatagtttgtgggatgtttttagagctagagagggagggttctgtgtgttgtgtgaagtggttttgaagtaagaggaagagagggctaagggttttatagaggagggaggcaaagttatgtagaaaatggtgttgaatataattcattattttagtaaaaatattagatacataaagattagttcattcagaaagttctaatacgatgatttgtaatactcgatttcgtataaataaatataattaattaatgatggtataaaaaaataatctacttgattatatatacgacaaatatattgtttctaagattattttattttttcttttgtttttttttgtagaaccacaaagttaatattgtttaggtggactaactttatttgggtggattggtggattgatggttttatgagatgtctccaaaattcagccaacttatactttatttgttgcatatgagttgaaaaagttcgctcacgtttcaataactttctagcattttttgtggctgccttctttttgtcacttgagatgaataatcaaattacaaaaacttctttaccagatggaatagtattaaatttatatatatatatatatatatatatatctctaccaattgcatgacatatataaatttaaatggctaaataaaataaaaataaaacgctatttatttatatagaaaacttcgtataacacattttaaatccaatttttaactagaaatagctattgcctccacaattaacagtactattgaaatatataatgctaatatgcataatagctatgattgtcttatgtcatatcaccaaccataaatatttttcgcgtattagataaattactgtataaaccactgtagtaatcatatctctctcttttttctttcttttgtgtttgtgagtaaccgttaattaatcatagccaataaatatatgcatcatacaagacaaatattgccgtaattccttacgtacttaattcacttcaccaagaacaaacactttttctggaaaaaaaattattgggcatggaaaattatattgtttgtgaaaatttcaaggaacgaaaacaaggtggggtttccacttgctgctctaattcaagaagtcttaatttttatgattggcgactaagttgaaatatagattaatttcaagcattgcatctaccatgtgatatctccagtagtaaaaaaaaacataaaatcgaaaaaaaaaatatgactgagaaatgtcaataattacatttttttcattcataattaagtatgatctgtgtagacttgaccgatgagtgttaattgagtgatatggctctaatccacaagactataactactccataccttttcaatgcctatttgtttcctaaatgaactagtaatcattaatcaagtccatttaaaaactaattaattaggtgttttcccactattgatcttaattaataaatcaaacgacatgagataagttttaattgtagataacaagagacgcctaaatccatgtctctctcgctctataattgtatagataaagtggtttttaataattaacatacaacaagtttaaataaaatcatcgtccatgccttcctatactacattgttttcaaatgcagatcgaaaaacgaactagaaaagtttttggtgtggagtcatcgagttagtccggtcagatcatgggctgttacacaattcaagacactaatcatacaataataatatataaagtaatcataagatattttaaatcataattaattaacactaatatagtaatatatactgtaactaaatcttgaatattataaaatcctaactggagaaaaacgtaaatgataaataaatctctaatatttgaagaaaaaaattctaccaaaaggactcgaaaaaagaacaatatatatttcaattaatggaaggaaaccataattaataataataataataataattaaaaaatcagaaataaccatgaatcaacagtctccaaacgctaattatgtattttatccagcttccactccaacagtccaagccttttactatatttgaatgttgaccgctgaaatccttattctattaaaattactaagccattcagcatttagcaatatgattcgtccatcaacataactccaatcacatctacattattcctatcttaaagaaaattttaacaaaatttggtaatcctttccatactattcgcgttctctgtgttagagtgttagtagttattgccagagagaggtctcgattcccaaacatgtttaatctattatgttagttcattgtctaaaataaatttaccaaaaaagagacaaatgggaacacagataagacgtgatttgataaatcagacaagaaaatgtaatgagtgggtccaaacattttgtagtgacgcctcatggccggcgcaccaattcaccgagacacaacttaaacatttacttaacatgctaacttgctttcatagtctatctcacaattgagtttagtttgagttcactgaaaagaacaaaagagtaaacaaagtggtgcaatactttccattgactaattgactttaaaagccctcagcaaactttattttgaccttatctgacgatttagtattcgtttccttaccggtgaatttagtggtaaattgctggtgaatggtaacatgtcgtttacagtttcattctgcacttttacatcagaaactttatttggtcattgatcgattttatctgttgtttgtttttgaatttttaatattgtagtttattctaaaaaaatattttcatatatcgttcacttatttcgatatgttatccataatattcttagcttattaatgtagactatccactttttctttagttatgttcatttgatttggtaatactaactaaaatatatatctctttttggggtcaaaaactatatatcttttccacaaaataattgttcttaaaataagtaatgatttttagaagactatttgactcattttccacaaatggcctacttaatacgaactttaaatttgaaagatgcacatgagaatctgttaatcaaatctgtatagtttataactatctatagaaacacgaaactttgtttaagaaagggtaataaaacttccacaaagttttcatgcattatagaaaagaagtctcatttcgttttgaccaaaaattcctctataaatttgttcgtaacataatcaagaaagtaaaattcggtcgacactgcaagagaaaagttgttttatgtgataggacagcacgataagggactgtgttgagcacgcgtcagcggaaaatttcatgtcttcttttgtagttttctagtttcaaatataaccatataagagcctatgacccctatggtacaatttgattattgaagtgtaccattttgcaaataacatcatgacgactgtctccactttcccccatttcacttcaaagcagctccatatttatatagtttccctataaatatttgattggactaaagaggataagcttgtctcttttttttttccttcattctaaaaccttgtgttgtgtgttgatctagacccatcttcgttgtatgcctcaagtatccctctagaagatgtcactaacccttaaaaaaaaagtaatcgctaaaggtcactatgtttttctctgtttggaaaaagatttgatatcattttcaacagtttcgacccggtcacatctaatcactcatagctatttttttcttcttggtcttcatcgtcatagtttatcaataatcaaatttttagacccaatctcatattgatattgtataatttatataactgtttcagtgttaccatgatatttattacgtaggactacagaaaaaatcgatttttgtcgtcaccagtaacaacacattcatttgtcaacgagttttgatcaccagcctaacatgatcatctaatgattttacccacaaaaatcataataaaactattctttcagtgattaattctgctatagtcctatgctatgcgatgtttctgtaagacacactttcaaaaggacgtaaatatttaacattaaaaagtaaattacatcgtcactattttttctcttataatacaaaactttaactaaaatgtgaaagttaaagcacgggcatacggcacctcatctagttgatgattaatttgtgatcgtaattaattttcttggcttaagcaatcaaaattaaggtagtgatccactcacacttccgccactaattaatttaaccaattaatgaattcatttaatttattgggggctaaacctatcttattaattacgtaaaccattttgccagttctttgctgtctgactgtcgacacgtgtcgttcccagctaatttagttacatttctgaattctgtgagtgacaaatagtcgatccatcaaacacatattttaacattttgtattaattaattaacgatgataacatgtcacagtcaagtcaggtgtgtgttacctaaacctagtattaagatgcctctgtctcatattgttagcaaagacgtgcagtaataccgtaatgtgtctctatccgtccgtatttatataatggaggacttatgaaggcttttacccttttcagatatacattaaaaattctaattgccttttctttaatcatatctccataagatatatataatgtataaaaaacatctccataggttttagtttttttttgttaaaataaaaatactaccaattgataacaaagtttactacaaacactgaattcttactattgaataaataaataaatacagaagtcgacaaaaaaaaaagaataaataaataaatataaatacatctctcatattcaaataaaatatttaggaacaactatagtttttttatacatcttttgtttagccaaatatttagtttagtgattcgtattagtatggctatcttgtcataagctcgacctttttttgttgtcaacatcataacctcgatccatacttagaagttagaaatatgcatgtgtattagaagactattaatgcactaatagttcagtgatttgtatagaatggctaccttgtcataacctcaatttcacacacacacaaataaaacgataaaattagccacaaatttcttcagcttttaaaaatacaactgcagtctaacgatttctgtttttgcataaacgaatagtgtctaactacttacttagttttaaattcaactcgatatgatatctaaaagagagtttgtaaaaaattattgtcggaacacatcttcagctacttactagatttttctttttgtaatttaataagatattatcactttgttttgtaagatttaatcgctaattggagtcggtgtttggcgagaagaggcagtacatagagtgatggaaattgacttgaagaggcagattatccaaaccataacatttcaaaccacaaatttaatatagtaaattaaaacagcaatgaaaaagggtgaacacagaatttaatactacaaaatttcaacgaaggagagccacatattctctgatgagccccttcgcacgaagtagccaactagtaagcgacaaaaaaaaaataaaaatacatttaaaaataagtgatcttggagaaaaacaaatcaagacaaggatttgtgtttatttaaataagataaataaatcattggcacctttgaacctaactgctgcgaactggcgtcagcaaatgtccacatcaaaacgttggaaactccatattgaattggaagatttaattatcatttatattataaggtaaggctatatggttaaaagataaaaagtataaatgataacaatttgggagaaatggattagatccaaaatgctttaatcatcccactatttctagggtttaatccttactgtctctttgtagggtttaatgcatggacttatgcccagacatgttaaaagaaaatacttaaacctctacagggctagctactagataattctattaatattatagatgaaattagtagattacataaccaagctggattggtatataaattgtggtccatgttaacaccttgaattttcgaacccacctcctttcgaaataagagttttagtgggcagtggcatccaaagaatgatctaacaattaaaaatactttaaaaatatatatgctccattatattattccctttgcgaggcaaaccaacttcaccacggtaagagcccgaatcaattctagataatattatgcttaggtcaaatcatgcttctctatttctagatcaagacatacatatccattcatattctatgtttacacatatgtacgaacatatcttgatttattatatattttggatttcgtaaataaataagtaaacaaactttatataatgttctttttccgccaggaaatgaactttttgtgggtttaaaaaaatacttttttggttgttctttacacattcgatatatctaattttagatgtctctctttatttaatccatgagatattgagatatgtggctgatccttttatgttgttttaaattcccttaggctggtaagaattcatagaagccgcatttatatgaagaggggctagtctagaagacggatcaaaaaccaacaagatatcttaacatactgtttgaaaaattaaatggtaggttactcctactttgactcccttacatactaacaagtaagtcaacattcaatttcaaaatcacactgtattaccataatgacggtccaagatagcttttaaacttatgaaacttatgaatgcaattaactaaataaagggtttgattggtaacaaaaagctgtataagttttttagttgtaaagctgttagaatgagctgtacaataaagctgtacaaaaaaattaagagtaaaactttctataatgcttttgatagagtttttgtgattggtaactgtcaaacctgtaaaaagctgtactgctatgataattattgtcattcaaacccaattacttgattcttttgttcttaccaaaattaattttattttttttttaatttttactacaaatagtcaaagtttttgcaataagctttcctctctatatagaggagataatttattcacatcgaaattttattcccattgcaaagacttaattaaaatctatggcgagacttatctttcattttgtatttgctcttatccttgcagcttgtaagaatacgttacacataccatagctttgaatgtgaaatatccattttacccgtctggcaacatttactaaattttttaatcttttggatgcagatttattgtcggtaactgatgcgatacctagaggatggcaagaaccgtgcttttgtccttccaaaaatccttactgcgactgtggcgatgatcttcaagttcctactacttcagtgattagtcctaaacctataattgagcagtgtgcgcgttgcgaaagaaactctcaatgcaacaaagtttgtccggcaacgtgcaaatacaaagtctgtatatttaatcgaacatgtgagttcagtacatgtcattgctatagatgttgattgatgcaacttcggtgaaagtaataaaagaagaaatgtcgagcttacatgcatggcttttacaaatatatggaaatgaatatttctcattatattaaatttgcaacgtatgtgtcacgtattcgatggggtggtgtatgttttaaattctcattaatatgataagccaaaaaagacctttgattgatatagctaggtaagaaatgtggaagactttaaaacaaaaagttggaattaataagataactcttgtccagatcaggtagttgagaacaacagaagctaattagcacaaatgggtgctctgatctctgatgaatcgtaaaatagaggtatgcgtgtgtttagtaatagctgtacgtctgaaactcaaatcagaagtagaggtggtgactaacaaaacaaaaacgtgtacgcccatttttgatattacgtgtatatattacaaaaagagaagccgaaacatatttgactagaagatataccatataacaagatcaacgaagttctaaataagagagaaagagataaatcaagaatttttttttctgttaaagaagagaaatcaagacttaaaagaaaggaagaaaggaagaaaggaaacaaaaatgagcaatgttgcctctgttgccatcatatctttaacttgaattttcgtttttatcaatttaacgtacgtgtaggatttgtgaactaatataatttattgtttgactaatagaatggactgggatatgtgttgaagcatgaaaatgacaactaattaaataagtttgactacatagaggagtttgaaatatatccaaaagattgttttacaatgccaaaactatatattagtacctctgttttagtattaatttcatttaaaacatactttttttttttaaacatacttacctctgttctaaaatgtatttctatgaatcgttttaattataattaatttagagagtttaattattttagtgttgcgtataaagtttgacactttcactgaattaatttcaatttttatatagtatacataaaattttctcactatttttatctctatacatttattagttttcatctttgctcgttttacatattctgatttttaatactaattagttaaaatcatatatttacgataaatgcatattgattttattaatatcaaatgaagtataatagattaaaatatatttattgttagtaatagtaatattcatatacttttgatgcaaatctaaaactttattgtaaacataattttaaatgcttcttttctttgattacttttctaatgttattataatttaaacatcaatgtatgctcattaattaaacctttaatattttaagataaaagttttcgttgatataattattatcttactgttaccaattaaatctatcatattcttgtatttactattttgaaaattattcaatccagttaacttttaaaatttaaaattacatttcttatttatctttactcaaattaattaatttcgaatttaggataaatttaattgtcaatattaagtatactaaaaacacacacaaagtttttagtagttatttttgaaaactttaaatctaatcaaattaactttttccaaatgatatttaataaaaaaatattaaactaattaagaacaatgaatactttagcgtgtataaataccaaaagcccatcatcacaaaccaataaatcatttacatccgctagtttaaattcattagacagagtcattttcaaacttggagacaaatatgaacaattttcgaataaccattgttgcgttcttagccgttcttgtcttcaccacaactggtatttagtttcattatacatcagtgttacgcttagattgttggccgctttgacaaaaacaacgttttgattaattaactatttttttaatttgtttcgcagttacgaattctttggatgaacctaatatggacactatatccaaatccagagaatacaaatgtaaaattgacctggattgttcaaaccacattgcatgtaggcattgttcttatcgcaattgcaaatgcgatcatggaacctgtaaatgcatgccatgactcttaacccacaaggccacaagccattgatccaactgcatcttcaactcgtcttaatctctcctatatatgtactcttttgtttgtaatgcaaaagaaaataaaacataatattttcagttgataaactactaatgaaatattatacgtcaacgaaatttagtatataaactacaaaacggcaaaaatagctttctcgaaaccaacaaagttaattggacaaacgacaaaaaaactcacaaaagccatagatagatttttcattaaccacgtaaccgacactttcttcttttgggataaatctatttttttttaaaagccatagattcttaggacaccttattttaatgaattatctaaatttaatcggacattacaaacgtaacatatacttacatatgcgttatttaatgaaaacattgacaaaagtaaatcattttaggcaacgaaactttctggaccccagaatgctctatatatatacctattattgtagtcttccaatattattacatcgcaaactaagctatagttattcagacctcaaattctacaaacgaaatcggttaagagctaggagaaaatgagcaatcttcgcctaaccattgcagtgtttttggccgctcttgtcttcactgcgacttagcttgtacttagttttttcttttaatctcaaattgaatttctttattgtttcttatacaagaactgtgttttgaataaacttttttattggcagtttcaaactctgtggtggaagccaaggggaaagaggccacaatcaaattttcatgcaaaaagaattcggactgttttacaaacattgcttgttatgctttgtactgattaccgatgtgataaaggattatgtaaatgccatggttttggtggagaaaaggaaaatcccacagctgcgccattaactgcttaatttctccatttcttttttaaatttatcttttgttttcttgtaatgcaaatggataattaaaaagatttcagatcaaattatatcctattaattattttaaatcattatattttatctcatctctgcttgatccttttacataaaaatataataatcacatcatccatattttttttctgcatttgtacgtgttaaaaactgccactagtgattaaatccggaagttaatttcaggcaaagttaatttagttttttccaccaattttttaattattaaattgtgtttggttatatgaataatactaggaaaaagtatgagatatttttgcccttaataagtgtcttttttaaaaaaacagcttattaattaatgacatttaatgtaaatcttaacacgtccataactatttacttaaaaatgttcctcaataagtagtattagatattagcagtcaacttttcacaaaaaaaaaaaaaaaaaaagatattattagtcaacaaaataaaagatttgtttagtcaaaaacaaaactccatattattagtcaacaaaaattatgatattttcatttatgtttactattaatgtatacagatttatagttccaaacattaaaaaacagataaaaaccactctctacttaaccatcatgcccctatatatatatgttttgttctgtcttttgtgtatactatacactaatttcattacaaaccaaactaaaataatatacatcgttcatttcatattcaacagaaggaatcggttttaaaactcaaagagaaaaatgaacaaccttcgcgtaattatgtcagtgttattggccgttcttgtcttcacagcgactggtaattagtttctttacctttaacgcaatgatcggccgctctaaacaattaacagtgttttaattgaattgttctctttcttcttctcgcagtttcagagtctgcagaggaaatggggaagggtgaggtcacaatctcacttagatgcaaaacgaaaacagaatgcttaaagaacattgcctgtgaagcttgtgtcgattgtcgatgcgataaaggaatttgtaaatgccatggtttcacagcagaaaccaacaatccaaccgtttaactcatatttctcctaaatgttttctttcttttttaatataaaatgtaaaagaaaataaatcgcaaagttcaattaatacaccaatgaaaactatttatcattatcaatcatttgttatatgattatatatggaatgacgacgtgtgttaagattgagatctcaaattccacccacaaaaactatggaaacagaaaaaaattaaaagcacacgaaccaatgtgagatttacgtcatcttttcgtctttgcataataatgtgaaggagagaaagagaattgcaatggccattagcttgtaaactggatgagaagaagccattttgtttctttgttttgatttagtgtgcatttagtaaggttatagggtttctttatatagaaggagtagattgcaacaaaagcatcctcagtgagtggcgtagacttggaatttccaaacttgtgtctggcttgtgttgtttacgccgtacacacacttctttaacattagctcactcaaaaccactttgtgatgtgtgtaaatgtggtgctgatgtggcggcgctgactgtaaaataccaaatatacttttttgtcatgcacaacaggtttttgttttttccctcatattttctcaattaacaatttttaaaaaatctagaaattcacactagttaaattaaatatcgtcgatgagaattaatcagtcaacaaaaaactaatcattttatttggataactaaatcgtatcaaatgggaacatatgtttacaaccttttagaaagaaaaatgaagatatgttgatacaaaagatgtttctcttttccaaataatctaacaaacgaatcagaagaaaaaaaaacaatattgtgacaacaatcatcaaacctctgcaactgcattcttcacacaatcaacattacacaaccgaactgatctcaccatttcacccaacctagaaccaaagatttagatagtaagatcccatgtacaacatatgtgatacatatcaacttcaaataacgaaacaaaaattctataattgaattatttgatcataaactgttaagtactaacctgtcgaagctattcctagcccgatcagagctacccacgctgtttctcggcttcccaaaccgatgatcgatacttatctttcttgatttgtctctaggaggaacacattctatgctatgtctagatccaatccagctactcttcgttgatttgtcgttcttgtggtcattagccaatgattggcgtcgaaattttggaactggaagcttctcaatggctgaaatgaactttcttaagtgaggtaagtactcaggagacatctcaatatcagaatggcctcttcctttaagccataagggttcgtatttttctttgcatagtccccataaatgttttccatgtgaaatattcaccacatcgtcatctgttccctgcaatgcacgcaaagagaattataccaagttgttactataatatcgtataaatataataagaatgagtatatctatattgcaatgaaatatacttacatgaattacaagaacaggacactccacgagatgaattttgtcaatattctgcaataagaaaactctgattagttttgcctaaacaatgtgattatgcttagtttggggtatttagtaaaatcaaggaagatatataagaacaaccgaaccttgtaaatgtcgaacgggaaggagtgcttgacagggtacataacacgtagaccagacaagaaaggactatggagaacaagtgctcggagacgtggaagacgagaagcaagctcaagcgacggtccacttccaacggattgtccatacaaaatgatacgttcatcttttgtaccgtaggtctgtcttagccaattgtaagctgcttctatgtctgcgtacgtatcttgctcgcttggctttcaaaattacgatccaaatcacacacaaatcatacactcaacaatgaatgtgatcttcttaattacaatatggagctgatagtatttttctttttgcattttgtggtttatatatgatacacgaatgtatataaaatggacgtgctaattagtcccaaaagaaaagaataaaaaagaagaagaaaacaagcgtgatttgaaataatcgacttaccttaccagaagattgcccatatcctgaataatcgtatctgcaattatcatcacacaaaaccatatattatttatctaaaaagaaaataatatttaaatgaaattctgtgtcttgcatttaaaaaaaaaaagagaaacagcgagctaagaaatttgaagaaatgatctgacttttgggattgaaaatgaatttggaatcctatgctaaaccgtaacctaatcttgtctcattctcaaaagaagactctagaaacaaaaactatcccttaagaaggtcacaataaaacttaagacaattaatatgtatgaactaccgttagtatccaaaaaaaaaaaaaaagacaagtgatcaatttaatacagttcatgcgtacgtatatacaaactaaccccatgagattgacattgagttgaattagttccgctaagatgtagaaaatctgagcaagatcggaagcgttgccatgagaaaacaaaacagtgagtttagcggttggattcttcacatacatggccacaatctcattccctctttttgtccttatcttcaccacttcgatgttctcatctcttaggtaatgcggcaggttcgtagaaatcatcatcttccccgtagattcttcagtcaccaccgtgtacgacggcggatttggtgggaagaatgctaacttcgccgccatagtcgacgtcgcaattcccatttcactcaagaaacttttcttttcttttatttttttgttgagaagacaagaatgacttatgcaatactgatggatgctataagctgttgatattgtttattatttcttcataatatggttagaaatggatgctaagatttcccttttaaatgctctttctttctttatatatatagtatccatctaaatatatatgtatggctaagattaaggcttaacataatatattaatttccttaactgtggaaattgtttctccttcattccttaacatcaatgtctcaaatttttattattaatttgaagcgatataacaatatgtatataacctacataatcacgtttcaaagtcgaataacccaaacattgtgtcaagaatcgtaaaaaatatcaaataagtgtgttacttatattagtataaaagacatagatgattgaggatacacacgcccacatactgatcatggttctagtcttccagatgctacttgcattatagaaataaacaaatgattaattaatgaaagaatatttaattgaatctaataaaggaaaaaatgttgtgtagtggataattaatagctgtaaattaatctgtaatctattcgtttggagggacagaaagtttactctcatcattacttaagaaaaatttcacatcaatttttgaaaaagtttatttttcttttggaattacacgagcaatacccttttggggttaaccacatataaattcaaattttgctttgcaacgacctcataagtccctataattgggcctctatgcattcgtaaagcccattataagccatataaatttaagcgaattcatgaaaattcatcaggtttaaaattcataagatttacatgatatatagttcatgcaaataagaaaatatttatgaaattcatcaggtttaatgaaaatcacttgcacgactaatttgttaatacgcagataaatgtcttacataaaatggttgatgatttcagacttcaaatttgttgtagtataaaagaaaaatatatgttaggtaatgtaaatgtgcaaggattgtcagtcttttttagcagtttcacaaataataatttcatcgtataactccagatgatacagtaatggtactaatacaatattttattattttatgttatgaagtatgaactctgatcgggtaaagcaattaggtacttaaaatttggtgcaatgtgggagaaatagcatacacaattttgatactaacaaagatacacaaattccaattatggaagctgttagctatatagagttatagaccatagagtggctgaggtagaagattcaagggggtccattgacccttgcaaaaatcagaaaaagaataaaaaaaatatgcttattgacatcttagttattagagaaaaattgacccatggaaaagtaatatctacctccgccacgtccataggttatattccacacccactgactcatcatccattaactaactaatacataactcatatttgaccgacttccttcgtctgccattttttttgttcgttatagattcgagtaaaatttgttgatttcttttgtcaactaaaatttgtgaatcttatacggtttaaaagatctaagagggcaacttgaaagtcataaataaatattgtttaaatctactcatgttttcacttgacttataaagaaatttttaatgatggaactagttttacttttattgttctcgagtatgagaaaagtggtaatagagtaagagacaaacacaaaacacgcacatctgtaaattgcattgtacgttatgtttcttctccttattcgatgtttaatttctaggctattccaaacgttcttgcttttttcagtatcctactttgtgtagttatgagaataatagtttgaaatcactacattcgcctttttcttaattactttccactttccgagaatttaaaagaaaaaaaaggatgttcttgaatgttacatcgtactattgacttagcaagcaccttattatttattctatttggtcaacaagttgtttttctttaaaaatgttatgaaaggtgccttataagttgatgttctaagttcgaccaaattttttttaataagatagtattataagcttattgcgaaacatcaaatataattacatttcaagactatgaaatatttcatttacttaattcagttatttttagtaactagttggattggctcagtttctttatgggtgtgaacttggatctcatgttgtaattcacagtttcttacattgttcggggattttaacgcatgtcccaatgtctatgcatgacaggttcccaataaagacacatggcttatggtaagataaaaatagattagatttgaaattctcttgggggtttttctttcttagatctcctatataaacactagttaaccttcttctaatcttcatcattcttgcgtaatttgatctcacaactcattttgagaacatttttcgtagctaagagaagaaaataagacatgaccaatatcacttcaagctttctgtgtttgttgatccttcttttgttttgcctctcttttggatattctcttcatggtttatctctttcctttatttcccttttccctattattaaatcataaaactttcaaatgtcatcaacattcgtaataattgactcacagtttataaatatacgttaaaaactttcatgggaatcaatcttattaaaagctatttcttcttctttttcgatttgcatgaaatatataaagttgcatgcatggtttataataaaatgcagttaataaatttttgtcctattttttcatcaggtgataaggatgaagtgctaagtgttgacgtcggttcaaatgcaaaggtagtgaataaatactcttattttttcttgagtagtgattacttatgtaatcaatttccacatcattcacaactgcgaatttcacatagcggttgcattcagtttgaaatttcgacatgcatgtatataatctaaagaggttgatgataaccatgtaaagcaggttatgaagcatcttgatggtgatgatgcaatgaagaaggcgcaagtacgaggaagaagtggacaagagtttagcaaggaaacgacaaagatgatgatgaagaagacaacaaagaaagagacaaatgttgaggaagaggatgatctcgttgcctacactgctgattactggaaaccaaggcaccatcctcccaaaaacaactgatcacatctatcatatttatatagagactcaacaaaatgctcctcattattatcatatcaatataagatatatatcaaaatacatatagtatatggagtattgtgagctttgtgtttgtaaaatcgatcgttcaaattatatatatgaaaaagtggtatgtataaccaaattgtgttgtctcagttataaaaagtggtatgtataattaccaagctgtgttgtctcaatgttatccttctcttaagttaattatgtgctgatcttacattagtgttgggaataggtacaaaagaatgtttcagacagacaagatatgctctggaatgagtaagaacaacaaactatcaagaagttacagtaaaaaatctggcgatatctggtcgaaaaatggaaaagctttttggttacaaaaatggattatgtatttcacccgtcttggtttgtagttgaatgagcccagaatcctaggatccctcacgcaaagctgaacttaccattttgtccacttccgtcaaatactcttatttacgaccaagcaggttataactggagttgttgtcactggccggacccttttgattcccccgtccgtttttgaccaagctgtgacttcatcttcagaagaacctgaagaaagtaaattcagtcttagactcaagcagcaaaacgacctagacacttgagagggtttgggttgaggaaactaaaaacttgacagaagtaaaagtcccttgttccatatttccaatctaaccaaaaggcctcatacgttcacattatcgagttcaaaggttagtatgaaaatggtaaagaaacatcacttaccgcaattcgtcaaagtcgtcaatgtgatacaactgttgcccgatgataccatccagtagctaagattaatctgttaactgaatcactgagaaagacaataaagcatcagataaatccattacgtaacttatttagtttctttatgcagtaaaagtatactaataacagttacctcatgagacagtttctctactgaaagtgtgtgccttctgcagttagcagataagatgggacaatagacaaaacttctctcattactaatcaggcaacaaaccccatttgattgtccaggaaagcaattcatctgacttgatcatcacttcacaaatgtctaagtcaggcgaaataccctgggataacattagacagaagaagaatttgctctcgtttaccaaatgtctcctacacaaacggttgatcaccgcgctatagtccctaatggaaacattgaatcctctgtgcagcagttgatgaaatagcttcactgccatttcagggtcaccctttacacaatgtgccttgatcagtgtggtataagcaaatttggacaaactaacattctgctcctggagcgaatagataaaactgtcagctttccttatgtaaccgtagacacaaaggctgtcgattagaatattataagtagcagatgaagcatcaagatttcgagatttcattatttcgagaaacacaaatgctccagataaatgtttaactctgcatagatactgaataattgtattatatgtgatctgatctggaggtataccttcagattccatgtccctgagtccctgcttgcatttttcgaatatcctttccctgagtacatggttgcaattttcatgtttccagcctctgcaaagtcctttaaaaatcactgagtacgtgacattggttggtgggattccttctgctttcatttccctgcgcaattcatctatgcttttggtatttccacaatttgcatatgcatccatcagagttgtataactcacaacacttggagccaatccatataacttgatgacatctaagatttttctagcctcagctatattctgggttttgcaatacccgtatatcaaagaattaaaagttgcaacgctaggagttatcccagtctcaatgactactttgaataactctaacgcctcctcaatgcaaccagactttgcatacccgtcaattacgatattgtacagaacaatatccagtgtctctccacttgaaatcagagaatccaaaagcgatcttgcctcaagtaacatccctttctgacataaaccgagcaaaagagcaccatgagtcctcgaattcggaagaattcttttgtcacacatctcgtcgtaaagccaaagagccatatcaaattttcctaacttgcagaggccatgaatcacaatagaatatgctacaagatcagggctcagaccatcggctttcatttgattgaataacgacaaagcttcatctattcttcctgttttacataaaccactgagcattacactgcatgggatgatactgtttaactcaaatcccctcgacaacatatccttcagcaatactaaacccatgtcaatatttcctaactgacattgtccacatagtaaaattgtgtatgtaataacatcaggactcaatcctttatccaacatatctcgaattacctcccaagccccactgatcataccgagaagatgaaaccctttcgcaagaatattgtatgtcacagaatcaggttccactccatgcttattcatgtcactagccaactctaaagcttctgcgatagaaccaactagacagagtccattgatgagtatattgtgactatatacactaggaaccaacccacatttcaaaactgtacagaaaaacgacttcgccatatctacaaaacccaatttacagtaacctgacattatactattgaaagaaactacagagggaccaatatccttccactctgaagttcgaaggaacaaaactgcatcctctagcttttgttgcctacacaaaccatctacaactgttgagtacgtgtgctcgttcttatccttgatttccttgtacacatcccacatcttatccgtctctctaaaatgatacaaaacggagttgtacgactgtgtcgacacattcaagttctgatccttcatctttttcaagatataaagagaatcatcaaccattctcaatcttgatgaaagaaacaacaacatatcccaaactaatcccgtagactcccactttctgaagctattagagagaagttcacaaagcctagaagctgaaccagagcctaaacattgaaaattgatacaacaaatcatattccaccccaacaaatatcttaaccaaacctaacaaactctaaaactgtaagctttcaataaaattgcagacaaaagaaaagagaagacgtgccttcttcttgaagcaattgttccagaatcacttgaagctctttgaaacgtctttgaccagctaaaacatgtgaaaccaacaatgtggaaaaactcgaatgacgaaacgcatagatatctctcagctctttgaaaaaccaaacagaaagatctgagctttcagacatcaattcatccatgatttcttcgacatgaacatgcctcaattccgaaaccaaacctcgaaagtgatacccgtgaagaaactcgcggaacccaatcttcttcatcccaaagagaatctctttatagaagcctctgtgatcggaagtggaattggttgtgggtaatgactcatcgtccattttcgcgacggagaaggaggatttagtgaataagagagaagagaaaggagagagagaacgagacactttgcttgaattgaatgcaatccatctacagatcatggaattttgggattagggtttttcaattgggggattctggagatgcccttgtcgtttttcagagaaaattaagcgaatttgaggttcgccggagagaattaaggttttcttttcccggcaagtttgaagaacagccggaggagataaaaaagggttttaagataattgggtttatgatttaaaccctaatttcggttaatcactaaccgaatcaattttatattccgattcaacttttatgacggtttacaaaaattagaaagtgagagtcaaattaggtagtatgtcaatatgatgatgttaaaataatttacatctattcatggttctctttgtgaagagtattggtgaaataatgagaaaaaatgaagataattttaaaaaaaaaagagtattggtgaaacaaaataaatgaaataaattaaaataaataatttaaaaataaaacaaattttattttaattgaattagtgtaaatagactaaaactatttaattgatatatgatgatgttataaaaagtttacatgcattttaacaaagtaacaaatacgtagtaagaaaaagtatatattatacataaaaaaaaggatgagagttctttgtcgaaaataggcaaaacgttcatttctcttaaacatgagagcatgcagcagcaaagagtagaagctaagaataatctggtttataattatttaattcaccgtaaccatatcaataatcatattttccactgaagaaagatgtgttgagtgcgaactagactagtgtggtttttttaatctaatggcagatatcaatttgttttttccacttactttaacgtgacaaaattcagaaaacttattggaatatgaatgttcaatgatgcaataatactcaaatttaattatacatataccgattagtatttcaaatcaagtacacaaagaagaactccaacagataaagtttttaaagtaaattagatttagaaaaggtactaagatggatcacttcaccaatttggttatttgtcacctttcttgatgcatgcattagatctaaaaccaacttaagtaaatgcaaaaattgtagtatgtctttttcagctatatatttaaaataaaatctatatgaaattttgccgtttctttcgtctatacataccaatgaagaaaatattcaaatatggtaaaatttcacagacttgaaaatccacatttcaccaacttaggtgtaattaggcattaacttaaaaactccattgtatgctgcattgctctcctataagtacttgtgtgtggctattctttgttttgacttactccaaaatcaaagatgtataaggcaagtcctaaaagaaaagagattgtagagaaaagcaagagtgtaagagagaaggagattaaacaaaactcaaatttctttgccaaacacttaaagaggatttacccaatcacgcttcaacgaagcacttcttcttcattttcactctcttctatatctctatcactctctcagaactcgaccgattctgtttccacggattcaaattcgacgttggaacaaaagatctctctggcactcggtttaatctcatctccccacagaagagaaatatttgttccaaaaagtatcccacaacaactatgtcaggatttcaatagtagtgatgaaccaaagaggtgcaactggatcaccaagaaaagtggtaagatcaagatgtcctactctaatattatatatagctaaatgaaatttatacaggtttattaattagatgatcaataacgtgactacaccaaattaaagtccgttatgaagaatttttaacatatgcatttcatatatactatctattatgatcattataagttaagtatagatcataaaataatacttttgtattaattttttgtagacgaagtctacgtaatgtttcatgaccagcaatggggagtccctgtctatgatgataagtatgtttatagcttcaacaattttatgagattaaatgctaattatcttgttatattataaatttttatttttgggtgtaaatgttatatacgcctttttgggtataaatgtctatatgcttatatttaacttaatgttgtgaaaaaaaaattaatcgcgtggtgattgataacataaaacagcctgctttttgagttccttgccatgtcggggatgttaatggactataactggaccgagattctaaaacgcaaagaacactttaggtaaaatctttcaccatattcataatatgctacattatacatgtaaataatcatttgtggggtgtttgataatttgttaaactagagaggcattttgtgagtttgacccaaatcgggtggccaaaatgggagagaaagagatcgcagagattgcatcaaataaagcaataatgttacaagagagtagagtcaggtgtatagtcgacaatgccaaatgcataaccaaggcaagtttcaagcctttttccgatttttagaaatagcctatagtttattgtgtattgttccattatacatttattttctattatcaataaatggatcctatgaaaaaaaactatattttacaggtggtcaatgaatttggatcattcagcagcttcgtttgggggtttatggattacaaacctatcattaacaaattcaagtattcaagaaatgtaccattgagatctcctaaggctgagataattagcaaagatatgatcaaacgagggtttcgatttgtcggtccagtgatcgtacattcgttcatgcaggctgcagggttaacaattgatcacctcgtcgattgttttagacatggtgattgtgtgagcctcgctgagaggccatggaggcatatatgatatatttggatagagattctaatccagtttcggtttaaaacatatcttctggtttttgagttttttttgtttcagtttatcaaaaatatatttgaattatacttggtttcggtttttgagtgtttttttttttttttttttttacttacgagatagaatgattgatttgaaatcaaactttctttggatttagtttaatatgtgtataagttttggttggatttaacttttttatattttgactaatcgatctttcattttcaattcggtttgatgtttgttttggaggtaaaaaatctataaaccaaatctttttttggttaaatctaattttccttacgattttattttgattggatttaaccgaatgaacatcctataacaatggtacctatattatatgtccatgttattatcatattgtaaaatttcttttaaccaagagaacttcgagtctatactaatctccaaaacttgcaactaccatttgcatcttaaaataattagaaaaatcaaaaatatattaagtgataatcaatcattaaccttagcgagcacataacagtaacctctaagccatgattatctagtttcgttttcttgtaatttttttttctatggtttctatatcatggagaattggagatgactattattgtagaccatcattgtacatgagtatgcttttgacataattgagaaccaatgttatatgcctatattaaataaccttcaatttgacggaaaaccttcaaattatttaaagtaattaaagatgaaagaaaaacatttcagaaacttttaaagttttgcattaattataatgcttcaacaagttgcttacaagttgtgaatgcttatgtaagacattgacaagaagacaggtaatggtcactgatgtggcactgatgaattgcgtccattaaaatgagaagttttatcacaaaacacatcatattttcagaccaaacgatgaacaagttgccataaaaatattaaaaagcaaaaagcatcaacatagttttgttttctgttcaattttataataatcataacaataattgatacgttacaatttcatgtaaactatctagctgtcaaatagtaaaaacaatattttcttttgaacattgtaagaaaacctcaaaagtcaaaactgaaaaaaagaaagtaatttcgtgaattatgtactaaaaaattatatactagtacacatgaattaaattttactttcaatcatgtaggcaactattttcattcaacttattcttgtaaagacaatgcaaaacgatttgaaacaaaagaaggaaatggaagttagggaaaaaaaaatggtaaagaatatttacaggcaaaataaacatttcttcacattgcaagtgctcgtggtcgctacaaaagtaaactaatcttaacgtagctaacaagtaattgcttcaaaactcgtaaaagtgaaatctttggtcttctcttatgtgaactcgtatgatctcaaaacttgcacgatgtaccaagtctctgtgtgttcctcaacgtcatggtcttgcgttctgcaaaagccgagtaaagcaactcctgaaacctctccaagaacacaacccattcaacttctttcatgtcggctaacttcacaaagtttacgctaagcgggagctgcacgttcgcgctcttgtgacttaccaatgctttgtcggtttggttgtctttcggaggtttcaggtatccggatcccatggtgttgcttagattgttcttcattgatgtggaaagctttgagagagatagagtaagttttgcctcctcttcgtcatcttcttcttcttcagcaatgctctctttgagctctccaagtgaagaacgtccgtttgaaaatgggttcttggcgaagaactcatcggtttctgtctcagagccataaaccgagtctagctcattgtagtctatatcaaactgaaactctgtctctccttctccatctgacttgggagacaaaacgtcttgttcagtggttaatctcttggcttcgatacacaacatttctagttcacttggttcctcttctcctgcacgaaattctcgagtcatcatctcaccgatctctgcaagacaaagtccaaaaacagcagcttctttaaggaaaacggtacagagaactagaaccctgagacaagcctctcgaatcatcggaagctctcttcgaagcatttcacaatctttcactggatcaagactttgtatgtagtcaagttcttcttcagagaaaggtattgaagcctgaggccaatgaatccattcgaagtaaggatcttcgagtgtttctggtaagcaaagaccatgatctattggaataagctccacttgaccaaacctcccaacaccaccatcatcaagcttcttcaccaaaagatttccaccatgccggtctgtgttgagaatccttatgtccaaaatcccaatgcggtgcacagaagcgacagggaagcttgaagtcccgtgatcactggcatcaaaatcatgaggtacaaacttctggaacgaagcaatcttgctgctgaccagcttcttcttctcacgagatttgttcccatccattccatcattgacattgaaaacagagtgtgttatcttcacaagagccgtaggaggaacattagcaaagtgatcataatcaagaaggtatgcagcaacttctctaaacccggtttccccaacccgcacagaaggctttaaaccaggctgcccaagcgctttccctacgaagcctttaggattgttaggggcaaacggctcttcatccgtaggcttgacaatagcaacactttgacccttttcatccctaaaatagtatgcccctccaagcccaccattaacagggattggttcaacacccatcttcatcgccttaacaatgtcattcgctgtttgcttcaaagacagaaaacagggcgagtgactaagtatctcaataggaccacttcgatctttcctctgcagatcattcccagtaggtgaaagacacggagtagaagagcttctgtgcattaagttacgctttaagagaagcggagaatcattcctcacagcactcaagtcattcttcaacaccatatccccaaaggtcaaagagctttcctcagtaggaaagttaaacgcaatctgaagccttttcttcacagtatgaacattgtcattacgatccaactcaactcccaacacacagccagtatcggtttgcacgaacacacgtcttctccctgtagactgttgctgaagcagatggtgcttatattgcttcccttccatctttctagccccatgaaattccccttttagaggagccttaaacaccgccattgccatcttgtcagaccaacaacgcctttggcttaaagccttaaaccaacacaaactcaacaagacagaagtgaaaagaggagtctttagcctaacactacatgtctacatcaggtaagccatgctttatacgtgttaccagagagaagaagattaaaacctgaatcaaaagatgaaacattgatcaaaaatcttgaagatttgattattttatacagttgtaatatataaagcaaccttctttatctcggcctttaacacaaatcgttaaaaaattatactttctccacacttatcacaagatacatcttgatccaataatcgtttgaagaaatgatttacagaaatttattcactttacacaaatcgaggaaccaaatgagaaaatcaaaaccaaagaaacgaaatttaaaggatatttcgaaatagaaggtatcgatgaagaagaacaactcaccgtcaccggaaagcaagatctgaagaaacggaggaggaggagacgcacatggagaagagacagtgaagcgtagaatctgagaaaagaggcttcaatggaggcaatgaatcggtaaaatctgactcagtgagtcactgatccattagcctcgctatctctctatcctctgcctccttccttcgtctctaacctctcaacgacgcttttttaactctcagcataaagtatggagccattcctgctatatcatgtttaaccagtgccacgtcacctttgtatttttaatttattttttctttgtcaatttcattaatcattgtattaaccgtatataatatagatatgttgcattttaagaaatttacatgagaaatacaataaagttcgtatttcgtagcaatatcgacatcaataaattagagtttattggctgacaaattcaaaaattacaaaaaaaaactacagtaaaatttgaaagaagtagaaagaaaaaaaaacatttaccattatcctcaactctaagaatggtctagaacaagcaaagagagccgtccgatcaacacagtccacatgagagcaatgccgttggattgtacatgatacgtggcgattaatagagaagtacacgtaattataaaaagggtttggtgatgatgtggcaacttagaccgtcatacttgacgattgacgcatgtgacaagttggcaaacaaatgggccttggaactttagaaagcccatatctaaaacgagttgatgatcgtttgctgcacaaggtgtatataggttttccttgtgattgaagcaacatatgaaaactaaaacaaacctaactctcaaaaaattgaatataaagtatttgaggtctacgaaataatacattacagaaaaaccactattttctgttcttattcgaacggtctttgtatattgaatgcaaagcctaaaaaggttaaaaatcctctgatagaatccatcagaatctacaacagagaagagaagagtaatgtctccatcctttcttcccctttcgaagttgtctcttctcatctttctcctttcgaagttgtctctcctcagctatcaccattcgaagttgtgtttcctcagctttctcctttcgaagttgagtctcctcagctttcaccattcgaagttgagtctcctcagctttcacctctcgaagttgtgactcctcagctttctcctttcgaagttgtgtcttctcagctttatcctttcgaacttttctctcctcagctatcaccattcgaagttgcgtctcctcagctttccccattcttacaggactgctgttccactccgattgcagtctgtaacaaaaacaattacagaattaaggtatacagaatttgcagatcacaaaatgtatgtgagtgtatgcatgagtattacattgggagagcaaaagagcttgcgctggttccatcagaacgaatagagaggttttcggagcctgagagtggtccacagtaagtaatataatctaaactcgactttgcttcacagaaacttatttccccgaaaccatttgggagattccttttcaagagattgttgtcatcacaagagttgtctgcttctgattcctctgttatctccagatgtgggttatgatggaccatgttttcttcaggtccattagtgttgtttttgttgggtgggctttgggaatcctccaatgataaaatatctcccaaggttaaagccttcttagagacacttgttgatgtagctactacatctctcggtgccactttggaatcatcattaacttcttgtcttgtcacaaccaaattctcttgatcaagttcttcaatttcgttgttgtctgagattttggatccgaaaggtttcttgttgaagaacaacttctcctgcatcgtaagttacacaagctttccattaaactattacaccttaacatatatcctaacatgaagatcattaaataattggattatttcataacaactggattattttattgatgtataaagccatggagtcacatgtcaatgtctctaacaactagaatctaaataagagtattcgtcaaagaatgaattatactagaatctaaagcgagatggttttactgtttatccaatagaaaaacatatagtacaagaatccaaaaaaatcgttgaaatgtcaatgagtttcagcaaccaaaatctctgcatttaatttgagcatatataataacaaaaacaatgaaaaacagtttattgccgtttgattttgcaaataattacaaaccaaacctcagaaatgtatgcaggcattctcaagaaattttatccttttaccaccacgaaaacaccacccctgtattaggaaaaacaagtggattggttctaaaaaatcttcggaaaacacaatcaagaatagaaggtaatctaacaaacaaagaacaagattgtctcaatttgtaacttgaaggtaacctgaatctcttaactagtgtttttttgctctggatagtcaaggtgtttcactctctacttataaggagtcaccttctttaccctaatcatcatgataaggttctccaagtgcttcaatcctgattctcattaggattacgccccaacttttaaaaccgtaagattataatccaactgcttaatcaaacgatacacgtggaaataagataagatttttgcaatctgcagttctgcacttgtatgcaaggccgcatgactggtatagaaggaaagcaactaaaaccatcgattcgggcctcaaaatttagtaattaaaccccccaactaaagatatattgtgaaaaaacccctcaattatttatttaatgaaaaaatacttgaagtttaaaattatttgtgaaaaccacccgccgtctacagtaccgtcaaaataaaatgatgtgttttaaatataaaaaatgacatgtttttttgcttaaaacaacacgaaataaacaaaaaaacaacacgaagttcttataccttattataaacccctaaatccactttaactcttaaatcgacgacattgaatcgcgaaattttgtaaactgaatgcggctggagcttgcaagatgttaaggtaactgttacaagacattcttattggttttagttttccttttcacatactctaaaaacttctttttttgcttcgatccatactctgacttttaaactcaccttggggagttaatttctttggtgcactatagagccacgtctttgagtttatgtgatggcgttcatgcttagagatgctacatgtatactcgtgcccacttcttatatcttttgaattttgttggaaaatattcttgttctttcaattttttaaattggttttgagacgtatatcttattccttgcattacatgatacaatattaaaaacttaggagattgatcagatttttagagagtttttgataattgtatttgtcaggacgcttttctttcgattgcatgtcggaggatattgggcagcagatggttcataccatggcggtgagacaagatgtttacagcttgattttgaagaccctagtttagcaatgttgacaaatatggttttgagtgctggttatacagaaaatatgagtaagttttcttacttcccatctggagaagtaggtcagaatcgtaaggatttgtgtggtgatagtgatgttgccgaaatgattacgtgtacacatgagttggaaagcaagaatttatatgttgttagggcagatgatcattatctagatgatgttcttattggagaaagggaggaagaagaggagcctgagagtgaacaacttgatttttaccgtgatgattatgtcgagagtgatgactcagatgatgatggtgctagaatagatttttatgtagggcaagagtttgtttctaaagagaagtgtaaggatacaattgagaagtatgctattagagagaaggtgaatatacattttaagagatccgaaaggaataaaatagaaggagtgtgtgttcaggattgttgcaagtggagaatatatgcatcaataaccagtcgttcagacaaaatggttgttcaatcttacaaaggaattcacagttgttatcctataggtgttgtggatctctatagtgcaccaaagatagctgctgattttataaatgagtttaggactaattcgaacttgtcagctggccaaataatgcagaggttgtatctaaatggtcttcgagtcacaaaaactaaatgtcagagtgcaaggcagattataaaacacatcattagtgatgagtatgctgagcagtttacgagaatgtatgattatgttgaagagctgagaaagactaatccaggttcaacagttattttaggtacaaaagatagaatttttgagaaattctatacttgcttcgaagctcaaaacgggttggaagacagcatgtcgacgtgtaattcatttgggtggaacatttctaaagggacgcatgaaaggacaattgttgactgctgtgggaagggatcctaatgatgcaatgtatatcatcgcatgggctattgtaccagtggagaacaaggtctattggcagtggtttatgaagttattaggagaagacttacgtttggagcttggtaatggtcttgcattatcttcggatcagcaaaagggactgatatatgcaataaaaaacgtcctaccttacgcagagcatagaatgtgtgctagacacatttttgcaaacttgcagaaaagatacaagcagatgggacctttgcataaggttttttggaagtgtgcacgcgcatataatgaaacagtcttttggaaacagcttgagaagatgaagaccataaaatttgaagcttatgatgaagtgaagcgaagtgtcggttctaactggtctaggtgtgaaaaaatttcgtctcttatttgtctatggttttggttggtttgactcttgttttgttctctgcaattgtcactctggttttggttgatctaatggatttattattttctccttttgcagagcattttttagtgatatcacaaagtcggctgcggtagaaaataatatcagtgaatcatacaatgctgttttgaaagatgctcgagaaaaaccagtggttgcattgctagaggatataagacgacatattatggctagtaacctagttaagatcaaagagatgcagaatgttacaggcctgatcacacccaaggcgattgctattatggagaaacgaaaaaaaagtttgaagtggtgttatccattttcaaatggaagaggcatttatgaagtggatcatggaaaaaataagtatgtggttcatgttcgtgataagacttcttgcacttgcagagagtatgatgtgagtgggattccttgttgtcatattatgtctgcgatgtgggctgaatataaagagacaaagctgccagagactgcaattttagattggtattcagtggagaaatggaagctatgttacaactctcttttgtttcctgtgaatggcatggaactatgggaaacacatagtgatgttgttgttatgcctcctccagacaggataatgccaggaagaccaaaaaaaaatgaccgaatcaaagatccaagtgaagaagcttcttcggagaattctcaaaaagctttagtggtaagctagtcgtggtaatacgtctctctttcttatatatttgtaatcttgggttaatattttatttacttttgtagacatgtagcaactgcggacaaacaggacataataaacgcacatgccaaatagagctagtgcctaagccacctaatccatctctagaatttccttcttatcatacgaaagttattgtggtaaaattctaattttctatagtagtgtatgccaaatattgtttggaaataatcttgttatttgtgcatttgtttttgcagacatgtagtaattgtcaacaaactggacacaacaaacgaaaatgtaagctcgatccagtgcctaagccacccaatctgcctcctggaagaccttcaaagaaacaaaagaccacccaatgaacaagcttgaagtatgaagtcttgctttttttagatttcgatgttgaaacatgtttgagctagtaatgttggctttagaatttttttttgttctattagatttaatacacatggatctctaaaagaatttttggatcggttgaaaatttaatttttttttaacaacaaaaataaagcaatcaatatcatacatcaacaatatccaatgcaatggctgtaccagagtctcctcaatgatagatcgttgatcagaagtggcagcgtttaatttaataaagcaaaggaattttaataaaatattttattgcagcaaaaaaaatacatgtcgtttttcttcaatgtaaaatgcagcgtttaatttaactggatatttaacagtacagtagacggaatgaggttttcactaacaattttagagttcatgtgtttttttattaaatatatcgttgaggggttttttcacaatccatatttagttgggggggttttattactaaaaaccttttaactaaaatattgttccacgtttttaaaatagacttttatagggcctttaaaaaaaattgtgggcttttactgtgatttcaaaaacaactgtttttagaatttagaaacgtgatacgaatgtttgaagtgattttatttatattactattgtttacaaatttttagtatataaaaagggtattctcatacttttaatagcaaaaaaaactatggtccgacataggccggctcaaaatagcaaaaataaactatggtccatgttcaaattttggggcctttaatacactaatttttgaggtaatttaacaaaatcccagtgcaaatgcattgtcgcacagcctatatacggccctgctcgtatgtcatatgagctcatatgcggtcgcgctaatctatggcgtttaacatcacaccttttcaatatctcaagacttggtcccacaaaggaccgtgaaagctaactccgctgcaaaacgactcaaacatagcctcaaaaacgtgtctctctacttctttttcagatagctgcacctgaaacaccaacgagacactaacgtgtcaatcacattcctatacaagtacacgatcttgcaaggatagtctttatgtgtttcttgtagaataagcaacggcatgtgtgaatgtttggctactaagatgatgacaacttggtcatcaagtccggtgtttggctagctaccaagatggaggttagcctaaagagactgaaccagcgcatggagattaattagcatcaaaacaagacgtcttgacaagaatttttattattggcatattctagtttataatttgttttttagtttcatgtattacgattgaatggtcaatttgttagatattataatttttcaacgagtgtaaacgtaattcattaaaaagaaaaaagaaaacaaatcattaaagaaacacatgtatatgtgccagtgctacatggaaacttaagattgttataatagtgtgtacttacgtacacgttgcaatcttttgtgtgtgaatgtctttctctaattacttaaatttcatttgtggataagaatcaacaaacatacaagttccatcttgttccttcttttgcatacactggaaagatgtcagagtagaaaaaaagaagaaaaagtaagtgatccaacaccagttcatgtacaccattaattctttgactgctctctttgaacttggtcacaattgatcaatcaattatggtcattttatgtctgttgttcgccttgttcgtgacgtaactgtcgaaacagttgaaatccacctagataaaaagaaccaattactcaaaaatttaaggaaatcataataataataagaaaaaaaataatgtcataaattattaaataatattaagcatatgaataatttgattatgatattagtttacaaatttagtgaatatatttgtttctgtttcaaataatcatatctctactgtaaaataattatgaaataacaaaacttgacaatatgatgtataaacaacacatgtttagatattattgcaacgcttctcacttaagttctcttttatactatagtagaatgctatatagtccggtaacaatttaaataaaatattcttaaccaactttcccaagatgcaaagaaaattgattttagaacctctacttttttggtatctactaatactatatatctaatcattatataaaattctcccaccaaattgatcaatgggtcatcttatctttatcgccttttgcctttgtgaccataaaagggtttgagaacttgcatgacagccgaaaaaggtgtgaatattcattgatattaacgtggcattcctatgaacacatagaaacgtataattaaacttgctaatattttcatttcactattattttcaacatcaagtgggatattaatttctgaactgaagataactaagatattaaccggttcagttaaccgattccttgcattctataaatctgacgcaccatatttcttctcataccacaattactaattaaccaactcaaatcttggaactcaagaaacaacaatgtcggagatggccggagattcttcaacatcagaagataaaatccataaaccaaaccgcgagaggaatgtctccggcgaacttgacgtcttcgaagccactcgatatttttccgacttcaacgaaccaacgacgatcgagtactcaagaatccaaatacagaaacaaagcattgttacagaaaatcgacagaagagagtacaccctgagacagaagaacacctccctaaacctagagtcgtcgtcataaagccgcagaagaaagagatgacacgtggcggcggtaagaagctaaccagtttcttgaactctcttcttcgctcagctggtctaaagaagaagtcaaagtcagcgccggaggtggagacaccacgagtagaaaggatgaggaggaagagctgcgtagtgactacacacgccgcagatgcttcgcctctcaccaatgccggcgcgtggagtttaaacgcgcgtagaagaagctttgatgagaaagatttgaagaagagtgatcagaagttgaacataagattttgtgagagtctgtattcggaccaaagggttgagacaaaagacccaaatgcaggagacaagaacgatgtaattggtggatgcgagagtgattcaagttctgaatctgatctttttgagttggatttgtttgctaaatcaaacccctaattaagaacggtccggagaataattttctaatgtaacttcagtcttaattattatcatgaagcgaggttggaccatttccaccttgtacaaagttatattcgtccattcatatgttgggatattttatattgaaaactagctagcagaatttagtcaattgggaatctaccaatagtaaaaaaaaaaccctaactcgatgtcaccaacatctccttttttaaaaaccctagcaatcatcgattcatctttccacccttctatgacaacacctatcatgcaattattctatatcgtagaaacaattttgggtaaaattaagttgatgggcctccccaaatcatgcatcttctttcccactcctactgttctactctatgtatgaaattgaaataaagtatacaatttttttttaaagtattacgcaattaatactccaaacagtttcttatacatatgacaatgctcataacagttgtcagagcatgttgtaaaaagcaattgttataatataaaagctgctctagagcacgttgaagaatgaaaagaatggatctgctgtgtcctcgcacaagatttttgaaagggaatgtataatcttatttaaggtttggttgacaaataaaacctatttagcagaaaaacattaacagaaacgaatcatttaggtacccacgaataacagtaaccttctaagttctaaacaatattgagactactttttgtctattggttgatgattgcgtttgaataataggtgaatttatcaattatcatatagggatcaatatatttgttggcagaaaataataaattactgggatacttttttgcatgtttaacatatatcatgtttcatgtaaaataacatatatcatgttatcatgtaaaatcacgtacatttttgccaacgtgaattgattgctatttattataaaaatacaataattaattctatttatattggattctttcatccgtatttttggcaaatatatagtcaacatatggtcaacatatttatcttaaataatcatgccgggaatattatccttaataaaaccaactaatctataagaatatatataacattagtgtatttaataaaccattattttgtgaaaaaatatatcaacatcttgaaaaatttgtagttaaaaattaaaactgtttttatttaaaacaaaaacccatagattagttaattcatattatattttctatctaccacatgtataagatttgcattacatattattgaatttgaaaagttttattctagtcaaatatggtttatttccttctaagtgtgatcatttcctcttctttttttccagctgtaaaaacattaattactatttaagaggttacccaaagaaagaagaatttaataaaccttaaggaaagtcttctaaactttttttacaaagactccaaaaccgaatcagttctttttcaaatttttactacaagtctataacgtttgactaagaaaattcattatctcttggtcaaagcatcaagtcagtaacaatggccagtttcaaattcttctttgcagccataattttggttctgtttcatccggcagcaataacttttgttgcttcgtatggctcattacaggtaagctacagctaaaattatttacttttcaattttcttaaaggctatttccaccttgagatccaaagaagccatgcgaattctgagatattcatcaaaaattttcttcgacgaaatcaactcgaatctctattcacaatttagcgatatttagggatattatcatttatgttacaatttaggattcttacatcaatgcagcttggcgatcaatgctcatcggacgaagactgcaatgttggacttggttgttttaaatgcggtatagatgttgcaagatgcgttagatccaatatcacagatcagttctccattgtggttagtaataaacaacttttgaatcaaactttattaaaaatgtggtgtttaaatataaattttaatatatatatttgagtgaaacacaaatccaatttggttttaggatcataacttaatgtaagattcttaagagatgatggatcatttagtccactaattttgtcgtatatctttacgattatggattgttaaacccattaacccttaatttctttaccaaattataatttttaaaccaattagtatatatgtttggttctacttgaatactgataacactaaaggtgaacataattcttccaacataagcctctcagtattgagatatagatgtgttgatatattgacataagataggcttgatctgcaactcttgactatgtggggcttaactcttctactgaattttttttctttgttacagaacaattcgatgccgtttaataaatatgcatttttgacgacccacaattcatatgccattgaagggaaagcgcttcatgtggcgacccaagaagatactatagttcaacaactcaacgtgcgttttattaatcaatagacaaaaaatatatgttacttcattattattatttttctatcttgtgaatgttatgtttttgttcagagtggtgttcgagcattgatgttggatacgtacgattacgaaggagacgtatggttttgccattccttcgacgaacaatgctttgagttcaccaaatttgtaagtttaatctctaaatttctctaaccaaaagaaaaccgagtcaaaccaaaacaattatttagcaaacgtttgaaaatagagactggtttagaatataagaaagtaataaacaaaagaacacaactttttttggcattttcaaaataatctccctttttggtttaccctagtgtgtgtgtgtgtgtgtgtgtgtttgtgcaacacgtttgtgttttcaatttgcaaaatgtattgtgagacacataattatttgcttttgaaacaattggagcgttagttttgtcttttattggaagagaaaatatcctaacatgcaatgttttggtataaatgatttaatttggcttgtattgttttgttatgtcacttttttagaatcgggcgatagacacattcaaggagatattcgcgttcttgacagcgaatccatcagagatcgtgacattgatcttggaggattacgtcaaatcgcaaaacgggttaaccaaagtatttaccgattccggtttgaagaaattttggtttccggttcaaaatatgcctataggtggccaagattggccgttggttaaggatatggtcgccaataaccaccggttaatcgttttcacttcagctaaatctaagcaagaaaccgaaggaatagcttaccagtggaattacatggtggaaaatcaatgtgagtgtgatgagataccaaaattccggtttaattttagtttgtttagatatcacggattaatcccaacgtggtattgattgttagatggagacgatggagttaaaccagatgaatgtagcaatagagcagattctgcactgttaaccgataaaacgaaagctttggtttcggtaaaccatttcaagacagttccggttaagatattgacttgtgaggagaactctgagcaacttctcgatatgattaagacatgttacgtagccgcagggaaccgatgggccaattttgtcgccgtcaacttttacaaggtaaggttatatttatttttaattttaatatctccttgaatgaattttaaactttaataactccttgaaacagaggagtaatggaggaggaacgtttcaagcaattgataaactaaacggagagcttctatgtggacgtgatgatgtgcatgcttgttaatttgacttgaatttaacaaaatgcattagtcttaaagctcgccttagtttacaagatatttttaagatatatatatatatatatatatcaaattattttaaacatctggctaatcttagcatgcataaagcattatatttttgggcttagtttaactcaagttttttttaaaataggctccaaatggaacaaaaaattaaaggaaactaaacatttagatacctacgaagtaaacttctgaaatctgaacaatattttgactgttttttttgtctatttggttgatccgttgattatggcgtttgaataataatacgtgaatgtatcaattgtcatattcggtggtagtttagcaaaaaaataaatatgcttaaaaaaaaagcaaaaaataaatatatggggtggcaaaaaaaaaattgttgggatactttttggcttgatgtcaaaaaaacaaaaaggtaataaggaaattttataatctcaaaacaaaatttattgggccgacccgccaaaaacacatatgtattattgggccaatccgccaaaaagcccatttatacgatggaaacaaaaaaagaaaaaaaatatcggtatcgtcttctctctggtgttttccagtaattccctgagaagtagaagtagaagcgagaaggaattcgaagaaacagatttcaacaatggcggcagttcaacagcaacaagcgatgcagaagaacactttatacgtaggaggtttagctgatgaagttaacgaatcgatccttcacgccgcgtttatacctttcggcgatatcaaagacgtgaagacgccgttggaccaagcgaatcagaagcatagatccttcggattcgttacttttcttgagagagaagacgcttctgctgctatggataatatggacggtgctgagctttatggtcgtgttctcactgttaattatgctctccctgagaaaattaagggtggtgaacagggttgggctgctcatccacgtacgtttccaattactgtttctcttctccttttgatttctgaaatttgagctattgataatgttgatttgggggtttatgaaattagggtttgcaattagtgttctttgtgatttattattgattctgcaattagtgttgttagatttgcggatttgaagttaggtcaagtttgtatttgcttctcgattgtatatatgattaagctgagaggttgtctcgttgtttaacaaatgggacttattggtgttgttggtttgtttcagtttgggcagatgcagacacatggtttgagaggcagcaacaggagaaggagattctgaagatgcaagctgagaacaaggctgccatggagactgctgaggagcttcacaggaagaaattggcggaagatcgacaaggagagatggaggaagatacagataccaaaaatgatcctatggccagagcagaggctgatgctctaagtcacggcgatgcctaatgaaagtaagcgttaccggattctcttatgcaccttgtcctgtaggataacaagtatgttttcgcctgagtgtgtaacactgtcactatcacctcatagagtttttgaggttagattgtttcttgaggttgattaccatgttattgctatagttaatagatttggtagtttggtgaaacttgcttgcttagaaaagtaagagtcatgtatctaaaccggatgctcttcatacaaaaagggtcatcactaataacaagaaccaattgcttttgactcaaagaagaaaacctaaatcctactcggaaaatttaaacctgtcaagcttagaccccgcttgtttatccataaaccaaatcagattcccattgctcgggtggactagccttgcaggcagagacagagagctgtctggtaagggcaaatcatcgattgctaagtggatagcattggctttggattcgccggttgctactacgacaacgttagcagctgagttgatgacgggcaaagtgaatgtgattctctctggtggcggtttatgagagtcggttaggaatgtgacccaatcgtccttcacctcaagtgctgggtggttcgggaagagtgaggctacatgtccatctgagcccatcccaagcaagatcagatcaaacctgggactgtcactgttgtctgacgcagccacggttcgtgatctcaccatctgtctgatggcgaattcatactctgttgcagcttcctccgctgaaactgtgtcgttaatggaacatatatgtctcggaaacacatttacctgaaaataacaaaaaaaaatcaaagtcaacattataacaagacaaaatacacagctgtattgaccaacaccatgattggataagtttccagatcgtccatttgttttcttcacaaacaagcaaagattggggcaaaaaaagtcaatagattgcagaatcaagaaaacaagacaaccacaagaatacaagattcttctatccaaaagtcatcaagaaccattccgaacaatctaaccttggagagtaaattatctttggctagcttgtagttgctatcgtcatgattcttagctaccacacgctcatccgcccagaaaacataccatttcgcccaatctacaatcttgtcgtaaggcggctcgatcaattttctgttgaatgtgtaatccatgaggagatagatcaaggagactgaaaatgggattcttaaaaacttttaggtgaaataaattaccccatgaagctaatgagagagcctcctgataacacaatgcagaaagcaccatgttctttaattgatgcttctgatatctcagctatataatcaaccaagtctatgcttagttcctccaaattctcatgaaccctaatttctcccctgtctttatgagtccaagtaagtgccatattgcttcctctgttgtttcaccgatttttcagaaactctacagttaaacaaagaatgagatttaagaatctttacaccaaaaaaaagagatcagatatggagtgagaggaagaaatggttcacattttgcacattgaaaaaacagagataagatcatattctgactctcaacagtgttccaatttgactacaaatccaagaatcagcatttgaatatatacagtaatacaagataaagcaaaataaaagccatgatcattgaattaaaaccaaacacaactagcaagcacagagaagacagcaacttgaaacttttcaagcaaatgatcaaagtaaaaattcaaatagaaaccttagagggaagagaggattgttacagagagaaggtagatggatgatttgagtgaaaacaggttaatgatagattgaacaaagcaccaaataataatgattatataacacatagccataggctatatctacatatatattaatattgtgtgtaaaaaacaaacaaaggattttctaataatctcgcctttataaaatactaacaaaaatgcctcttgggagcgaagaagaatcagcagaaagagattttttaccttctggattttcacgtgcatatcgtcgtgataaaagtaaaacacacacacacacaaacaaaagtaaaaacaaacaaaattggataaattcgaggaattaccagtaataatacttgataaactcaagtaataacaagaaaaataagagaagatggtttatctatcttgtgaggtgtttagcagaatttagggttcagaagaaaaaagggttatgctatttaagaagggtatacagaggaaaggatttttatcttatggggtgcttcatcggataattaattagtccaaatgatagatgtgaatacaaaaggtggataaaatataagaaatccaaaacgagtaaccaaacaactgtcagttcataaaagacaaatggaccaatcacttcttacgtcttgtcgaaaagcaagaattgtggataacttcgttttcttttccatttttatattttttctctttaaaatttaagaaagtcttactgaaataatatcccactatcaattttgattcaaacttaattataagtcatagactaaaagagagtatttataagtaaattatggactagaaaaatgaccacaacatgacacatgaacaccacttcgtcacttaccttcttaatgtgccccacttttcatgaatcttaatcaggcattgtaatattttattttattttctttcaggcattgtattatactgaattactgatgtagataagataaaaaaatttcaaaaaaaaaaatatgataagagtaaattggtaatagtatctttcatccccacattggattttagaccattttaggaatataatcacaaaggatccaaaatcaccaataattttttactattccatcttttatttggtaaacaaacaaaaaatagaaccacatgtatattgtaaaacactttttaagagaaaagtaaagttaatccagatcaattattcttcttaaactacattatcttccattttcaactttcttctttatcatgtcttttgtcattgtgaacctccattacttcttatgttgtattaggccatatttatcaaagtaaaaccttatataatactaattaataatatttaacgtaccattacaattaatggatagttcatggtcgtacataaatctgcgtacgtactacattaactcagtaagaaggcccaataaagctctataccagcacatgcagttaaatgttttagtactgatttactcatgctggttgcaaattagatcagaaacgattgtcttaacactattatcaccaagctagaagatgtggttagatgatgggattcatgagattgccaagaagtgacgtggagatcgaacctcaggttagagtggatcttcggatactagagtgaaagtatgacatgttgaatgaactaatggttgggatgactatatgatgacaagagatgtggcatcattgattctccaaacggagccactggttaagagaatctggaaccagagaaatgtataaaatttgattatgagccgaactatggaggtcagaatgatgggaacggaggttcttgcaggaagatcaatgcgaagatcttttgtcttattatataaccaccccaataatatgtgtgtgtagggttcttgatgaacaaatgtgaaggagccgctcaatattgagatagatagagactagtaccagcaaaatcacatctttgcgaaatatctatataccattttttttataataaacaaacatatatactttgttgtcaccatcctatcgtaataatacacacacacgcctaaatgattcatggtgtcaccaagtatctgatatatatctctgtagtaaaccgatgggttaaactttttaagtgtttaattattgaagatgaatcattacgttttattctactaattaaattgggaaaaacaacaaattaaaaaaactagaaaacagaaaaaataaagtacaatgattgtaagaaatggttagaaaattgtttgcacatggtaacaacaccgcattgcttctctgacaggaaaagagaccagacaatctcccaagttgtgggacacatgaatccttcttacatttgtttccaaattgaattgaaaaaactgtaatgatttcttgcagataataagtaatatatgattcataatgttcaactatcgaattcatggcacaacatgatatgtaagaaaaaaaaaagataagtaaataatggagaatttttttgcagtattttgttttatttatttgcatcaaactggaatgttgattcatatccttaattaagacaacctcttcggtgtcaatatctccacctaaaccattgaggtggcatgatgatagtgatcttaatagctattttaattcaacaaattatatacgtttagtagtaatactatgattctagctatagcaggtgaaaattgggctattattctagaaaagttttaaaattatcttggtggatcaatcacattctttagtgtgtctatagacacattcattgagggctataactagtttaggtccatagaatacttcgaaaaaaatgattggtgatagtgagagacgaacatgagcaccagatcttttaaaaactcccaaagcaattgcatgtttgtgctgaagaatggttgtttatagtctttttttcttccttgttaaagtaattgcgaagtgtaggctgggctggatccataggatatcgacagtggcaaatggatcgcttcttatataaggcctagactttagaaagagagcccattaatgtcctagcaaatttcataatgtatattttcgtaaaatgatatattgagtgaaatttcgaacatgttacaacttcccaaattttcactcaatatatcattttacgaaaatatacattatgaaataacaaatatagttgaggaattgaattggaaagtgaagatatgaggaacaaaagaggaacttaatttacttgtaaaataaacaaaataaaatattcttcttgttgtattattatctagagaagaacttgtctatttttgttttattttaatagaaaattattaacggcctctacacaccactcatattcaaatccaacagaatatgtgattatgtatgacctttaactttagttgttcagagaaaaaaaaattgttcaaagaatatttgttgtagtgtattttgtccaaggcaaatgtaaaaaataattaaattctgtgtttacacaaactaccgggatattaaactttaaattttgtgggtaagctgtaaaacaaagtttcgtataaatatatatgaagtgaagtttcaatattgttttctgcaaaacaattatataaattgctaatgtttttttaaaatgtattcattctcaacttatatcaaataactcaaaaatgtttctaacgacatgatttcgattatttattcattttttgtcttcgttaagacttgttcatcaatgaaacaattacaaaacttaaatggatctaacaatgaaataaataaagcttttgactatcttgagtataatttttctttttattataatacgatttattgtcaaaggttacagccagaatatacacttaacacttatgttgaactatagggattcgtctgataataataagtcatccaaatctatttttgaaaatattttgtaagataatcaaggcttaatgatcgatttctgattacgtacttggccatatatatacactgtatacaacttttttttattctttgcgagtgctaatgagtaatgagtggcgcagaaaatacttagcctttttgggctttaatgtttataaaaatgttaaaatcacgattgttttaagttgcaagtgaatatttggctttaacaaaagcatctaaattcggcttttagaaaagtatcgtaatcattaattgagccacttgaagatcatcaaaaaagcaaatataattaatgatctaattagtgtctacaaccctaagacaaaggatccaattctctcgcccgatgaggggcagagattatccaagagggctcatgattcatacataacccatacaaaaatcaatagtaatatcatgacatttataatgaatgcaaatttcaaaaactgactactaatagttagatttaattttaaacgctggaaaaaatattttatttactagatgcttttatatagggtggtgcagattccccaatataaatctagtaaatgaaagatttatttttacaacaattacaattgaatttaacttttattagtctatttttgaaattttcattcattatgaaatgtcataatatattaccaatgaatcttgtaagaaaatagatatttttgtgaccacaaaattaatgcccaacgtctatcttttggttccaatgcgcttgtggtggatcgatcatatctacaatgaaggagatatgaagaatagatgcagggacatatggaaaatctaaagaaataaatatatgggaaagaaagcaacttgcactttttttttgttggtgtaaacgttaagaatttgcacttatttttggattaatggattttttttcttgttggatagttaagtcccaaaatgtatatatatcctttttgggagaagtttagcactatcgatcaagaatgttttatatacccatatcagccgttatatatacatgtgataatataacgctagtttgagagacaaattgaaatataattaaactgaaacaataaatttcatgcatgttgaactatctatgtattgctgttatttatcataaaaggcaaacatctttttctttttcaaaagcatagaaaccctataagctaccgttttgtattttaaggctaattaattgttagttgaacgctaacaaatagtcttaaacttcaatctttgtaatgatgtgaaagataatatgtacactttaccgctcctaacattccaattcatcacttttaaatatatctgtaaagttatttgtatcttttaatgtgattatgtagacgagttaccaagcaaataaaacgattaaaaaaactgcaatagatgaattaccaaacacataaatttattaaaatgtgttacagaaaataaacgcatttatttacgagcttaatagatattcttttatcgttgaaaggagtagttttttttgttgttgttgaaaggataatagttatgtacaattacaaagaaaatagagatcaaaatgtagcaacgagaaaaaaaaaaaatgtacccaatacatgtatccttctgttttcctgacggactttccccatattattctacgctatataatttaataggagtgctgtgcactggagttgttaattgtactttatatgaatattttgggtaaaaaacaaaatgaatagttaatcaacgatgtatagattcataaacaaaaaagaggaacgtcgaggatacgatcttgtaatttatattattgcaaatgactcataaattctgtctaatccatacatacaatacacctttattttcatagatataaacatttgatgtaaaataactattaaagggtgttgagttcctatcggacaaacattattcttccagaaaacaaaagagaggaatatattgaattatgattgttgttcttgacttctttctctctcatattgttgtctacgtcattttcaagcacattttaaattgaatttttatccttttatatgtggttaataatctgacaattgtcaaaaaaaaaacttcatattgttgaagaagacctaacatgatctagcgactaataagcggttgtaggcatgtataacgaactaactaatccataaacgaatgtgtgtgtgaaaaagaacacattcaaagttgagattatgttttatctgatataaagtttggagttgaagttttcgttattggtaaaaggaacaactgcatatataacacttataatctaatcatctgtatcggccaatggccatttagaccgtgtaatcaattactcatcaatccgtttaactgactctgtccgactaagtgaacaatttaagaaaatttgagtgtcaatccatgactaagacattaaaatctgaaaagatggtatatttttatatatattttcccaccttccaatttgatcatgtcgtaatgatggatcagcatgttgctgatcgttctagaatctaatatgtgacattataatagctagtataatgtcctttgcccaatgatttactcactaactcacatgttagatatttggatcacgttgttcaacatgctaacattaacaagtgatcgtcctattgtcatatcattactcggtttcatttcttctcaaacttaacatttttttatcacttttaattacgaaccaacaaaaaacagaagctaagatggcattcgggttttcgattcgacccactagtttataaataacttgaaaattcatatttaggcataattactgattaaaataaagagcgcgatatttggataagaaatatagtaagagatttgcttattgcataaacttagctaatcaattttatagatagaaaaacattgaaaagcaaaccgaggggatgcgataacatcatgaagcatcacaaagcaaaatagaaaacttacaccaaaaccctaaagaagttcgaccaacgtgccaaaaccctaacttccttcccagccataattattattaattttattaataagtactagccatacttcattaaacaagtccccgacacgataatccatcaagcgaaaccaacattccttggaacagccttgcacttcaacggattcttcatctccatagacagcttcagaacctcagcgagctcaacatcacaagaacccttcacccattcaaaattctgaattagttgaccaatccagagatgaacagtagctagacccattgctttaccgggacaaacccgacgaccggatccgaatggagccaatctaagatccgagcccatgatgctcacatcctcactaatgaacctttcaggcataaacgcttcagggtcggtccagattttagcgttgtgtgtgatggaccacatgttgaccatagctatggttccagcagggacaaggttaggacctacgtggacgtcatggatagcgagacgagcccaagagagaagtggaccaggggggtggagccttagggtttctttgacaatagcttgaaggtacggcagttttgggatgtcggaatcagacaaggatctaatattgttacttgtagcagaagctatctctctgtagagtttatcttggatgtcttgatgcaaaaccattcttgcaagcacccattccactagaatcgcaactgtatctgtccctctaaatatcatttcctaaaaagaaaaagaaaaatcaaaagaatacaactttagttaccaaatattaaaaaaaatcatattcaaaatcctctcatcacaagaaaatagtaaaagtagcttacccaaagaacagcaatcatgtcagaatcagacaacttttcatccttttgcaagccaagcaagacatcaacgaagtcattttcctctccattgagattattacccttcttcatcttgtgtttctcaattattccgccgacaaaagtgttgacttcagagaccaaagctctacacctcttcctcactccttggaagtcaaaccaacgaagaaaccaaaagtgatcactccagttaaaaatcccaagcaactcgtagccttcactcaccagcctctccaaaaaacacccttttccattaacttcatcaaaatcgtagctttcaccaaacactgtcgtcattacattattcaaagaaccaaagtgaacgatctttttcacttcaacttcaccacaagcatcagacgtaacaaggcttttaatcttcttgaccatcttcataccgatgccaactctaacaccctcaaaactcgcgattcttcttggactgaaaagatgagtggaggagattctcctcagattcctccaatactcaccatacggtgcgaatcccatggcacggtgaaacaaaagctcgtaagctgactccttaaccggccggtcagcaaaagcagagctgctcaaaatctctttagccgtctccggttcactagagataacgaaacgcgaaaacccaactgagaacgccatcaacggagaggccttgaagcgtttagcaagagcggcgagaacacggtggggattggagccggagaagacggaaagagaaccagatggtcctggaatcgaaacccgactcttggatgacccggtccaggcccatgcgagcccacctggtgagagcaagaaagcaactgtggctatgataagtgagactgaagcaaaggcttcgaaggttacgaggttaaaactgttaaagaacagaacgtaagcttccggagacatctcaggctgagttatggcaggagagagagagtgttgtgagtgtgagctagagagaagtgtttagagtttatgaagaagatatgaagtgtgtgtgcatgggaagagtgtttatatagatgtgatttagtaattaatcaggtcttttgaattagagtaaaatattaatggcgaattaaattttttaaaatttgtatttgcatgataggtcaaaaggctagtcaatggtttaatggcggagtgtttttttatgtagattttcattttgttatttactaaatgtttttgaaacttgctatttatattcagtctaataaataaaaaatgtcatcgctggtattgtatttaagctaaattttattggtttaagataaaagtgaatttatttttgtaagggttttgcagggtttctatgaacaataatttcaatgtaatgcacttcatatggtttgtgtggagatttaaaaacaaattttttttcatatacttttgcaattatattaccaaaatatagttgtgtcatgcataaaatattgcaacaaagtcaagatattttcattcatgtataaaaaatgttttggaaatacttcactaccatcaacttctactactattagttttttttttatagcaataacatactaatatcaacatagcattaaaaactaataataatacaacaatctgaaaagattcattctctcctgatacagttttaaaacaaatgggtggagataattaaccagatttaaaaatattattattatcacaaaagagaatgctaaagaagaatcaaaatgagaatcgtagccgtcctagccactattactaaaacttttaattgtacggatttattcatattttagtgttgctgacaaatttttaatttgataataacactaacttgatttagtaggtaaatcgtgaaatgaaaagtttatcatcatcatttatgtgaaaatcgtggtaaacattctgcaactccatcattccacaagttgaacaactagaatctaaaaaacaaacatgagactctataagttatttgccatcattccacattttatggcaaatacacactattaccaatcagaattttgaaaatctactaaaaatggcaaacagaattgacttcttctgtattactccattttgtgtttgttttacactcataaatatgagtaatacagacgtaaaacagaacgatagtaatgctcttttttttttttgcttctttgccctcataaatatgagtaaaataaagtaagtttagatcaaacggtgcacttaatacatgtggcatttaattcaaaggcgtgctcacatgacgaacagaaacaaaacaaaacctgatcgtttatggctaagtgttaggggcatctcaaatgttcgaggctttttatttcactatttgatagtactattcgactttttttataaaacaaaaaacgagttaaacttacgagagacgtggaaggagtcaaatcaatagtgaagtcaatatcagtatcataattgaagaagaaaatctttgccgtgtgattttaactttagaagcctgcgtggtccttgtaatttttttgcaaatcactgtgctctttttatttcatttttttggtttacaagttgtacaagagaaataaataaactaataaatacttgtactaggatttatttacgtagagaagaaaataataaaaataattaagggggagacaaagggcagtgatgattatgaaaatacagagagcaagtgtagtagaaagctgacattagtatacacgtaaagctctgtgaatgtacatggtctactgttaggcttaggcctgcttcgttcagctagtttctactgttttcgtattttatcagtatctttatttgacagcgaaccctttcacatttactatagttgtatcgatagtaactaaactagtaatagaaatagagaacaaccgtttactagaatttttacattttcgtattattatttgatttcgtataatttatctataacttaattctgaaaaaacaagattttggagaccattttccaatactgtaaatttaataaaaaggatctcactcataatatttcgatcaacctatattttgtctaataatatcacaatcattatagtccgaaatactctcattcttgacatttgcaattccataatattgtgatattattagacaaaatttatgatctatgatcgtcctaaagccagaccatggtagtctattaaaatacatgactacatagaaatgtgcagttacaatttttttttttaaagcattgcgtagtttaattagatgtagttttatagcttaaaataggttgattagagttgtagacttgtagtaatatatagcaaaatcaattcatgatattaatttgtcaccaaataataaatatttgataataattttgaaagtagttgaaatacctagtagactttcactgataaattcatagaaattacgatatttattttataagaagagcatgaaataattttaagcaaatacattatgcagtgtgaaatagtttgattagagaatatataataaaaaacgaccccgaccatggagtaatcatatttaatagtttttacaaactagtcaacctatttttattttgaaatgtttgattacgattctgtttttgaaaggaaagcgtaaagtagtttaaagtttataacgttaagtagtttaattagaattgtagcattatatagcaaaatagtgtatcatatttttttgtcgccgaaaacaaatatctgataaaagtttttaaacgaattgaagtattttggtagactttgaacaataacaacatagaaatacaatcacaactctctcttctacaaatataagcataaaatagtttaaacaagtagtgtgaaatagtttcagaaaagtgataacaagaagtagcaaaatcaaaacataaagtattcatttatttcatctcaaaaatcatacctacatatacacaattacaactatattttctaaataatacatagaaatgtagttatgactcctttttaaaatacattagcctgaaatatttttaatcaaatgaattcatgtaacataaagtatgaatacaactacattatgaattagtttatgagaaatttatcatgtttgagtgttttgattgaacatacattatatcaaatgaatattacggatttgtttgtaacatcataaccacctctatgatactacatgaatttttaagttatttgtactacaccaacattttcgttaaatagttcgagaaattatgtaacatttttttttagtttgaatctatcatacttcatgttgaaatagatcttaatgaatacaatttgtttttcaatgtatgacaattatccctcttataacctattactcatatttgtttgatagtttcacaatttaatttgagatttgtttttgtataaatatcattcaaatataaatagacataatttcaaattatatattatcatattttagttttcttagatttatctttatcattttagatatttataataggaaatattgcattaataataataaacatttaatttatgtgtattttaactaataaaaaaagttgataaagtttttgaaactaatagaagtagttgatagactttgaccaataattaaatacttatgtaaagaactacatttatgacttttgggaactctgaactctgacagacttagttaaaagagcatgttatatatatatttttttttattgaaaaagacataacatcaggagtattttcactatagacaactgttttgtttgtaggtctataatagattttttacagtaaagcataagaatagatatgtttgaacaaataagaaaggaagtggaaattgagagaccaatcatgtcaatgtctcaacaactagacttcatgtagttacactctcaactagcaaaaagacttctagttcggttcaaacataactagagtgatctcattctcttgtcatcaactcttccccttgtttggtatatggctaaggatatggattgggaatttctttttttattaaatcaaatattttcctaacgaaaattgcacactgatattccatttggatttggatatggatcttttttttccctcaagattgatatggatctataaatatatgcaccgaaaaaaaaaatatctataaatatatgcacatgcatgtgtcgattgatgatattttttttgtttcatagaatttctttttttatattttatatccaaaggttgatgctttccattaactgtgaggttaaaaaagactttacatataattacattttccaagtaatcaaaaacatgcatgagcatacattttcaagaaataaaaaggagacacaaatttaaggaaataaaaatctagactataacattaaaataaaccaaaataatacaacttcgtatacgttgttcaaacatttttcaacttaacattttgatttataatcatatagctttatcttagagataaaattatactcagaaaagtttcgtgaaacatttcttgatatatggtagaagtatgtactgttcaaacttatctcaccttaattgctttggctccatttttataaaataatacactctaacttcttaattaaagatttttgtaagcaaatttgttatctatgcttagttgtgtatttggtggctcagagggcaagcagacatttaaaaaaaaaaaaaaacgattcatgggttcctcgaaccatgcatatccactagttctttattgggccgataataggggaactcttaaatcagcacatcaagcttcgtaggaagaaaatatgttttttgtggggcttaatctgttttatttcaaaacaaatcattctataacaaattttgatctcaaattcacgattaaataatatacacaagtttgagtcttatgaagtatatattttattgcaatgagccttaaataaaaagtcataatttgttgttttattatataatgttatactgaacaagcattccaaaaaggcctccgtagcatagtggtattgcgttcgcttcgtaagcgaaaggccgcgagttcgatcctcgccgggggcttcttttactcactcttttttatatctctttcttttttatgaaattagaatacaattcttcttagccacaactttccataactcaacaatatacataatcatcaaaaacaaacaattcaaggaaaacttccctccttaccataaataataatagtagtataattttagtgtaaaaatcttgaagaaagccctacaatacaaggctacaacaatcccaatttctcctcgtcggagatttctaagtaaaaccctagaactaaccattatatatattataatacaaatatattcatccctccctctccctgtgtcttactctgtcttctcttcgaactgatctgagatttttgattctgcttctcttctcatcttctcccaaggtatcgctttcgttcatagttcatacaccaattttcttactgttatcaattgtttgattgatatttgtagttcttcaatttgggtttcatgttctgtcttaaaagtcttttcctttctgttggaatcctctgtaaaagcttaatcttttcacattcttccaatatctagtagctgtatagagatctatgtagttctaacgtatattcaatttatagattctcaacttgcaagtcgcttaagtcaccaaataaatctcttgttaaagctataagagatctaatgagatttgtggattccttagtgttgatttgaatggcaatgtgagactaaaatcactacttgtggttcatccatatgagtatgttttaatttcgagacatttgtttgattatatatctgaccttagtgataatctcttgaatctaggtagagatggcacttgaatcaaatgctccagtggtggacccaaacactattggcaattcttttgttgagaaatactacaacctcttgtataagtcaccatcgcaagtgcatcagttttatctcgacgatagtgttttaggccgtcctggttctgatggagagatggtttctgtcaaatccttgaaagtaagctattggatggagttgctttttgtgttcaaacatatgtaaatcttgttattggaagcaaagtttcgtttttaagagttgtttaatcttgttttgcaggctatcaatgagcagattatgtccttcgattacgaaatctcaaagattcagattttgactgctgattcccaagcatcttacatgaatggagttgtgactctagtcacaggtttactaaccgtgaaagaggggcaaagaatgagattttctcaatcgtttttccttgtgccgctgaatggaagctatttcgttctcaacgatgtctttaggtatgttgctgatgagattgttgaaccagaagctaacaagaaagaagtcgaggaggttattcctcaagtggtccaaccaacagagcaggtagatgaagttgcagagccggttactatccctacccaacaacccgaggcgaaacagacaaccgaaaatacagtgaagaaaccagaaagagctgtagcaaatggacatcccaaaacacaggaggataatgttgtgaacgataaaagcaatggtgttgatgctcccaagaaatcatttgcacatattgtgagtcctcttttttgtgtgaaatcctattctatagcctaatctttgctcatataatctaaatattttgcaacttacccttaggtccaagatttggctcaaaacggtgctacattcaatgccaaagcttctcctgcaaagcctaagtctaagcctgttacaaagccgagtgctgctcgtgaatccaaagctcctgctcctgtttctgaacactcttctgctgcaacaatcgaccaacaaggttttaaatcaatgttttaacatttcagaaaaactgattttctttcacctttttctatgtcttaatatgattttaccatttttcgtgtatcagctgagggttatacgatatttgttgccaacttgctcatggacgctacaccagagcaactaaatgaaacattcaaaggttttggagctattacgaaagatggtatccaagtgagaagttacagggtgagttgtttattgaatggatcttttgaagaaacttgtttcacagccaatttttttgaaatcctcattaagtttttcttttgcagctcaagggaaactgttttggctttgtgacattcgcatctgctgaagctgtgaaattggtcctccaggtatgtttcaacatcaacgatatttcttacaaactttttggttataaactggattcttcttttgatgttctactacacaactctaggctcacaaagaatcagccatcagaatcggaaaccgaagagtttcaatagaagagaaacgaggtaagtcaaagtaaagtttagtactaatgtctccaacttcagggtagaaaaactgaaaccattggttccgttgcaggcaacaacgataatggaagacccgcaatgcgaaacggaggttataggaacgacaacggttacagaaacgatgggtataggcctcgaggcaacggttccaatggaggtcgaggctatggaagaaatggatctgagagacggggtgaatcacgcaatggtgaggctcacaatggtgatggcaaagttcatcagaacggtacggtagaagctagccgttaaaatactcaatccagaggctaaacaagtttgaagtcatttgttaaactctgttgtgttattgttgttcatttgaaattgaggttttataggaagagatagtgagagggagagagagagattagaagttcttttggagtaggtttatctcttaggtgataatcccttctttgagattttgtttgggataacaaaaatttgatgattacttttaccttccattctgaatcatcttcatttggtccggtttacacataaccaaaattaatcggaagttcgttgtcaattgattgagacatcttttaggaccaaaccgaataaaatattttctagtgaaaaaaacaaatgggcaacgaacccttaaacttatgggcttgatgtgaatggtgttggtcttcaaacgacgacgtattgtagtattctctaagtttgcattattacacaaaccaacaggtgacgaacacgtagcatttttggtttttatggtgtaaagatcttgacgtccccacttgactcaacaaagtgacccaccaaggattctaaaaatcttcttttcgatttatagatttcattctcaaacctaactgtcactgaatcaataataatcagactttttcactaagttatattgctcattatgctaatctaaactcttctccatcaaacgattagtcgccaataatcaaactttaccttgttaattactttatattatcattgttaagtcttttagtttatatactatggtttattgatgattgcctttgtgtagtagtagtattcaattacttttacatggaagtgtttttattctcccttcactttttcacaagcaacttgcttgcttcgtgggtcctttggtctaacccacgtgagtgacgttgtcgagtcgctagatttatcatattcaaattatgttgttgttaactctcccaatataaataagattacaagagattgtaaaattataaatcaacgataccataagtaatcactaatcaggtctgtcattttcttactctctatatacgtttatgtctgattttgttaatttttgaggtaatatttttttttttcgagtttgagatttttttttttctcttttacaaaaacttgtgcaaaaaaattaaaaagaaaaggggaaaaaggagaaaacggatctttttacttgggagacacgtgtcgtgacactggataactcagtcactttacgacacgtttcttgaagcagcactatggaacgccgacgtaatccaccggccacgtgtcgttcaggcagctctctcggcggccacttgcctcctctcagtcaaggcctgtctctctttctttctttctttcttcttctctctcttttcctctaatgtccaaaagggtcttcttctttgtctctgctcttcactttcaattataacctcttcgtcttcttcgccgtctctggtattaactccggcgagttttttttttttttttactttgatatgaatttgcgagatttactgtttaattcatgatgacaattttggatttttgatcggatgtgaaattcagagtttttcattcttcttcatcatcttataacaaagaagaaacaaaacaaaaaactttttttttctttctttctattgtttcggaatctatgggtgaagcaagcagacaacaaagggcatggaacagagaaatgacggttacgacaaatctttctctagacatagataaatacccgagagatctgttacgaggtttcatgtctgaaaacggcggtggaagagtctttcacggcggagaaacaaactgcgatgatgagagtacgattgagctcaatcttggtttgtctttaggtggtagattcggagtagacaagactccgaggaagctgaaacgatcttcttctgttttggacactgtaccattcaacgattcaactgtggctgagcctgagaattacacggtgggtttagagagaacgacgtcgttaccggcggagatggaagaggaatggaggaaaaggaaagagatgcaatcgcttaggagaatggaagctaagagaaggagatgtgagaaacagagtttcagagttgggaattctgatgaccaaacggtgtcgtttgagaatgagagatgggttactgcgagtaaaagtggcttcttgcagagacatttggtttcttctaatagacaagtctgtggtgttgattccgatggaggaggagcaacgggaggaggtagttcatcgagcttgtcggagctagacaacaaaaatcagcaaggtagatttcaatacattgttggtttttagacacaagattagtaacactaaaatgtaaaattggatatttgtcattgaacctgtggaattgtagaatgagtgaatgtattcagtggaagagtgatctgagtctatgtgttgtaggatcatcaaacagctgcaatgatgaaagaagcccgaaaatcgtggcaggatgttcatcgaacagcggaagccagggaacagagagaccgagtgtgactagagccaacaaagtgaatgagaatgagaatgaaaaaagagtgagaagtgaagactcggtggataggaaaggaaaagggatggctacgtctactggtttggttgatatgccttgtgtgtttactaaaggggacgggccaaacggaagacgggttgatgggattctgtacaagtatggaaaaggagaggaagtgaggataatgtgcatttgccatggtagtttcttgacaccagctgagtttgttaaacatggtggtggtggagatgtggatcgtcctcttcggcatatcgttgtcaacacctcttcttcgaccttttaaatcgaagaatcggtgaagaaaccggaagggtcttgtgttctctgtttcattttttttcttgttgttttatcttttggatctctctggtttttggctataaaaatgaatgccaaaacctcaaatcttgatgaagatcaagattctcatgttgtcttaggtctaatacttgtgaacatgaaagtatcatcatcgaatgattctttctcgagctctcgcgtttaatataagtcctctctgcaaagtgcgtataattgatgtgtaaacattataacagtttaacaatgaagagggaacaagtgagtacagaagagctcaagcagttgaaaagtttttatgaagcaagtgtagttgcaggacaactatcaaccgcacaagccaagatgtctctgtaatcttttgatatcgtgaaagaatcgtggactcgtccgtcactgctcttcttgtactcaaacagaaggtttgagtgatcaatggctgtaagtttaaggaatccgtaatcatagtctctgaacagactccaattcggttgaagatcagagaattcagcaagaccagctcctccacctccagcaacaatgtgaatggttccattcaatggagctttgtagttactcttctcatgactcgtgcatacactctacagacaagaaacgaaacaaacaatggaataattcccttttcttaagaaccattcttcgatatgccagtacagtacatgatgtttacctggtaaaccgggcatgttctctcgtagttatgtgcatggccatagatagcaatgtcgactttgtacttctgccataacttctgaagactttctcttcccataggttcggcaaaagagccttcttccgcataaaaatatgtggaagaataaccgagaacacggtgagcgaggaatatcagccatggctgcttttgcctgtcgactgatgctaagcagtgttcaatgaaattgtattgctctgttccttctctccagtcatgttctgtgtcagccacacagaacctaaacattccgtagtcactcgagtaccagaccttagctctgttttgagcaggaacatagaacattgtctcagctggaacaccacattctcctccagagtctaaaccctcgtaaaacgatcctgagttgggccagacacgctcatggtttccgctgcacagagtcaaattttcaagactaggtaaacaagaaagccaacaacattgtctttaaaaaagaaacaaaaaaagcaaaaccttgcaatcatatatggaacagtggaagcaataggctcaatctgtgctatgaattggtcccattgagaaaggtatccatttgcataacaaatatctccaatgtggaaaactgcatcagtcttctttagatctttaataagttgctttgtggtgttgagagaagcgcgttggaaatcattgtactcgcttgagccatcgacttctgcctgcaacaacatggcacaagaaaaggtcataaatgcggttttgagaccacagcaataaacagtctgatatgctttaagactaaaagatcaaacctttcccatgtctccaaagattacaacttgttggacagagttttgtcccgggaaaggagaagatttgaattgatattctttactccagatcaatgcaccattggacaatctatgaccaactctgtaggtatacctatataatgatcaatcaaagctcagtgattattactccatgaagctaatgcattggtacaaaacagagaaaacacatggcacatacttggagtttggccataactctttgagaaaagctgtgtgtatgtatccgggatcacgccatcccacggtccttgcaggagcaccgcacatgctgttacgcgcgaaggtcaatgttccagcaggtgacagtttacgttctcctcctttaacgccccactcaacaacaggttcagctaggttgagtccataaccactagtccatgtcactgtcatctattttacataactcattttcacttctttgtagcacagaatatgataaccaaaagagttttagaatcatacttcatcccattctttgcctagcgccaaccgcggataaactggtgcgtttggattctcaaaagctactttgtttgagattgccacaagcttgggctatatcacacaagaaaagaaaaaaaccaagggatggttaaagatgaagctaacaactagtaaagctagagaagttgtagatgaatgagagtgttacattcaacaaaccgccagaaaagagcgcgaaggagaaatccgatctttggttaatcagttgaagcttcaaggaaccagttccagtattggtgtatcttggattactaaagtttgcatattgaaactgtaaagaaagaaacaggaggagaaagctaaaagacttgcaacagagaagaaaagtagaatcaacagtgagaaaacaaggaaaccttgacaggcgctgaacaaagtcgaggtggttggaccattttgttatctcctggacaagtcgaagcactgcaggaacaaaacagtgttaaatctcttatttacaatctcagcactgatttgataagaaggatgtgttaaactacttgaaatctgcaggagaaaacactccaatccaatcatcatcagatggtttcggagaactatattggaccaatactaattcactatgttgaccctgaaaaaaaaatgcattgaggtttagtaattcatcaaaagcgatgagaaatagaggaagagaatggttataattacgttagatccaagaactgttggagatgctttgacataagctttttcattgagaccaaatgtaatcttatggacagcaattcctgataaaggttggtcttcatgagatttcacttggtgaattgctccaagaactgatataacagtcaccaagattgcaactaacgattctctcatgtcttctaagactgaaacaattcgagcgggcacaagaaagatgcaaaaagactagcaattggattaaaagaaacagagtgaggacattataactaacttggttttgctttgaatctttcggagaaactcaaagattgaaactttgaagaagattagattaataagaagagtctttaataattagaatatccagtcttgagattccccctcaatgatataaaaaagtcaagactttgctcgtcaacggccaatttacattgcactggagtagaagaattcacatcaagttttgattagcggaattttaaattgcttaaatttagtgaactcgagattttttaatgtctgaatgagaaaaagattactcaagaatttaacataaacaagattaatacattggatccatatgacattcatgtaaaaatccttcttctaaggcgtgctatacatgatctctaatccaaagtgtcaatgcttttgggatatcatatgggccatccaatgagagaagaataataagtcctttgttgttgttaggccgttttgcatgaaatccgagtaaagagagataaatcaagtcactaaaagtataacgcctgcggttattgaaatatatttatttattttaagcattcatcatatatgcatgcatatacaaaggagttttctttaagatgccaatttgcaatagccttgctttgaacatttcatgttgcaatcagtatctacttggcaacgaacatcattattcatcactttaaccaaattacaaacacagtcgcattggttgctgcaataacctccctctgggcaatgcgctttacaatcactatcattcttacaacatggaggtggtggtccacgataaccaccactaccaccacctggacaaccggtgcatcttggttcattcggcatacatgagttttggttgacagaagtttcactgttttgaatgctaattccattttctgcatatattaataagagataagaaacaaaaaaaaacatattaatcaatgaaaaactatgtaaataaaaaatactaaaagcacaaaatgaaactttaaatattttttgtttacttacgggttacggcaaaaagtagagaaaccaataacaacaattttaaggaagcgatcttcattttcaaagtcgatgtttttttccttcactggagaagtttttggttgtttggtaaatcttgcaatggtgaagttgaaggtattcttcatcgatttttttatttttatagtccagtttaggcgatggttagatactattttttttaatatttacacgtggaaattgaagtataattgttattggattcttttgactaacaacaaagttctcataaacatggaaatctaattaaagttttaattaatactagatatgtttaccaaataagagttgcaaaattggaaataaaggatttttttcgatttaaatgtctatctatatatttcttatcagatttagtggactatgctttatattagatgatgattgacccacgcaaattttctaaaatcattagtccaaatgcttatgtctaaataagtattggatcaaagaaaaatcaaagatgattttatgcttaaaaaaaaaacataatttagtgaccaaaatactattgaataggaacaaaatcgagatctatcattacatgttgctacaggcacggtgccctctttataactttaaaacattttgaaaacaacaaaagattacacagattcagaaacgaaattaatttgatccattatttaaaacctctaaaaccttgatccattttaagtaatagacatcgacccacttaaccactgaaccgtcttattgagtaatttaaccggaaaattttactgaaccagaaccttccaattgaagaagaggctttagtgaatcatcttcgtcatcgatcatcagattcttcagattcgcaagtaaaaactaagaatcgaccaatcgtttattacacgaatacttacttataaagacaatattaaataaaccagatatttttattccaattaaccgtccaaaataaaaatagatagccgttttattttaatttctccctatcctacaaagtgaaagtcgccagtatctctttgtactccctcgctatctcgaaagagtcgtggatgactgcgtcgctgcttctcctgtactcgaactgaatggtagagtgatcgacgacaattaaggtgacgaacccaaagtccttgtcgccgagcaggctccagctggactgcatgcaagagaaatcatctagactggctcctccacctcccgcaacaacatgaatagtcccgtttaatggctcctgcaaggatggttggatggcgtgatcccgaatacatacatacagtttttctcaaatagttgtggccaaaatccaaatatgtaccatgtgttttctctgttatgaacctaggtgatatttgagcactagctacgataatattagaactaatttgataagaaaatggaatgtttttttcttaaatttttcttaagttttgcttaagttttgctcaagtttttcttaagttagaaagaacttttgggttcgtcatttcttttctgagagggaattaaaaagtcaaatttgttcttgctttttagctgctgttcaaattcagaatcttgtcttcttctctctcaatttgttccatagatctaatcagttgaaataatgaatctgaatactatatatatatatatatatattctaatataatacaatgatgtttgcatatacttttaaaagaccctgacaagaagagaaactagtaacacatcaaactttaaagaatttgtaaagaaatttaagactcattgcagagaagagaagcacaaaacctcgtagtaaaccttgatgaggaaaagaccttgataggcgtagaacacagtagaggtggatcgacatatttaactcttgtaagacaaatcgaagcactgtagaaacaaagaaaaaggtgcaatgtaaagcttttatcatataaaataacacaaagctttacatcaaatccgagaactgttggagaagctttgacataagcttcttcattcacatcaaacagtgtcctatgaattgcaactcctgacaaaggttgctttcgatgagattttccctcttgaattgacacaagagtcaccaaaacatcaacaagtttcccatttctcacaagaagatcatgaaaacaaatgtctgaagatgaagatgaatgtgatacaactgtgttctagagataacttgtaggaaacaacatttataaagttggtgactgatgatcaaaacctagaaacataggcacaaagcatataaagatatggtgatcattagcattaacattcctttcacacacttccgtgacttgttggtttaagtgtttctaaatctagaaatccaattgggagccaaaagaagactatgatgtggacatgtgacctgcgtttgccaaaaacgtaccttttactaacccaaagtccaatcacatttgggtcattggactattcaattgcaattgaaacccaacacaaagtccaaaacactcataaagtctaaacatttgaataagtgattcttttcactcgtaagaagccaaaattcgccatgagagaagaacaagtctctgattgcggatcgattactcttgaagaatggaatggttcttcttccactaagctattcaaaacagcaaccatcactgcctcctcttctctctctatccaaaggttcttctttattcctctttgaaatcaatccaaatctgatagtttcagtggattcacaacaaaattgagaaactttcttgggttttcgtctcctgtgagtgattcataggtctgctaatcgctttaatcatgtgtggagacgagttcttcaagcatttgtaccagaggcaagtgttttctctctttttccctttagaatctgtcctccggattagggtttggctgaattgtactttgtctagtgcagggctttcctggcagtgtaactccagattatgtagggtttcagttatgggacacattacaggtatgtgagaatatgcttgtatgccttatagctactgtgaaatttgaattgtgactctcggctatgtttgttgcagggcctctcaacttatacaaagatgatgctttccactcaggtgagctaaagctaaagtttttgagcttctgagttctctattttggtccaatttgtctgctgcagcatttctgatttggactattttcaggctcttttgagtgcaattggcgttggtgagaaatccgcaactgttataggtgctacatttcaggtgagtttttccattgcttacatataacatttcacactagttctctcaagaactataaagcgcaatggagaatagtgattctatcttgtgtattatgcagtggtttctgagggattttactgggatgcttggaggtatattgttcacattttatcaggtgcctatgtagcagattcttcccaatcataatacacatcgattctcttcccttttctttaagatttagattggttacgttcttatttaatgggaactgttctgttcttcagggttccaacctggatagcaatgcaaaaatgtggcgcctagttgctgaccttatgaatgatattggtatgtaaaagttagttgtcacatcacacttgatactaattgcctgtatttggttctcagttgaatgactacaagctttgttgcttttattgcaggaatgctaatggaccttctttctcctttgtttccatctgcctttatcgttgtggtttgcttagggagcctatcaagatcatttagtgcgtatcatttcttgcatcaaacattgaagttaagacttcggtttggattgatacatcggtttttaacttttttcaatcttggctattagctggtgttgcaagtggagcaaccagagcagctctaacacagcactttgctcttcaagacaatgcagcggatatatctgctaaggtactctttacttcttgtcactgtgaatgatatagaaactataaatgtgaactttgagtaattctttgcttctattttatctattgaaaggaaggaagccaagagactatggcaactatgatgggtatgtcattgggaatgttgctagctcggtttacctctggaaaccctatggctatttggctttcgtttctctctctcaccgtgtttcatatgtatggtaagtcacaaatgaaggttaaagcatagatcaaatcagaatttctctcactgtttgcctttcttatatatttagcaaactatagagctgtccggtgtcttgtattgaattcattaaactttgagaggagttcaattcttctaacacatttcattcaaactggccaaggtaatttcgaaatgcgccattgattctttcaagttttcagtggctttcctttgttttttattggtttctctttattattgcaccatataccaataactttctttaactaaacgtgttgccagttctctctcccgaacaggtttcttcaatggagggtgtattgcccttgtgggccacttcattgaggtcaacgaattcaaagccattgcataagagagtgcagttaggtgtgagagtttcctctctccctcgtctagatatgtaagctctatactagattatcataattttcgggtaaagaatcggctcaagcttgacatatttgtgtgcaggttgcagctgctaaatggtgttggagcttcttcatacaagaatggtttgattgatttatttttccacaatctttcaaggacattagtttctctgtccatacttgacgtaagctcggttcttgtctgttgttgtacactcctgcagctaagtatttattggctcacataaagggaaatgttagtgtgatcttgcacaaagattcaaaacctgcagatgtgttgaaatcatatattcatgccattgttttggcaaaccttatggaaaagagcacatctttttattcagaaggagaagcttggattgataaacactatgacgaattgctccacaaggtaagattaaatcactaggaccagttaaaccgtgtttttatgacactaaagctactgttttcactctttttctttctgttgtttcccatgtagctgagatcaggaggttggaaaacagagcgtcttctttcgccttccattacttggagagctaattggatatctcacacttccgctgctaagttcgactgagctttatcgcctttcaagatcaaaatagtttgttaactcgttgcaaacatacaaaaatatgttagttctaagtcatgtaaaacatgtaaccgataccggtttaaccgtaaaatgtcggtttaacattgtataacgtttgttattaatggaaaattaaagaattataataatggcaaccgttttatttttttggaaacgcaaaaattggaatcggaaccgcttcgaacgtataaatacttcaattttgtgattctctttcattatcacttcatgttcatcgtttagctcgtagctgaagctaattccacaactccggccaataattccgccggcgaatggaatccacggtgagtatttcgtttatagtcagacacttgtaccctagtttttggaattcgattaatttattgtttgttaatgctattaggtcatgcctgggtttgatagaattagcgaattgccggaatctttgattagtcaaatactgttacaccttccgactaaagcttctgtgaagacgagtgttttatcgactagatggaagaatctatggcttaatgttcccggacttgatttgaactgccgtgattt
